United States Patent Application Publication US 2017/0114356 A1 - sequence listing, part 100

SEQ ID NO: 182439 - protein, 318 aa, Zea Mays
MAVEKSSSGTSTPSTTSTMDRFQKIVLSWDYLRLIAESKGGKQAKVLQHVKNTYVSVAEYLGVFEPLLFEEVKAQIIQGRSNDEEESGMDWRRGAVGSCTESEGFHKLSVAVEDNFQDNVSENDLLLISKEKFEEGSTPNAYAFALVEQRGGGIHISLRTFVAGEIQNLNVAKPVKSTRLQHFASIIASQNSLLWILKVCSLSTIMREFTAMHSVASLPFKDLILSATEAHKDGDDQSRAWNVPEPLMDYLKVNLNDSQLEAVNVFHADPLFLFRALQEQERHKLFLDSLVPFSILLLQECRSSNKATWLFFIFWCME

SEQ ID NO: 182440 - protein, 751 aa, Zea Mays
MAVEKSSSGTSTPSTTSTMDRFQKIVLSWDYLRLIAESKGGKQAKVLQHVKNTYVSVAEYLGVFEPLLFEEVKAQIIQGRSNDEEESGMDWRRGAVGSCTESEGFHKLSVAVEDNFQDNVSENDLLLISKEKFEEGSTPNAYAFALVEQRGGGIHISLRTFVAGEIQNLNVAKPVKSTRLQHFASIIASQNSLLWILKVCSLSTIMREFTAMHSVASLPFKDLILSATEAHKDGDDQSRAWNVPEPLMDYLKVNLNDSQLEAVNAGLSRRSFVLIQGPPGTGKTQTILGLLSAVLHSAPARMQIKGGFDVLKHGPELDIDGKRAHWIKASPWLLGANPRDLIMPVDGDDGFYPTGNELKPEIVSSNRKYRAHVLVCAPSNSALDEIVLRVLKTGIRDENNNTYNPKIVRIGVKALHSVKAVSMDYLIQQKLSGVDRTLDGGRRGAGEYDRIRASILDEAAIVFSTLSFSGSSIFSRMTRAFDVVIIDEAAQAVEPATLIPLIHGCRQIFLVGDPVQLPATVISQTAQKLGYGTSLFKRFQAAGFPVQMLKIQYRMHPEISTFPSKEFYEGVLQDGEGLSRKRPWHSYSCFGPFCFFDVDGIESQPSGSGSWVNQDEVEFITLLYHQLALRYPELKSSPEVGVISPYRHQVKLLKDSFRSTFGDQSRELIDVSTVDGFQGREKEIVIFSCVRCNKEQKIGFVSDFRRMNVAITRAKSAVLVVGSASTLKQDKHWNNLVESAKERNCLFKRIT

SEQ ID NO: 182441 - protein, 941 aa, Zea Mays
MMEQYKGASFGELSPHLFAIADACYRALINDQASQAILVSGESGAGKTETTKMLMRYLAFMGGRSGTEGRTVEQQVLESNPVLEAFGNAKTVKNNNSSRFGKFVEIQFDKHGKISGAAVRTYLLERSRVCQVSDPERNYHCFYMLCSAPPEDVKRFKVGDPRSFHYLNQTNCYEVANVDDAREYIETRNAMDIVGIDQEEQDAIFRVVAAILHLGNINFSKGQEIDSSKLRDDKSVHHLKTVAELLMCDEKALEDSLCQRVIVTPDGNITKPLDPGSAALSRDALAKTVYSRLFDWIVDKINNSIGQDPDATNIIGVLDIYGFESFKINSFEQLCINLTNEKLQQHFNQHVFKMEQEEYTREEIDWSYVEFVDNQDVLDLIEKKPGGIIALLDEACMFPKSTHETFAQKMYQTYKVHKRFSKPKLARTAFTINHYAGDVTYQADQFLDKNKDYVVAEHQALLNSSRCPFVANLFPPLPEETSKQSKFSSIGTRFKQQLQSLMETLNTTEPHYIRCVKPNAVLKPGIFENYNVLNQLRCGGVLEAIRISCAGYPTKRTFDEFIDRFGMLAPELVDSSDEKAACAAICDRMGLKGYQIGKTKVFLRAGQMAELDARRAEILANAARLIQRRIKTHLMRKEFIKLRKASVQSQKFWRARLAKKIFEYMRRDAASIRIQKHVRAHSARKAYLQVYESATAIQTGLRAMAARNEHRFRRETRASIIIQTRWRQHRAYTAYKQQQKASLILQCLWRARIARKELRKLRMEARETGALKEAKDKLEKRVEELTWRLDVEKRLRADLEEAKSHEIEKLQSALQKMQENLEEAHAAIVNEKEAAKLAIEQAPPKIVEVPVIDNAKLEELTTQNKELEDELSTFKQKAEDLENKLIEFQKQSDELSQETQEQASKVTELQELVERLEASLSNMESEYPFLRHILMSYEKVS

SEQ ID NO: 182442 - protein, 590 aa, Zea Mays
MGTPVNIIVGSHVWLEDPGEAWVDGVVTEIKGGDATIATTNGKTVVASLGSVYPKDTEAPPAGVDDMTKLAYLHEPGVLHNLSCRYGLNEIYTYTGNILIAVNPFQRLPHLYDVHMMEQYKGASFGELSPHLFAIADACYRALINDQASQAILVSGESGAGKTETTKMLMRYLAFMGGRSGTEGRTVEQQVLESNPVLEAFGNAKTVKNNNSSRFGKFVEIQFDKHGKISGAAVRTYLLERSRVCQVSDPERNYHCFYMLCSAPPEDVKRFKVGDPRSFHYLNQTNCYEVANVDDAREYIETRNAMDIVGIDQEEQDAIFRVVAAILHLGNINFSKGQEIDSSKLRDDKSVHHLKTVAELLMCDEKALEDSLCQRVIVTPDGNITKPLDPGSAALSRDALAKTVYSRLFDWIVDKINNSIGQDPDATNIIGVLDIYGFESFKINSFEQLCINLTNEKLQQHFNQHVFKMEQEEYTREEIDWSYVEFVDNQDVLDLIEKKPGGIIALLDEACMFPKSTHETFAQKMYQTYKVHKRFSKPKLARTAFTINHYAGDVTYQADQFLDKNKDYVVAEHQALLNSSSNNCNPSWKH

SEQ ID NO: 182443 - protein, 1370 aa, Zea Mays
MPDNTGLEIGLKGSKGAPMPGTEGRVAKDLKKAPASLEESNASRDEDPGGGPALTGKKRKDRRGSADDNRNVTRRVLRSDAMKLRAEAEAPCGAGVEVSKTDSLERKHCDTTVEAEACKSSVLMEVACNGGEANGLVNLDASDVSEESTRCSDNNMGMPGVPATDFSQDGGLAQGSIAESDDKTVKSDEVSAVTHSEQNDSQAGINSYNADEAQDNKVRHGPCQDEVIDSAITNGANTSTDLTKTSPTSGSESVKQDDSKQENNLVHTEGVILHSGDPKVENHSQIEDTCTETEISLTGNGRCAADNHTDRTGYTKQEERGSPVNETNDISAHDIVFTRRGRKSCEAKQGTCEEESRFEKRVTRSATVRQREVSGSLCKTTTNETALGSRGRKGDIIAHYTRKVSSAVSPKGHHAELGECNTSMENQTVKQKVVDRRDSGATKNDNDANDTKNKESEKTEINLKTQPPVGSVSIVNKTTVGAVSVVGQSISGSAITERNDTDHTDSDGVKYENMTLVQKLLLSVGAKIVASKKRVLEAGPDKTTGRSPIALPSMKKTRNTSSDPEIDQPDKSSGEKLIGNNCDLGNKRVLRERQHQNQTYLSSRSSNQSNQNAIKQTQDQSDDDDISSDTSYRRTRSGRRRGAARLAVPKQEDSSDSEEVVVVKKNRRKRKKSVHKHRAGSKLKHTSGSPPKTGRLGRPPLVKSECGCLPLQPGKGKMNVPEGTGALREEKQKISDQIKAMLLDAGWTIDLRPRNGRNYMDSVYIHPSGKGSYWSVTKAYYVFRADMESEQKESSKDHILSKKSVGSPGKRQVSSSSGCTLTDDILSKLKRVVVNKRTTKVEIQRLRQKKEKKNTTNSTRLHLGNERKKRGGCALLVRGSNKESGSTTDGFVPYEWKRTIFSWLIDLNVLSVNTKLNCLDESHSKVLLEGFVTRDGINCSCCSEVISVPEFVTHAGSEVNKPYRNILVDGLDIDLLHCLINAWNMQSDAERQDFFPVSIEGDDPNDDTCGICGDGGNLICCDGCPSTFHMSCLGLEALPTDYWCCSNCSCKFCHEHSSDDAEDTADVDSSLHTCSQCEEQYHGACSPDIDSIATNLSSQTGNLFCQQSCRLNLLAVKKDLEPEYSCRVVQRIHEEVPEEVLALDKRVECNSKIAVALSLMDECFLPIVDQRTGINLIRNVVYNCGSNFARLDFRGFYIIILERGDEIIAAASVRIHGTKLAEMPFIGTRNMYRRQGMCRRLVDGIEMILSSLNIEKLIIPAITELVDTWTSKFGFSPLDDSEKQEVKSVSMLVFPGTGLLQKPLLKTSPSEDQCSQGDKTEKSSDVVNEDSLCSGASADPLGSVVKEHGDTSKDADGTCNGDVSQRSPLS

SEQ ID NO: 182444 - protein, 1367 aa, Zea Mays
MPDNTGLEIGLKGSKGAPMPGTEGRVAKDLKKAPASLEESNASRDEDPGGGPALTGKKRKDRRGSADDNRNVTRRVLRSDAMKLRAEAEAPCGAGVEVSKTDSLERKHCDTTVEAEACKSSVLMEVACNGGEANGLVNLDASDVSEESTRCSDNNMGMPGVPATDFSQDGGLAQGSIAESDDKTVKSDEVSAVTHSEQNDSQAGINSYNADEAQDNKVRHGPCQDEVIDSAITNGANTSTDLTKTSPTSGSESVKQDDSKQENNLVHTEGVILHSGDPKVENHSQIEDTCTETEISLTGNGRCAADNHTDRTGYTKQEERGSPVNETNDISAHDIVFTRRGRKSCEAKQGTCEEESRFEKRVTRSATVRQREVSGSLCKTTTNETALGSRGRKGDIIAHYTRKVSSAVSPKGHHAELGECNTSMENQTVKQKVVDRRDSGATKNDNDANDTKNKESEKTEINLKTQPPVGSVSIVNKTTVGAVSVVGQSISGSAITERNDTDHTDSDGVKYENMTLVQKLLLSVGAKIVASKKRVLEAGPDKTTGRSPIALPSMKKTRNTSSDPEIDQPDKSSGEKLIGNNCDLGNKRVLRERQHQNQTYLSSRSSNQSNQNAIKQTQDQSDDDDISSDTSYRRTRSGRRRGAARLAVPKQEDSSDSEEVVVVKKNRRKRKKSVHKHRAGSKLKHTSGSPPKTGRLGRPPLVKSECGCLPLQPGKGKMNVPEGTGALREEKQKISDQIKAMLLDAGWTIDLRPRNGRNYMDSVYIHPSGKGSYWSVTKAYYVFRADMESEQKESSKDHILSKKSVGSPGKRQVSSSSGCTLTDDILSKLKRVVVNKRTTKVEIQRLRQKKEKKNTTNSTRLHLGNERKKRGGCALLVRGSNKESGSTTDGFVPYEWKRTIFSWLIDLNVLSVNTKLNCLDESHSKVLLEGFVTRDGINCSCCSEVISVPEFVTHAGSEVNKPYRNILVDGLDIDLLHCLINAWNMQSDAERQDFFPVSIEGDDPNDDTCGICGDGGNLICCDGCPSTFHMSCLGLEALPTDYWCCSNCSCKFCHEHSSDDAEDTADVDSSLHTCSQCEEQCTEACSPDIDSIATNLSSQTGNLFCQQSCRLLFEELQNLLAVKKDLEPEYSCRVVQRIHEEVPEEVLALDKRVECNSKIAVALSLMDECFLPIVDQRTGINLIRNVVYNCGSNFARLDFRGFYIIILERGDEIIAAASVRIHGTKLAEMPFIGTRNMYRRQGMCRRLVDGIEMILSSLNIEKLIIPAITELVDTWTSKFGFSPLDDSEKQEVKSVSMLVFPGTGLLQKPLLKTSPSEDQCSQGVNEDSLCSGASADPLGSVVKEHGDTSKDADGTCNGDVSQRSPLS

SEQ ID NO: 182445 - protein, 1367 aa, Zea Mays
MPDNTGLEIGLKGSKGAPMPGTEGRVAKDLKKAPASLEESNASRDEDPGGGPALTGKKRKDRRGSADDNRNVTRRVLRSDAMKLRAEAEAPCGAGVEVSKTDSLERKHCDTTVEAEACKSSVLMEVACNGGEANGLVNLDASDVSEESTRCSDNNMGMPGVPATDFSQDGGLAQGSIAESDDKTVKSDEVSAVTHSEQNDSQAGINSYNADEAQDNKVRHGPCQDEVIDSAITNGANTSTDLTKTSPTSGSESVKQDDSKQENNLVHTEGVILHSGDPKVENHSQIEDTCTETEISLTGNGRCAADNHTDRTGYTKQEERGSPVNETNDISAHDIVFTRRGRKSCEAKQGTCEEESRFEKRVTRSATVRQREVSGSLCKTTTNETALGSRGRKGDIIAHYTRKVSSAVSPKGHHAELGECNTSMENQTVKQKVVDRRDSGATKNDNDANDTKNKESEKTEINLKTQPPVGSVSIVNKTTVGAVSVVGQSISGSAITERNDTDHTDSDGVKYENMTLVQKLLLSVGAKIVASKKRVLEAGPDKTTGRSPIALPSMKKTRNTSSDPEIDQPDKSSGEKLIGNNCDLGNKRVLRERQHQNQTYLSSRSSNQSNQNAIKQTQDQSDDDDISSDTSYRRTRSGRRRGAARLAVPKQEDSSDSEEVVVVKKNRRKRKKSVHKHRAGSKLKHTSGSPPKTGRLGRPPLVKSECGCLPLQPGKGKMNVPEGTGALREEKQKISDQIKAMLLDAGWTIDLRPRNGRNYMDSVYIHPSGKGSYWSVTKAYYVFRADMESEQKESSKDHILSKKSVGSPGKRQVSSSSGCTLTDDILSKLKRVVVNKRTTKVEIQRLRQKKEKKNTTNSTRLHLGNERKKRGGCALLVRGSNKESGSTTDGFVPYEWKRTIFSWLIDLNVLSVNTKLNCLDESHSKVLLEGFVTRDGINCSCCSEVISVPEFVTHAGSEVNKPYRNILVDGLDIDLLHCLINAWNMQSDAERQDFFPVSIEGDDPNDDTCGICGDGGNLICCDGCPSTFHMSCLGLEALPTDYWCCSNCSCKFCHEHSSDDAEDTADVDSSLHTCSQCEEQYHGACSPDIDSIATNLSSQTGNLFCQQSCRLLFEELQNLLAVKKDLEPEYSCRVVQRIHEEVPEEVLALDKRVECNSKIAVALSLMDECFLPIVDQRTGINLIRNVVYNCGSNFARLDFRGFYIIILERGDEIIAAASVRIHGTKLAEMPFIGTRNMYRRQGMCRRLVDGIEMILSSLNIEKLIIPAITELVDTWTSKFGFSPLDDSEKQEVKSVSMLVFPGTGLLQKPLLKTSPSEDQCSQGVNEDSLCSGASADPLGSVVKEHGDTSKDADGTCNGDVSQRSPLS

SEQ ID NO: 182446 - protein, 57 aa, Zea Mays
MVLQNDIDLLNPPAELEKLKHKKKRLVQSPNSFFMDVKCQGCFSINCILVKVVSLSC

SEQ ID NO: 182447 - protein, 230 aa, Zea Mays
MYFRPPPKGPEWYASDAETGQAARPLYPMMLEDPRLRWAFIRKVYSILSIQMLLTVAVAAVVVALPSVLLLPAPPGEPAAARPLHRGHQLRRRPHLRLHQRGGDPRVGGPHGGGGAEPHGVHVLGGEARPRLQLPGPVPVRRRHDPHAVRAHPALLPARPHLAHDIRGTGGARLLRLHHLRHRQPHQALLLRRVRLGRRRALPRRHQPLPLPPHALPGGGFVSTATCQLA

SEQ ID NO: 182448 - protein, 258 aa, Zea Mays
MGALPVAHSLALTAAFLPCRRPAAHGRCRRRRYRAVVAYMEPNPNSPAAIAGRLVGALPIVGLVARILNDEGGVGGDIIDFAEFRRRVSKKCTVMDSKAFYDFNQRRGKPGDPFYVLLCCWLAAIGAGLLKTEEILEGVARLRISNDIEFEEETFIDMMRAAKEIPMETRAEKALEAIYVCCFGQDMVEDEDEKLLRAILNAVFPSVGRAAVERMVASMAKQVASGERKRDGRTVSKEVQQRQLKDLEFLKQNKLESS

SEQ ID NO: 182449 - protein, 188 aa, Zea Mays
MVMVSGGGGNAWAKEMTLRRRIASIFNKTQEHFPTLKDYNDYLEEVEDMTFNLIEGIDVEEIEAKIARYQQENAEQIYLSRAKRAEDLAAALKASRMNPVKAEANDTGISGGAGVQGQYAPAAVLGGVAQPRPTGMAPQLIGSGSDPLQGDDEETRRLRAERAARAGGWTAELSKRRALEEAFSAIFI

SEQ ID NO: 182450 - protein, 95 aa, Zea Mays
MVMVSGGGGNAWAKEMTLRRRIASIFNKTQEHFPTLKDYNDYLEEVEDMTFNLIEGIDVEEIEAKIARYQQENAEQIYLSRAKRKILRQHLKQAG

SEQ ID NO: 182451 - protein, 528 aa, Zea Mays
MLMCMSMRLCQRLRAPLCCNVDNLKSNLLEKLEECLLNFQNETTHASIGDISKTFRAYLIIFPDSERRLIELAQALFLNRYETVRENLKKRIPSTDLLAMLRSLWEDATIIDEVISEAALPAFSLETTRDIVKQHIATAFLHLQSEISEALVRTHSTSNEKLEESQLQTAMETSKIKVSQGCIDLLQEFHHLVDGNIELLVKLRDLIIDWVQEGFQEFFQKLDGHFHVLSGRSKTNLQEPTMDSMQTDKTPTVLVLMLAQLCVYIEQTTVPKVTEELASFFGGGAHSYEYGPPFVPGEICRLYRSSGEKFLHHYINMKTQKISKLLNKRFTTPVWIKHKEPREVNMFVDLLLLEINGLVSEVKQILPGMVRRHRHSDSTGSTTSSRSNPMREDMLNRSNTHRARSQFLENHLAKLFEQKMEIFTKVEYTQESVISTVLKLCLKSLQEFVRLQTFNRSGFQQIQLDMEFLKTSLKEFVDDEAAISFLLKEVNNAAHERCLDPIPLEPPILDKLINAKLAKIKERNPNMR

SEQ ID NO: 182452 - protein, 610 aa, Zea Mays
MFGRDPWGGPLEISNADSATDDDRSRDLDRAALMRQLDETQQSWLLAGPGDQAGKKKKRYVDLGCVVVDRKIFMWTVGTILGLGVFIGFIMMIVKLVPHKRPPPPPPDQYTQALHKALMFFNAQRSGPLPKHNGVSWRGNSCMKDGLSDSTVRRSLVGGFYDAGDAIKFNYPMAWSMTMLSWSVIEYRAKYEAIGELDHIKELIKWGTDYILKTFNSSADTIDRIVAQVGVGDTSKGSSQPNDHYCWMRPEDIDYKRPVTECHSCSDLASEMAAALAAASIVFKDSKTYSDKLVKGAKALYKFGRLQRGRYSPNGSDQAIFYNSTSYWDEFVWGGAWMYFATGNNSYLTVATAPGMAKHAGAYWFGSPNYGVFTWDDKLPGAQVLLSRLRLFLSPGYPYEEILRTFHNQTDNVMCSYLPLFNSFNFTKGGLIQLNHGRPQPLQYAVNAAFLASLYSDYLEAADTPGWYCGPNFYTTEVLRKFARSQLDYILGKNPLKMSYVVGFGNKYPKRPHHRGASIPHNGVKYGCKGGYKWRDTKKANPNRRDGYKDVRTNYNYTEPTLAANAGLVAALISISDIKTGRFGIDKNTIFSAIPPMFPTPPPPPSAWKP

SEQ ID NO: 182453 - protein, 124 aa, Zea Mays
MDPWVISEVLKPNLECTGFIDVSQIHMLRVEKFLANAEKSHGKYPSFDYISVTPPYLEVNYSTLLAQLARSPLVGKDCFILVEYPLKTDMAESCGNLVQIADRRFGRTNLLIYGPTWSEKKKKR

SEQ ID NO: 182454 - protein, 158 aa, Zea Mays
MQRRIRGSTPIILNLFVMIVAANWCDFEWYAFSFHFLQEERKDRRRRRQSGRGEQTAEAAVTPAKVEEPRETHKMLQVLGGKVRRRKLLSPKDRNVRPMMEVVRGAAFDILQSAGGSPASLRPGRWLDLYSGTGSVGIEAMSRGCSEVVQKFILKLQS

SEQ ID NO: 182455 - protein, 263 aa, Zea Mays
MASSTLPAYPFRMSLPGLRAPDPAKEERKDRRRRRQSGRGEQTAEAAVTPAKVEEPRETHKMLQVLGGKVRRRKLLSPKDRNVRPMMEVVRGAAFDILQSAGGSPASLRPGRWLDLYSGTGSVGIEAMSRGCSEAHFVEMDPWVISEVLKPNLECTGFIDVSQIHMLRVEKFLANAEKSHGKYPSFDYISVTPPYLEVNYSTLLAQLARSPLVGKDCFILVEYPLKTDMAESCGNLVQIADRRFGRTNLLIYGPTWSEKKKKR

SEQ ID NO: 182456 - protein, 241 aa, Zea Mays
MQRRIRGSTPIILNLFVMIVAANWCDFEWYAFSFHFLQEERKDRRRRRQSGRGEQTAEAAVTPAKVEEPRETHKMLQVLGGKVRRRKLLSPKDRNVRPMMEVVRGAAFDILQAHFVEMDPWVISEVLKPNLECTGFIDVSQIHMLRVEKFLANAEKSHGKYPSFDYISVTPPYLEVNYSTLLAQLARSPLVGKDCFILVEYPLKTDMAESCGNLVQIADRRFGRTNLLIYGPTWSEKKKKR

SEQ ID NO: 182457 - protein, 299 aa, Zea Mays
MASSTLPAYPFRMSLPGLRAPDPAKVKHVSVRAPARRLPVAASAAPSGAAAAAARERRRFLESYGLNPNDFEEDAEENPREERKDRRRRRQSGRGEQTAEAAVTPAKVEEPRETHKMLQVLGGKVRRRKLLSPKDRNVRPMMEVVRGAAFDILQSAGGSPASLRPGRWLDLYSGTGSVGIEAMSRGCSEAHFVEMDPWVISEVLKPNLECTGFIDVSQIHMLRVEKFLANAEKSHGKYPSFDYISVTPPYLEVNYSTLLAQLARSPLVGKDCFIIADRRFGRTNLLIYGPTWSEKKKKR

SEQ ID NO: 182458 - protein, 196 aa, Zea Mays
MRGLVDGVDAALERRELAPDAEVDDVRVVGAVADDEAGDEGRVHGGLYLEVDKAGEAAHLARDALGLARVQLHGGGHQHPERDHLRRRRGAGLAVRDGGGHAAVPVQERPQEVERERLERGRDWDWDWDWDGRGGPVDVLDADVAAVPAQRLRLPPRAVRMGPPRGRRGARLRRHEMAAWADGLVQDLHRYPAREQ

SEQ ID NO: 182459 - protein, 99 aa, Zea Mays
MCNIDFGLPVVEDVGLPNGSGAPAEKADAKKSKKTRQKRKARDEESTEEKRNNFNFFAFKEPVLFVGHLQDSSILMVEKRWMDVVEGFSAPVDRHIYGT

SEQ ID NO: 182460 - protein, 411 aa, Zea Mays
MLISGGDDTKLFAYSAREFTQFAPHNFCPAPQRPLIKMARDSTVNGDSVMLVQSPNWLDILLVTVQNKLTTPSTSSSRGDATVRQLARLKSKGSRKIISSAASANGTLLAYSDGVRPCLFALRHKGGKKYTLDKLELPKGLPCSQSMAFTVDSSNLILAGRNGKIYIIDIATREISNVFHPTRKADGAKISRESPITKMFLSADGQWLAAVNCYGDIYVFNLEVQRQHWFISRMNGGSVTSGGFCPKNNTLVITTSKNEVYVFDVEAKQLGEWSKRYTHQLPRSFQEFPGEVIGLSFPPQSSSSVVVYSTRAMCNIDFGLPVVEDVGLPNGSGAPAEKADAKKSKKTRQKRKARDEESTEEKRNNFNFFAFKEPVLFVGHLQDSSILMVEKRWMDVVEGFSAPVDRHIYGT

SEQ ID NO: 182461 - protein, 812 aa, Zea Mays
MDKLRVHRCTGDAVEWSPSPIVALAASPCASQVAAAREDGSLELWLVSPGSVGWHNQLTIQGNAASRVTSLVWGRRGGVTGRLLSSSIDGSVSEWDLFHLQQKDTVGVPIWQMAIEPLDDAKNTENNSSEFAVNGHTNQNDSSDSDFSNIDDGDNSEDEDGSTNTRSSYHGNDFQRMALACDDGSVRLFNVPDSGALTYYRFLPRVSGRSLSVTWSSNAKFVFSGSSDGLIRCWDSTSFHEMYRITAGLGGAGTSPELCIWTLLFLRCGTIVSGDSTGSVQFWDSRHGTLLQAHSYHKGDVNALTTVPGENRVFSAGSDGQVILYKISKDEFGATKNVVKEQVHKWVYVGYVRAHTHDVRALTMAVPICREDTSPEEKVVKIRRREKHEFSYHKWAHLGVPMLISGGDDTKLFAYSAREFTQFAPHNFCPAPQRPLIKMARDSTVNGDSVMLVQSPNWLDILLVTVQNKLTTPSTSSSRGDATVRQLARLKSKGSRKIISSAASANGTLLAYSDGVRPCLFALRHKGGKKYTLDKLELPKGLPCSQSMAFTVDSSNLILAGRNGKIYIIDIATREISNVFHPTRKADGAKISRESPITKMFLSADGQWLAAVNCYGDIYVFNLEVQRQHWFISRMNGGSVTSGGFCPKNNTLVITTSKNEVYVFDVEAKQLGEWSKRYTHQLPRSFQEFPGEVIGLSFPPQSSSSVVVYSTRAMCNIDFGLPVVEDVGLPNGSGAPAEKADAKKSKKTRQKRKARDEESTEEKRNNFNFFAFKEPVLFVGHLQDSSILMVEKRWMDVVEGFSAPVDRHIYGT

SEQ ID NO: 182462 - protein, 449 aa, Zea Mays
MAVPICREDTSPEEKVVKIRRREKHEFSYHKWAHLGVPMLISGGDDTKLFAYSAREFTQFAPHNFCPAPQRPLIKMARDSTVNGDSVMLVQSPNWLDILLVTVQNKLTTPSTSSSRGDATVRQLARLKSKGSRKIISSAASANGTLLAYSDGVRPCLFALRHKGGKKYTLDKLELPKGLPCSQSMAFTVDSSNLILAGRNGKIYIIDIATREISNVFHPTRKADGAKISRESPITKMFLSADGQWLAAVNCYGDIYVFNLEVQRQHWFISRMNGGSVTSGGFCPKNNTLVITTSKNEVYVFDVEAKQLGEWSKRYTHQLPRSFQEFPGEVIGLSFPPQSSSSVVVYSTRAMCNIDFGLPVVEDVGLPNGSGAPAEKADAKKSKKTRQKRKARDEESTEEKRNNFNFFAFKEPVLFVGHLQDSSILMVEKRWMDVVEGFSAPVDRHIYGT

SEQ ID NO: 182463 - protein, 700 aa, Zea Mays
MAIEPLDDAKNTENNSSEFAVNGHTNQNDSSDSDFSNIDDGDNSEDEDGSTNTRSSYHGNDFQRMALACDDGSVRLFNVPDSGALTYYRFLPRVSGRSLSVTWSSNAKFVFSGSSDGLIRCWDSTSFHEMYRITAGLGGAGTSPELCIWTLLFLRCGTIVSGDSTGSVQFWDSRHGTLLQAHSYHKGDVNALTTVPGENRVFSAGSDGQVILYKISKDEFGATKNVVKEQVHKWVYVGYVRAHTHDVRALTMAVPICREDTSPEEKVVKIRRREKHEFSYHKWAHLGVPMLISGGDDTKLFAYSAREFTQFAPHNFCPAPQRPLIKMARDSTVNGDSVMLVQSPNWLDILLVTVQNKLTTPSTSSSRGDATVRQLARLKSKGSRKIISSAASANGTLLAYSDGVRPCLFALRHKGGKKYTLDKLELPKGLPCSQSMAFTVDSSNLILAGRNGKIYIIDIATREISNVFHPTRKADGAKISRESPITKMFLSADGQWLAAVNCYGDIYVFNLEVQRQHWFISRMNGGSVTSGGFCPKNNTLVITTSKNEVYVFDVEAKQLGEWSKRYTHQLPRSFQEFPGEVIGLSFPPQSSSSVVVYSTRAMCNIDFGLPVVEDVGLPNGSGAPAEKADAKKSKKTRQKRKARDEESTEEKRNNFNFFAFKEPVLFVGHLQDSSILMVEKRWMDVVEGFSAPVDRHIYGT

SEQ ID NO: 182464 - protein, 610 aa, Zea Mays
MAIEPLDDAKNTENNSSEFAVNGHTNQNDSSDSDFSNIDDGDNSEDEDGSTNTRSSYHGNDFQRMALACDDGSVRLFNVPDSGALTYYRFLPRVSGRSLSVTWSSNAKFVFSGSSDGLIRCWDSTSFHEMYRITAGLGGAGTSPELCIWTLLFLRCGTIVSGDSTGSVQFWDSRHGTLLQAHSYHKGDVNALTTVPGENRVFSAGSDGQVILYKISKDEFGATKNVVKEQVHKWVYVGYVRAHTHDVRALTMAVPICREDTSPEEKVVKIRRREKHEFSYHKWAHLGVPMLISGGDDTKLFAYSAREFTQFAPHNFCPAPQRPLIKMARDSTVNGDSVMLVQSPNWLDILLVTVQNKLTTPSTSSSRGDATVRQLARLKSKGSRKIISSAASANGTLLAYSDGVRPCLFALRHKGGKKYTLDKLELPKGLPCSQSMAFTVDSSNLILAGRNGKIYIIDIATREISNVFHPTRKADGAKISRESPITKMFLSADGQWLAAVNCYGDIYVFNLEVQRQHWFISRMNGGSVTSGGFCPKNNTLVITTSKNEVYVFDVEAKQLGEWSKRYTHQLPRSFQEFPGEVIGLSFPPQSSSSVVVYSTRSFFFCTEGPP

SEQ ID NO: 182465 - protein, 271 aa, Zea Mays
MAAEPAAADHDLRPPLADGAAAAGVGAASLAAAAGAAEALMSATSEQLTLVYQGDVYVFDPVPPQKVQAVLLVLGGYEVPPGLVNMAVSSANDEKNTTVAARRVASLMRFREKRKERCFDKRIRYSVRKEVAQKMKRRKGQFAGRSDFGDGACSSAACGSPANGEDDHFRETHSRLTPAMRRGPAGPRSLCNACGLMWANKGTLRSPLNAPKMTQQLLANPCNMVDTDDKNSNVLPVEHNQATPKTDSMMPKEEQKLDIRLPTEEDTKAVS

SEQ ID NO: 182466 - protein, 173 aa, Zea Mays
MAAEPAAADHDLRPPLADGAAAAGVGAASLAAAAGAAEALMSATSEQLTLVYQGDVYVFDPVPPQKVQAVLLVLGGYEVPPGLVNMAVSSANDEKNTTVAARRVASLMRFREKRKERCFDKRIRYSVRKEVAQKMKRRKGQFAGRSDFGDGACSSAACGSPANGEDDHFRETQ

SEQ ID NO: 182467 - protein, 171 aa, Zea Mays
MAAEPAAADHDLRPPLADGAAAAGVGAASLAAAAGAAEALMSATSEQLTLVYQGDVYVFDPVPPQKAVLLVLGGYEVPPGLVNMAVSSANDEKNTTVAARRVASLMRFREKRKERCFDKRIRYSVRKEVAQKMKRRKGQFAGRSDFGDGACSSAACGSPANGEDDHFRETQ

SEQ ID NO: 182468 - protein, 276 aa, Zea Mays
MAAEPAAADHDLRPPLADGAAAAGVGAASLAAAAGAAEALMSATSEQLTLVYQGDVYVFDPVPPQKAVLLVLGGYEVPPGLVNMAVSSANDEKNTTVAARRVASLMRFREKRKERCFDKRIRYSVRKEVAQKMKRRKGQFAGRSDFGDGACSSAACGSPANGEDDHFRETHCQNCGISSRLTPAMRRGPAGPRSLCNACGLMWANKGTLRSPLNAPKMTQQLLANPCNMVDTDDKNSNVLPVEHNQATPKTDSMMPKEEQKLDIRLPTEEDTKAVS

SEQ ID NO: 182469 - protein, 193 aa, Zea Mays
MKQAPLRPVAVTPHENPNGVPPPSPPPPHYSSLHRPRRFLLHRRQRDPARLRARRRDLRAHPPRGLFPGRCPARPPRRRPVAATSYPHGRRRTARRRRSRSRRGRRGGEGQGGEDGVRREAGGVRRRGEAQDHQGAEGVHESGSEGGQGSRGEGARRAEGWSSQRGGGEYRREDAGARRQDCSRVNDESCNLI

SEQ ID NO: 182470 - protein, 591 aa, Zea Mays
MLNTGKDSNAEEKKTQETWSRKDSATNRTKDTPATRVPPPRVRAPVRRGAAAVTRNRSLPRPQRACRHCAATPATRGVASHVNTGRVSRACQVRSVAMKCVSGAYFEPDFDPLLDRLGTPGVVVDNETREDCTLVKVDSVNRDGVLLDMVQLLTDLDLVISKSYICSDGGWLMDVFHVTDRTGRKLTDPSLPEFIQRALVRFHRTVNCASPRFTTCLGNVVGPAGPDVSGCAALEFTVNDRPGLLSSITSVLADSGCHVASGQAWTHNGRAAGVLYVTPPLPSRWARVERLVEAVVGARENVAGERHWTRVSGPARGRVHTERRLHQLMRDDRDYESGPAPTPVDEGLFGVGDKAATTARTARRARAATRVSVDSWEERGYVVVKMTSRDRPSLLFDTVCALTDMQYVVFHATVGSQGVLAIQEYYIRHKDGGTVDSSAERQKVSRCLVAAVERRATHGVRVEVHAADRSGLLSDFTRVLREHGLSLLRVELKRHRDEAFGVFYLDTDTGGEVRTEALRAVQMRVAEMGISLDVVKETKAPGWPPVRKTSVPAPPVAGQQPQEKPRPSLGSLLWSNLEKLSNNFNYIRSPA

SEQ ID NO: 182471 - protein, 92 aa, Zea Mays
MDVTLQGEVIRIQGDEFWHMTRVLRLGVNDKVELFNGVGSLAEGFIHKVDKGGSGVELLEDARIIAPQGIQWHVFAAFGTLKGGRADWLIEK

SEQ ID NO: 182472 - protein, 436 aa, Zea Mays
MASGSGLMSSARVRGPFTPPQWIELEHQALIYKYLSANSPVPHSLLVPIRRSGSLASSPYPPPYFGTSTFGWGSFQLGYSGNADLEPGRCRRTDGKKWRCSRDAVADQKYCERHMNRGRHRSRKHVEDQPGHAAKAMSAVAVAAAAAAATQHAAALAGAGATAAAGLAVNRHRQPGKSYATGATDPCSLQYSRELANKLSNESENMQDSDNVSMLTSMNTGNTAGSVFPFSKQNTALFEVSSSRPEFGLVPSDSLTSSPHSSLKSVKNLLSSRSLSEHQSSASLQHFVDWPRTPPAQGGLSWPEAEDMPRAQRSQLSVSAPMASSELSSASTSPIHDHEKLILSPLKLGREYTPSGVVSAAANRYEVSQLEATWATMFRDSSTGGPLGEVLAKNNSNAEARGCPSAAPPLTDYYCWDSGHGMQSSPVGVLQISVQL

SEQ ID NO: 182473 - protein, 303 aa, Zea Mays
MEAGGGASELGLLGAGSGRLLKHGRGDAAGGEDHGWVVVVGGGGRAKQARTASVGTGDAAATAAVPFLLGSCGGPGHGGERMLSFSSAAAAAPDDGGAMPPLYYGTPASCSGLMSSARVRGPFTPPQWIELEHQALIYKYLSANSPVPHSLLVPIRRSGSLASSPYPPPYFGTSTFGWGSFQLGYSGNADLEPGRCRRTDGKKWRCSRDAVADQKYCERHMNRGRHRSRKHVEDQPGHAAKAMSAVAVAAAAAAATQHAAALAGAGATAAAGLAVNRHRQPGKSYATGATDPCSLQYSRYSLL

SEQ ID NO: 182474 - protein, 231 aa, Zea Mays
MQDSDNVSMLTSMNTGNTAGSVFPFSKQNTALFEVSSSRPEFGLVPSDSLTSSPHSSLKSVKNLLSSRSLSEHQSSASLQHFVDWPRTPPAQGGLSWPEAEDMPRAQRSQLSVSAPMASSELSSASTSPIHDHEKLILSPLKLGREYTPSGVVSAAANRYEVSQLEATWATMFRDSSTGGPLGEVLAKNNSNAEARGCPSAAPPLTDYYCWDSGHGMQSSPVGVLQISVQL

SEQ ID NO: 182475 - protein, 322 aa, Zea Mays
MNRGRHRSRKHVEDQPGHAAKAMSAVAVAAAAAAATQHAAALAGAGATAAAGLAVNRHRQPGKSYATGATDPCSLQYSRELANKLSNESENMQDSDNVSMLTSMNTGNTAGSVFPFSKQNTALFEVSSSRPEFGLVPSDSLTSSPHSSLKSVKNLLSSRSLSEHQSSASLQHFVDWPRTPPAQGGLSWPEAEDMPRAQRSQLSVSAPMASSELSSASTSPIHDHEKLILSPLKLGREYTPSGVVSAAANRYEVSQLEATWATMFRDSSTGGPLGEVLAKNNSNAEARGCPSAAPPLTDYYCWDSGHGMQSSPVGVLQISVQL

SEQ ID NO: 182476 - protein, 542 aa, Zea Mays
MEAGGGASELGLLGAGSGRLLKHGRGDAAGGEDHGWVVVVGGGGRAKQARTASVGTGDAAATAAVPFLLGSCGGPGHGGERMLSFSSAAAAAPDDGGAMPPLYYGTPASCSGLMSSARVRGPFTPPQWIELEHQALIYKYLSANSPVPHSLLVPIRRSGSLASSPYPPPYFGTSTFGWGSFQLGYSGNADLEPGRCRRTDGKKWRCSRDAVADQKYCERHMNRGRHRSRKHVEDQPGHAAKAMSAVAVAAAAAAATQHAAALAGAGATAAAGLAVNRHRQPGKSYATGATDPCSLQYSRELANKLSNESENMQDSDNVSMLTSMNTGNTAGSVFPFSKQNTALFEVSSSRPEFGLVPSDSLTSSPHSSLKSVKNLLSSRSLSEHQSSASLQHFVDWPRTPPAQGGLSWPEAEDMPRAQRSQLSVSAPMASSELSSASTSPIHDHEKLILSPLKLGREYTPSGVVSAAANRYEVSQLEATWATMFRDSSTGGPLGEVLAKNNSNAEARGCPSAAPPLTDYYCWDSGHGMQSSPVGVLQISVQL

SEQ ID NO: 182477 - protein, 434 aa, Zea Mays
MSCQADLLLSYRCEVDLKALIPHIPRSCQSILMSATSSSDVDKLTKLLLHNPFVLTLSEVGQAKDDVIPKNVQQFWISCDAKDKILHILALLKFELIQKKVLIFVNSIDMAFRLRLILEKFGIRSAVLNAELPQNSRLHIIEAFNARLFDYLIATDDTKTKEKQTNEENKKEATLSRKRKKQTNKENQKEQKVSRKHLQQTLDAEFGVVRGIDFKNVFTVVNFDMPLDATGYVHRIGRTGRANKTGASISLVSPKEDSTFKEIEHMLQDVEKKDMDCISPFPLLTKDAVESLRYRAQDVARSVTTRDVQEARRQDIKNEILNSEKLKSHFEENPTDLDLLKHDKLLCNKEIPAYLRDVPDYLIDPKTKEASNAVKLSRAAMHIDKPQRRKRQGFKGGSGKSRDPLKTFSAEGKRGRRRKEREGEPDRRKKSKKA

SEQ ID NO: 182478 - protein, 325 aa, Zea Mays
MAFRLRLILEKFGIRSAVLNAELPQNSRLHIIEAFNARLFDYLIATDDTKTKEKQTNEENKKEATLSRKRKKQTNKENQKEQKVSRKHLQQTLDAEFGVVRGIDFKNVFTVVNFDMPLDATGYVHRIGRTGRANKTGASISLVSPKEDSTFKEIEHMLQDVEKKDMDCISPFPLLTKDAVESLRYRAQDVARSVTTRDVQEARRQDIKNEILNSEKLKSHFEENPTDLDLLKHDKLLCNKEIPAYLRDVPDYLIDPKTKEASNAVKLSRAAMHIDKPQRRKRQGFKGGSGKSRDPLKTFSAEGKRGRRRKEREGEPDRRKKSKKA

SEQ ID NO: 182479 - protein, 203 aa, Zea Mays
MAPHPQEDKSDRHSSGAGASREQERRPSKAWGILIFGLIGVTTASFAITQVRKSMDWFYTQSTSSWTWRYTSNNSSRGSFSEEAKKRYYQRMQQEYEEEQERVQRIRHMQSVFNRERNKFGRGYESWRENGPPRGYNYIPRDDWYWQTDTSHSEHKNRRTYTPAGPRVYPMSHHYAVLGLDRSRATPYTDAEVKFITELIMRM

SEQ ID NO: 182480 - protein, 399 aa, Zea Mays
MHGELDIVYDTLRRLEEAEGVKIDLLLCCGDFQAVRNENDLQCVSVPQKYRTMNTFWKYYSGEAVAPYPTIFIGGNHEASNYLWELYYGGWAAPNIYFLGFAGVVKFGNIRIGGLSGIHNKHHYHLGHYERPPYNKDTIRSVYHVRHYDVLKLMHLKEPLDVFLSHDWPLGITEYGNWQKLISVKKNFEDEVNNRTLGSKPAAELLNKLKPPYWFSAHLHCKFPAVIQHGKNGPTTKFLALDKCIPGRNFLQVIDIPSNPGPYEIQYDEEWLAITRKFNSVFPLARTQFTMRDEQLDTQEDRQWVRSKLNTRGAKPFDFVQTAPSFNPSSTTSKQSITVCCRNPQTESFLQLLELPYLLDSSKSEMFGRNESTSQTGNTLDNEDIELPDEDEDALEDDE

SEQ ID NO: 182481 - protein, 356 aa, Zea Mays
MSRSPCSNASRCAAVGGAAPSRTGSPFAAAGYSALHPGTPATPTPSSAAGYSALHPGVPAPRPPATRSGAPSSVLPPAPVSGAMKIAVEGCMHGELDIVYDTLRRLEEAEGVKIDLLLCCGDFQAVRNENDLQCVSVPQKYRTMNTFWKYYSGEAVAPYPTIFIGGNHEASNYLWELYYGGWAAPNIYFLGFAGVVKFGNIRIGGLSGIHNKHHYHLGHYERPPYNKDTIRSVYHVRHYDVLKLMHLKEPLDVFLSHDWPLGITEYGNWQKLISVKKNFEDEVNNRTLGSKPAAELLNKLKPPYWFSAHLHCKFPAVIQHGKNGPTTKFLALDKCIPGRNFLQDHMKSSMMKNGLQ

SEQ ID NO: 182482 - protein, 179 aa, Zea Mays
MSRSPCSNASRCAAVGGAAPSRTGSPFAAAGYSALHPGTPATPTPSSAAGYSALHPGVPAPRPPATRSGAPSSVLPPAPVSGAMKIAVEGCMHGELDIVYDTLRRLEEAEGVKIDLLLCCGDFQAVRNENDLQCVSVPQKYRTMNTFWKYYSGEAVAPYPTIFIGGNHEASNYLWELTL

SEQ ID NO: 182483 - protein, 295 aa, Zea Mays
MSRSPCSNASRCAAVGGAAPSRTGSPFAAAGYSALHPGTPATPTPSSAAGYSALHPGVPAPRPPATRSGAPSSVLPPAPVSGAMKIAVEGCMHGELDIVYDTLRRLEEAEGVKIDLLLCCGDFQAVRNENDLQCVSVPQKYRTMNTFWKYYSGEAVAPYPTIFIGGNHEASNYLWELYYGGWAAPNIYFLGFAGVVKFGNIRIGGLSGIHNKHHYHLGHYERPPYNKDTIRSVYHVRHYDVLKLMHLKEPLDVFLSHDWPLGITEYGNWQKLISVKKNFEDEVMYTLMRLAYFKA

SEQ ID NO: 182484 - protein, 192 aa, Zea Mays
MTRCEGSRRPRASRLTSSSAAAISRYYGGWAAPNIYFLGFAGVVKFGNIRIGGLSGIHNKHHYHLGHYERPPYNKDTIRSVYHVRHYDVLKLMHLKEPLDVFLSHDWPLGITEYGNWQKLISVKKNFEDEVNNRTLGSKPAAELLNKLKPPYWFSAHLHCKFPAVIQHGKNGPTTKFLALDKCIPGRNFLQG

SEQ ID NO: 182485 - protein, 246 aa, Zea Mays
MHLKEPLDVFLSHDWPLGITEYGNWQKLISVKKNFEDEVNNRTLGSKPAAELLNKLKPPYWFSAHLHCKFPAVIQHGKNGPTTKFLALDKCIPGRNFLQVIDIPSNPGPYEIQYDEEWLAITRKFNSVFPLARTQFTMRDEQLDTQEDRQWVRSKLNTRGAKPFDFVQTAPSFNPSSTTSKQSITVCCRNPQTESFLQLLELPYLLDSSKSEMFGRNESTSQTGNTLDNEDIELPDEDEDALEDDE

SEQ ID NO: 182486 - protein, 180 aa, Zea Mays
MYPYTFRAAASSSSSSTALGFALGRIGGTTRSGGVAAPGLVVPAAGVARGRSVSSTPAGSAPVPGDQGVGMEQPKQQQQQPKVPPQDAAGGENKRDDMHKHTRDVMTHSFGEGYSTRSDEEGFGGVYGGNDPVEHPGAEIHPSHSGLGGKGEGEGAPPQGREACHRLEAPAATSGRAVGV

SEQ ID NO: 182487 - protein, 340 aa, Zea Mays
MAKIRERKTRDVNQVKCIKDEANQLLVKNEEIKNRWKEYFNKLFNGGNESSTIELDEPFDDNNMGFVRRIQEYKVKEALKRMKVGKAMGPDGIPIEVWRCLGDITIVWLTKLFNTIFRTNRMPDEWRRSTLVPIFKNKGDVQSCINYRGIKLKSHIMKLWERVIEHRLRKMTSVTQNQFGFMPGRSTMEAIFLLRQLMERFREQKKDMHMVFIDLEKAYDKVPRSVMWWALEKHKVATKYINLIKDMYTNVVTSVRTSDGDIDDFPINIGLYQGSALSPYLFALVIDEVTRDIQGDIPWCMFFADDVVLIDESRSGVSQKLELWRQTLEAKGFRLSRSKT

SEQ ID NO: 182488 - protein, 868 aa, Zea Mays
MEPKPSSAAHADAPAVEAPRRRGGGGKRKSAGSSFTPSKRQAKERNASFHVPPHLLHSGPLTRAARQSPHKLSGTPSESVPASSAAATGDGVSGGQAVVDAIRPETEETPAPELPLVDEMFEAVRSRGAGVHVVPTFAGWFSWKEIHPVEKQTLPSFFNGKSEKRTPELESKDLAELSIGETDARQEILEFLDHWGLINFHPFPPDGHEESKPEETQDNSNDEKASLIEQLFKFESVQSYMTPLPMKEDVRAPPPLPSLIPESVLIQDVVAAAEPSVEYHCNSCSVDCSRKRYHCRTQADFDLCCDCYNEGKFDPGMAKTDFILMDSAGVSGASGTSWTDEETLLLLEGLEIFGGKWAEIAEHVATKTKAQCMLHFLQMQIEDRFHDGKDINQNIPVSTDQATTEKAIAETSEKMEVEDKVEGRGTVDEKASEKTEGNCEETKTENASVVVNKDTQNSDGRDSGASPSTEEPKQSSDEQPVVKENSADVDTSGEKLSNVAIDILKSAFEATGHSPEYEGSFADAGNPVMALAAYLAGLVEDDNTTTSFRSSLKSVSDVSPALQLSSRHCFILEDPPDELKDICASVSKKNRDGDQKQDEDMIQNSIDTEKKEINEKEGKSLSVEKKNNSSMSQNDHQESGIKSVSSDDCSLVEPKTNNAKESGDSTAIGDKSATETTKGNTEQVNDLPSVEVEAPDDSSSKGKDELNKTKDAVATPATVQEQKHSQTLGNGDREEPNNIESVVVGEEKGSVVTANRPDSIARLKRAAATAVSAAAVKARFLGDQEEYQIRRLTALVIEKLFQKIEVKMSLFSEIEQVVFRTREYTEKTRKKLLKERNAIIAARMGALPSRPNQTGVAGNRLPPGLSDS

SEQ ID NO: 182489 - protein, 707 aa, Zea Mays
MWSLPLLLESKDLAELSIGETDARQEILEFLDHWGLINFHPFPPDGHEESKPEETQDNSNDEKASLIEQLFKFESVQSYMTPLPMKEDVRAPPPLPSLIPESVLIQDVVAAAEPSVEYHCNSCSVDCSRKRYHCRTQADFDLCCDCYNEGKFDPGMAKTDFILMDSAGVSGASGTSWTDEETLLLLEGLEIFGGKWAEIAEHVATKTKAQCMLHFLQMQIEDRFHDGKDINQNIPVSTDQATTEKAIAETSEKMEVEDKVEGRGTVDEKASEKTEGNCEETKTENASVVVNKDTQNSDGRDSGASPSTEEPKQSSDEQPVVKENSADVDTSGEKLSNVAIDILKSAFEATGHSPEYEGSFADAGNPVMALAAYLAGLVEDDNTTTSFRSSLKSVSDVSPALQLSSRHCFILEDPPDELKDICASVSKKNRDGDQKQDEDMIQNSIDTEKKEINEKEGKSLSVEKKNNSSMSQNDHQESGIKSVSSDDCSLVEPKTNNAKESGDSTAIGDKSATETTKGNTEQVNDLPSVEVEAPDDSSSKGKDELNKTKDAVATPATVQEQKHSQTLGNGDREEPNNIESVVVGEEKGSVVTANRPDSIARLKRAAATAVSAAAVKARFLGDQEEYQIRRLTALVIEKLFQKIEVKMSLFSEIEQVVFRTREYTEKTRKKLLKERNAIIAARMGALPSRPNQTGVAGNRLPPGLSDS

SEQ ID NO: 182490 - protein, 439 aa, Zea Mays
MAKTDFILMDSAGVSGASGTSWTDEETLLLLEGLEIFGGKWAEIAEHVATKTKAQCMLHFLQMQIEDRFHDGKDINQNIPVSTDQATTEKAIAETSEKMEVEDKVEGRGTVDEKASEKTEGNCEETKTENASVVVNKDTQNSDGRDSGASPSTEEPKQSSDEQPVVKENSADVDTSGEKLSNVAIDILKSAFEATGHSPEYEGSFADAGNPVMALAAYLAGLVEDDNTTTSFRSSLKSVSDVSPALQLSSRHCFILEDPPDELKDICASVSKKNRDGDQKQDEDMIQNSIDTEKKEINEKEGKSLSVEKKNNSSMSQNDHQESGIKSVSSDDCSLVEPKTNNAKESGDSTAIGDKSATETTKGNTEQVNDLPSVEVEAPDDSSSKGKDELNKTKDAVATPATVQEQKHSQTLGNGDREGTSSAFFSHKTLYMNYETNKG

SEQ ID NO: 182491 - protein, 605 aa, Zea Mays
MEPKPSSAAHADAPAVEAPRRRGGGGKRKSAGSSFTPSKRQAKERNASFHVPPHLLHSGPLTRAARQSPHKLSGTPSESVPASSAAATGDGVSGGQAVVDAIRPETEETPAPELPLVDEMFEAVRSRGAGVHVVPTFAGWFSWKEIHPVEKQTLPSFFNGKSEKRTPEVYLAVRNSIMMKFHANPQLQLESKDLAELSIGETDARQEILEFLDHWGLINFHPFPPDGHEESKPEETQDNSNDEKASLIEQLFKFESVQSYMTPLPMKEDVRAPPPLPSLIPESVLIQDVVAAAEPSVEYHCNSCSVDCSRKRYHCRTQADFDLCCDCYNEGKFDPGMAKTDFILMDSAGVSGASGTSWTDEETLLLLEGLEIFGGKWAEIAEHVATKTKAQCMLHFLQMQIEDRFHDGKDINQNIPVSTDQATTEKAIAETSEKMEVEDKVEGRGTVDEKASEKTEGNCEETKTENASVVVNKDTQNSDGRDSGASPSTEEPKQSSDEQPVVKENSADVDTSGEKLSNVAIDILKSAFEATGHSPEYEGSFADAGNPVMALAAYLAGLVEDDNTTTSFRSSLKSVSDVSPALQLSSRHCFILEDPPDELKDICAS

SEQ ID NO: 182492 - protein, 619 aa, Zea Mays
MTPLPMKEDVRAPPPLPSLIPESVLIQDVVAAAEPSVEYHCNSCSVDCSRKRYHCRTQADFDLCCDCYNEGKFDPGMAKTDFILMDSAGVSGASGTSWTDEETLLLLEGLEIFGGKWAEIAEHVATKTKAQCMLHFLQMQIEDRFHDGKDINQNIPVSTDQATTEKAIAETSEKMEVEDKVEGRGTVDEKASEKTEGNCEETKTENASVVVNKDTQNSDGRDSGASPSTEEPKQSSDEQPVVKENSADVDTSGEKLSNVAIDILKSAFEATGHSPEYEGSFADAGNPVMALAAYLAGLVEDDNTTTSFRSSLKSVSDVSPALQLSSRHCFILEDPPDELKDICASVSKKNRDGDQKQDEDMIQNSIDTEKKEINEKEGIKSVSSDDCSLVEPKTNNAKESGDSTAIGDKSATETTKGNTEQVNDLPSVEVEAPDDSSSKGKDELNKTKDAVATPATVQEQKHSQTLGNGDREEPNNIESVVVGEEKGSVVTANRPDSIARLKRAAATAVSAAAVKARFLGDQEEYQIRRLTALVIEKLFQKIEVKMSLFSEIEQVVFRTREYTEKTRKKLLKERNAIIAARMGALPSRPNQTGVAGNRLPPGYGNPPVRPPNAMPRPTS

SEQ ID NO: 182493 - protein, 287 aa, Zea Mays
MEPKPSSAAHADAPAVEAPRRRGGGGKRKSAGSSFTPSKRQAKERNASFHVPPHLLHSGPLTRAARQSPHKLSGTPSESVPASSAAATGDGVSGGQAVVDAIRPETEETPAPELPLVDEMFEAVRSRGAGVHVVPTFAGWFSWKEIHPVEKQTLPSFFNGKSEKRTPELESKDLAELSIGETDARQEILEFLDHWGLINFHPFPPDGHEESKPEETQDNSNDEKASLIEQLFKFESVQSYMTPLPMKEDQLSLLLSTTAIPVQLIAHGSAIIVGPRFSISVTCYSMR

SEQ ID NO: 182494 - protein, 305 aa, Zea Mays
MVAARRQASARREVAMRRAREAGREYELIPTARGETLFTQCWWPRPSSTVKPRALVVVMHGLNEHSGRYDHLARRLNDIGIKVYGMDWTGHGGSDGLHGYVQSLDHAVNDLKMYLKKVSAENPGLPCFCFGHSTGGGIILKAALDPDVETLISGVVLTSPAVRVQPAHPIIAAMAPIFALIAPRYQLTASHRNGPPVSRDPEALRAKYADQLVFTGAIRVRTGYEILRLTSYLQPHLQRVAVPLLVMHGADDLVTDPEGSRALYERASSADKSLRLYHGLLHDLLIEPEKDRVMDDIVAWLSRRV

SEQ ID NO: 182495 - protein, 241 aa, Zea Mays
MEEHLLIVCELLKANLYEFQKFNRESGGEVYFTMPRLQSIAIQCLEALQFLHGLGLIHCDLKPENILVKSYSRCEIKVIDLGSSCFETDHLCSYVQSRSYRAPEVILGLPYDKKIDIWSLGCILAELCTGNVLFQNDSPATLLARVMGIIGAIEQAMLAQGRDTFKYFTKNHMLYERNQESNRLEYLIPKKTSLRYRLPMADQGFIEFVACLLEVNPKKRPSASEALKHPWLSFPYEPISS

SEQ ID NO: 182496 - protein, 772 aa, Zea Mays
MLLVSSIGIWYFYLLGGRRTIGSSWLSVSQGITEDTSGFARLDDDSLEYPIGEYWDSDEYDDDDDVGYTRQPIEDETWFLAHEIDYPSDNEKATDHTRGPDRHDRPTKDEDDDQSFVEEDSYISGEQYFHGKNIAQIGTSEGPMVNGIPDNDMIAQYDGQLLDPEELNLMHSEPAWQGFVLQNSELGMLGNGKFLNDSERPHPDDPFVEDDQHGSVRSIGVGISSDAADIGSEVRESLIGGSSEGDIEYFNESSLSVSGKRHSQQDPEKKRVGAKGVKHDQINYAAGIQKGNLLPGAADGGFSFPPPLHSVKNHDSDTKTLWSKKDEMYCINDLDDCQNGVASDDMLATWKKKNSESSLRSSRDEMTSDVVRSRNSSPSYGETEDTTNVRRHKLDDAQEDTGTNLDDEEAAALQEQVRQIKVQEEEFETFNLKIVHRKNRTGFEEDKNFHVVLNSVIAGRYHVSEYLGSAAFSKAIQAHDLHTGMDVCVKIIKNNKDFFDQSLDEIKLLKYVNKHDPGDKYHLLRLYDYFYYREHLLIVCELLKANLYEFQKFNRESGGEVYFTMPRLQSIAIQCLEALQFLHGLGLIHCDLKPENILVKSYSRCEIKVIDLGSSCFETDHLCSYVQSRSYRAPEVILGLPYDKKIDIWSLGCILAELCTGNVLFQNDSPATLLARVMGIIGAIEQAMLAQGRDTFKYFTKNHMLYERNQESNRLEYLIPKKTSLRYRLPMADQGFIEFVACLLEVNPKKRPSASEALKHPWLSFPYEPISS

SEQ ID NO: 182497 - protein, 869 aa, Zea Mays
MPENIDLVLEFLRKNRFAKAEAALRGELTGCADSNGMTVQRCVAELKEDDEQEDLVSSNGGPNGAVTERSADSSREFIVKEVDVGALPNGLDGKKGSGIGQPQENNVGDLYPWTFSIANSTAEQLAELLVSEEVPRHRRAAMLAEKRDRGVGTEQPGPLLEQKVSSGRGKGKVDAAGRTAINEQGHSRDKNLVPEKEEMLNGCTVKTVLPFPGENPSSSYNSTHHENERKEVRRSINADGVGKGAKGHFDEGNRQNYFEKSLDTDQVSDRCFDLQLVGDNQREELPKLPPVRLKSEDKLVNMNWEDKINHHGSGAKQSSADHAFMIGSYLDVPIGQDITSSGGRRTIGSSWLSVSQGITEDTSGFARLDDDSLEYPIGEYWDSDEYDDDDDVGYTRQPIEDETWFLAHEIDYPSDNEKATDHTRGPDRHDRPTKDEDDDQSFVEEDSYISGEQYFHGKNIAQIGTSEGPMVNGIPDNDMIAQYDGQLLDPEELNLMHSEPAWQGFVLQNSELGMLGNGKFLNDSERPHPDDPFVEDDQHGSVRSIGVGISSDAADIGSEVRESLIGGSSEGDIEYFNESSLSVSGKRHSQQDPEKKRVGAKGVKHDQINYAAGIQKGNLLPGAADGGFSFPPPLHSVKNHDSDTKTLWSKKDEMYCINDLDDCQNGVASDDMLATWKKKNSESSLRSSRDEMTSDVVRSRNSSPSYGETEDTTNVRRHKLDDAQEDTGTNLDDEEAAALQEQVRQIKVQEEEFETFNLKIVHRKNRTGFEEDKNFHVVLNSVIAGRYHVSEYLGSAAFSKAIQAHDLHTGMDVCVKIIKNNKDFFDQSLDEIKLLKYVNKHDPGDKYHLLRLYDYFYYRMWTDDEQMRK

SEQ ID NO: 182498 - protein, 866 aa, Zea Mays
MPENIDLVLEFLRKNRFAKAEAALRGELTGCADSNGMTVQRCVAELKEDDEQEDLVSSNGGPNGAVTERSADSSREFIVKEVDVGALPNGLDGKKGSGIGQPQENNVGDLYPWTFSIANSTAEQLAELLVSEEVPRHRRAAMLAEKRDRGVGTEQPGPLLEQKVSSGRGKGKVDAAGRTAINEQGHSRDKNLVPEKEEMLNGCTVKTVLPFPGENPSSSYNSTHHENERKEVRRSINADGVGKGAKGHFDEGNRQNYFEKSLDTDQVSDRCFDLQLVGDNQREELPKLPPVRLKSEDKLVNMNWEDKINHHGSGAKQSSADHAFMIGSYLDVPIGQDITSSGGRRTIGSSWLSVSQGITEDTSGFARLDDDSLEYPIGEYWDSDEYDDDDDVGYTRQPIEDETWFLAHEIDYPSDNEKATDHTRGPDRHDRPTKDEDDDQSFVEEDSYISGEQYFHGKNIAQIGTSEGPMVNGIPDNDMIAQYDGQLLDPEELNLMHSEPAWQGFVLQNSELGMLGNGKFLNDSERPHPDDPFVEDDQHGSVRSIGVGISSDAADIGSEVRESLIGGSSEGDIEYFNESSLSVSGKRHSQQDPEKKRVGAKGVKHDQINYAAGIQKGNLLPGAADGGFSFPPPLHSVKNHDSDTKTLWSKKDEMYCINDLDDCQNGVASDDMLATWKKKNSESSLRSSRDEMTSDVVRSRNSSPSYGETEDTTNVRRHKLDDAQEDTGTNLDDEEAAALQEQVRQIKVQEEEFETFNLKIVHRKNRTGFEEDKNFHVVLNSVIAGRYHVSEYLGSAAFSKAIQAHDLHTGMDVCVKIIKNNKDFFDQSLDEIKLLKYVNKHDPGDKYHLLRLYDYFYYRVSLSFYS

SEQ ID NO: 182499 - protein, 865 aa, Zea Mays
MPENIDLVLEFLRKNRFAKAEAALRGELTGCADSNGMTVQRCVAELKEDDEQEDLVSSNGGPNGAVTERSADSSREFIVKEVDVGALPNGLDGKKGSGIGQPQENNVGDLYPWTFSIANSTAEQLAELLVSEEVPRHRRAAMLAEKRDRGVGTEQPGPLLEQKVSSGRGKGKVDAAGRTAINEQGHSRDKNLVPEKEEMLNGCTVKTVLPFPGENPSSSYNSTHHENERKEVRRSINADGVGKGAKGHFDEGNRQNYFEKSLDTDQVSDRCFDLQLVGDNQREELPKLPPVRLKSEDKLVNMNWEDKINHHGSGAKQSSADHAFMIGSYLDVPIGQDITSSGGRRTIGSSWLSVSQGITEDTSGFARLDDDSLEYPIGEYWDSDEYDDDDDVGYTRQPIEDETWFLAHEIDYPSDNEKATDHTRGPDRHDRPTKDEDDDQSFVEEDSYISGEQYFHGKNIAQIGTSEGPMVNGIPDNDMIAQYDGQLLDPEELNLMHSEPAWQGFVLQNSELGMLGNGKFLNDSERPHPDDPFVEDDQHGSVRSIGVGISSDAADIGSEVRESLIGGSSEGDIEYFNESSLSVSGKRHSQQDPEKKRVGAKGVKHDQINYAAGIQKGNLLPGAADGGFSFPPPLHSVKNHDSDTKTLWSKKDEMYCINDLDDCQNGVASDDMLATWKKKNSESSLRSSRDEMTSDVVRSRNSSPSYGETEDTTNVRRHKLDDAQEDTGTNLDDEEAAALQEQVRQIKVQEEEFETFNLKIVHRKNRTGFEEDKNFHVVLNSVIAGRYHVSEYLGSAAFSKAIQAHDLHTGMDVCVKIIKNNKDFFDQSLDEIKLLKYVNKHDPGDKYHLLRLYDYFYYRITDSGY

SEQ ID NO: 182500 - protein, 77 aa, Zea Mays
MPKGQQSLVTWATPRLSEDKVKQCVDPKLKDDYPPKAVAKLAAVAALCVQYEADFRPNMTIVVKALQPLVNARPGGE

SEQ ID NO: 182501 - protein, 393 aa, Zea Mays
MLTSLSIFWILYPCLRRNDLGLGRQQLTSRTRRRSSVVRASWSPSESLPPSSSMAPLRMESPAGQLLSQILHTHPHLLPAAAEQQLELLQTDREAEKNKDKESDAGDKLAPTGVDLVLYRRIAQVKEKERRRTLEEILYALVVEKFVEAGVSLVPALSRSIDSSGRVDQWAETVEGRLQRLHSPEAYEMIENHLALILGQRQSDATIAAISKLRVGQVYAASVMYGYFLKRVDQRFQLEKTMKSLPWGSEEEDGALYQVMTTDSMPSAQSSSSHPEMGSWTAAPDFNAGGPSESIKPCRLRSYVMSFDPDTLQRYATVRSKEAFGIIEKHTEALFGKAEIVVTPGGTVGSSKDEHIRISFAGLRRLVLEAVTFGSFLWDVESFVDSSYHFVTS

SEQ ID NO: 182502 - protein, 411 aa, Zea Mays
MEAAVAAALKSPTAARPSWRPAAPGATSLPFDRRRSFAFGSIKQLTSRTRRRSSVVRASWSPSESLPPSSSMAPLRMESPAGQLLSQILHTHPHLLPAAAEQQLELLQTDREAEKNKDKESDAGDKLAPTGVDLVLYRRIAQVKEKERRRTLEEILYALVVEKFVEAGVSLVPALSRSIDSSGRVDQWAETVEGRLQRLHSPEAYEMIENHLALILGQRQSDATIAAISKLRVGQVYAASVMYGYFLKRVDQRFQLEKTMKSLPWGSEEEDGALYQVMTTDSMPSAQSSSSHPEMGSWTAAPDFNAGGPSESIKPCRLRSYVMSFDPDTLQRYATVRSKEAFGIIEKHTEALFGKAEIVVTPGGTVGSSKDEHIRISFAGLRRLVLEAVTFGSFLWDVESFVDSSYHFVTS

SEQ ID NO: 182503 - protein, 452 aa, Zea Mays
MNGHTDEKTAVATSVSLNTLSGFEAADSRNSWENFKLLLSYEKNEMPYESVSDKVTLVVSVEDTGIGIPLDAQAKVFTPFMQADSSTSRTYGGTGIGLSISKCLVELMGGQINFVSRPHVGSTFTFTAVLKRCDRSAIGDSKPVMLHPLPSSFKGLSALLVDRRPVRATVTKYHLQRLGIACDVVATIELALGVLSGRNGSSLTSMKQPCMLLIESDSWGFNIDVSLRSRLLEMKQNGHTHVLPKIILLAAAESGKLKEHYAVDSVITKPLKASALAACLFQTLGIKQSSNERSDNSGSLYGLLLGKNILVVDDNKVNLRVAAGTLKKFGAKVECVESGKDALALLQVPYKFHLCLMDIQMPEMDGFEATKQIRAMEAKANEQAVACDNSEIDGATRAARWRLPVLAMTADVIQATHEECTKCGMDGYVTKPFEEKQLFQALQKFLDPGMSC

SEQ ID NO: 182504 - protein, 217 aa, Zea Mays
MNGHTDEKTAVATSVSLNTLSGFEAADSRNSWENFKLLLSYEKNEMPYESVSDKVTLVVSVEDTGIGIPLDAQAKVFTPFMQADSSTSRTYGGTGIGLSISKCLVELMGGQINFVSRPHVGSTFTFTAVLKRCDRSAIGDSKPVMLHPLPSSFKGLSALLVDRRPVRATVTKYHLQRLGIACDVVATIELALGVLSGRNGSSLTSCRIGQTQRTLCS

SEQ ID NO: 182505 - protein, 380 aa, Zea Mays
MAIIANWYQRRRPRHIVDANEVQERNVECRKQMLRNMYQGSNVYCYDSLRLTKRSFSDLSAILREKSGLQDTLNVSVEEKFAIFLLIVGHNTKMRLIRSTYGWSLEPISRHFNEVLRGILSLSHEFIKLPNPETTLPEDPKWKWFEDCLGALDGTHIDVNVPLTDQGRYRNRKQRITTNVLGVCDRQMKFLYVLAGWEGSASDSRILRDAMSREDSFVVPSGKYYLVDAGYTNGPGFLAPYRSTRYHLNEWAIQGNNPSTARELFNLRHATARNVIERTFGLLKMRWAILRTSSYFDLENQIRIIHACCILHNFLRDRQRDMDDILIHEVDSLISAAPAENQGEMSMITHVQSTNEWGYFRDTKASEMFVDYQARRGQSS

SEQ ID NO: 182506 - protein, 337 aa, Zea Mays
MLFQEYIARAHNPRFVKSSRQTTARDFVKHYNGRVEKLIEVFKTGVSSVALTSDIWSGKAKEDYISVVAHFVNPNWELEKRLLGLRPIEDDHTGKNIAERVSLVVDEYGLTDKIFAITLDNASSNKTAMSYLIPLFSSYLGIPDYELDDTHNMSSILLHQRCACHIINLIVKSGLKRLNSCVNDFRTAITYLNSSNQRIAAYKSYCLSMGIRPRKFGVDMDVRWNSTYIMLKHVLPHRSTFSVFIKTQLISCMKPSLVLCDRAHIINLVVLQVRVLKLGMPFMVMTYQVPLSLLHLLQLYLSCLPTWTVTLYPSLVLISVFSVGGISIRLHILFFLY

SEQ ID NO: 182507 - protein, 85 aa, Zea Mays
MKPSLVLCDRAHIINLVVLQVRVLKLGMPFMVMTYQVPLSLLHLLQLYLSCLPTWTVTLYPSLVLISVFSVGGISIRLHILFFLY

SEQ ID NO: 182508 - protein, 96 aa, Zea Mays
MYIESDTDCQVLKTALLSKDWDAAFKGVVIREVKFLISSDFSVVKISHAPRSCNVVAHCLASEGVGMLHGASFVWLDNFPGHVTNLVASDVTLCSD

SEQ ID NO: 182509 - protein, 249 aa, Zea Mays
MQSESEWSQLAYVTFKDSQGADTAVLLSGATIVDRAVIITPAENYQLPPEAHKQLSGANVSTESAVRKAEDVVSSMLAKGFVLSKDALNLARSFDERHNILSNATATVASLDRQYGLSEKINLGRAIVGSKVKEVDERYQVSELTKSALAAAEQKASFAGSAILSNQYVSVGASWLTSAFTLVTKAAGDMTSMAKDKVERAEEERKAIMWEERNGLVSDYAKIHLDEPSSWEPAVLPLESVDEQKLQAV

SEQ ID NO: 182510 - protein, 304 aa, Zea Mays
MVCLVEDMSIGYLAAPFFPFSFQVKTVKVSNLSLNVLKRELTEFFSFSGDIEYVEMQSESEWSQLAYVTFKDSQGADTAVLLSGATIVDRAVIITPAENYQLPPEAHKQLSGANVSTESAVRKAEDVVSSMLAKGFVLSKDALNLARSFDERHNILSNATATVASLDRQYGLSEKINLGRAIVGSKVKEVDERYQVSELTKSALAAAEQKASFAGSAILSNQYVSVGASWLTSAFTLVTKAAGDMTSMAKDKVERAEEERKAIMWEERNGLVSDYAKIHLDEPSSWEPAVLPLESVDEQKLQAV

SEQ ID NO: 182511 - protein, 409 aa, Zea Mays
MPQGVALSAQRLGCDAVIVMPVTTPEIKWKSVERLGATVVLEGDSYDEAQSYAKLRCQQEDRTFIPPFDHPDVITGQGTVGMEIVRQLQGPLHAIFVPVGGGGLIAGIAAYVKRVRPEVKIIGVEPSDANAMALSLYHGKRVMLEHVGGFADGVAVKAVGEETFRLCRELVDGIVMVSRDAICASIKDMFEEKRSILEPAGALALAGAEAYCKYYNLKGDTVVAITSGANMNFDRLRLVTELADVGRKREAVLATFLPEEHGSFKKFTELVGRMNITEFKYRYDFNAKDALVLYSVGIYTDNELGAMVDRMELAKLKTVNLTDNDLAKDHLRYFIGGRSEIKDELVYRFIFPERPGALMKFLDAFSPRWNISLFHYRAQGETGANVLVGIQVPPVDFDEFKSHADNLGW

SEQ ID NO: 182512 - protein, 340 aa, Zea Mays
MPQGVALSAQRLGCDAVIVMPVTTPEIKWKSVERLGATVVLEGDSYDEAQSYAKLRCQQEDRTFIPPFDHPDVITGQGTVGMEIVRQLQGPLHAIFVPVGGGGLIAGIAAYVKRVRPEVKIIGVEPSDANAMALSLYHGKRVMLEHVGGFADGVAVKAVGEETFRLCRELVDGIVMVSRDAICASIKDMFEEKRSILEPAGALALAGAEAYCKYYNLKGDTVVAITSGANMNFDRLRLVTELADVGRKREAVLATFLPEEHGSFKKFTELVGRMNITEFKYRYDFNAKDALVLYSVGIYTDNELGAMVDRMELAKLKTVNLTDNDLAKDHLRYFKGLVPL

SEQ ID NO: 182513 - protein, 300 aa, Zea Mays
MPQGVALSAQRLGCDAVIVMPVTTPEIKWKSVERLGATVVLEGDSYDEAQSYAKLRCQQEDRTFIPPFDHPDVITGQGTVGMEIVRQLQGPLHAIFVPVGGGGLIAGIAAYVKRVRPEVKIIGVEPSDANAMALSLYHGKRVMLEHVGGFADGVAVKAVGEETFRLCRELVDGIVMVSRDAICASIKDMFEEKRSILEPAGALALAGAEAYCKYYNLKGDTVVAITSGANMNFDRLRLVTELADVGRKREAVLATFLPEEHGSFKKFTELVGRMNITEFKYRYDFNAKDALVLYRCLSYY

SEQ ID NO: 182514 - protein, 122 aa, Zea Mays
MANLVSMQSSLSDVNKLVKEIRSDVSEVVAADEFEYKDPVDGSVSKHQGIRYLFGDGSRLVFRLSGTGSVGATIRVYIEQYERDSSKTGRDSQDALAPLVDVALKLSKMQEYTGRSAPTVIT

SEQ ID NO: 182515 - protein, 58 aa, Zea Mays
MLVNNFRPSAVVRDVCFTGSPNHRFEAAFMWFSSVYPLSKPYSCENLQDFWFVPWRCS

SEQ ID NO: 182516 - protein, 129 aa, Zea Mays
MDDADDIYMRSWTGTIIGPPNTVHEGRIYQLKLFCDTDYPDKPPTVRFQTRINMTCVNQETGLVEPSLFPMLGKWEREHTMEDILSSLKREMSTPQNRRLYQPHEEAGKVARYRNQMSMAVSDLLHYAL

SEQ ID NO: 182517 - protein, 165 aa, Zea Mays
MGSEGSSGPVVVPRNFRLLEELERGEKGIGDGTVSYGMDDADDIYMRSWTGTIIGPPNTVHEGRIYQLKLFCDTDYPDKPPTVRFQTRINMTCVNQETGLVEPSLFPMLGKWEREHTMEDILSSLKREMSTPQNRRLYQPHEAGKVARYRNQMSMAVSDLLHYAL

SEQ ID NO: 182518 - protein, 383 aa, Zea Mays
MRCGCPSIDRKVVNSGKRLRAYVGLDEGEVCSQCNLRGSCDRAYVKARKEDVGRTVDVMRILLTYGLDVITGNVDNRACLNKSVKESIKILLSEVVEVDSRGPGSSTVKAAQRKGQSAVPMKQGDWNCPKCDFLNFAKNIKCLRCDGEFQERYQLLHEDREHLPLKKGDWICKRCNFLNFAKNTRCLQCHEKPTNRLLNPGEWECVSCNYVNFKRNGFCLKCGWKRPKSLNNQDSVKLCHDLEHSKNPRISFVQDGVQMKGWQSLQKKGSPSDTDLDFWSADDEEGGSRDNDTLLRQKDYRFLESFPIVGGRTANSQDLLAREKWKDEMSRRNKGLQTTESQESNRPSSHCRLPRSMELVDSDDDIASWFSGGDNNNRNLDKV

SEQ ID NO: 182519 - protein, 261 aa, Zea Mays
MEHLLRQGHVDPSTFAAASLSSKDANAVRTACLRFGRQRPELIRHVSRWDIQVAMRCGCPSIDRKVVNSGKRLRAYVGLDEGEVCSQCNLRGSCDRAYVKARKEDVGRTVDVMRILLTYGLDVITGNVDNRACLNKSVKESIKILLSEVVEVDSRGPGSSTVKAAQRKGQSAVPMKQGDWNCPKCDFLNFAKNIKCLRCDGEFQERYQLLHEDREHLPLKKGDWICKRCNFLNFAKNTRCLQCHEKPTNRLLNPGEWECVS

SEQ ID NO: 182520 - protein, 422 aa, Zea Mays
MHRRLATAATAPALRRFSHHSARPQPDPRHVSRWDIQVAMRCGCPSIDRKVVNSGKRLRAYVGLDEGEVCSQCNLRGSCDRAYVKARKEDVGRTVDVMRILLTYGLDVITGNVDNRACLNKSVKESIKILLSEVVEVDSRGPGSSTVKAAQRKGQSAVPMKQGDWNCPKCDFLNFAKNIKCLRCDGEFQERYQLLHEDREHLPLKKGDWICKRCNFLNFAKNTRCLQCHEKPTNRLLNPGEWECVSCNYVNFKRNGFCLKCGWKRPKSLNNQDSVKLCHDLEHSKNPRISFVQDGVQMKGWQSLQKKGSPSDTDLDFWSADDEEGGSRDNDTLLRQKDYRFLESFPIVGGRTANSQDLLAREKWKDEMSRRNKGLQTTESQESNRPSSHCRLPRSMELVDSDDDIASWFSGGDNNNRNLDKV

SEQ ID NO: 182521 - protein, 294 aa, Zea Mays
MHRRLATAATAPALRRFSHHSARPQPDPRHVSRWDIQVAMRCGCPSIDRKVVNSGKRLRAYVGLDEGEVCSQCNLRGSCDRAYVKARKEDVGRTVDVMRILLTYGLDVITGNVDNRACLNKSVKESIKILLSEVVEVDSRGPGSSTVKAAQRKGQSAVPMKQGDWNCPKCDFLNFAKNIKCLRCDGEFQERYQLLHEDREHLPLKKGDWICKRIQDACNVMRNQQTVYSTQENGSVSRECLFLLHYYISPYLLNMFMKDKPGTVVTSLFTESVIPSSDPTCVEAASTRSVLLFV

SEQ ID NO: 182522 - protein, 246 aa, Zea Mays
MHRRLATAATAPALRRFSHHSARPQPDPRHVSRWDIQVAMRCGCPSIDRKVVNSGKRLRAYVGLDEGEVCSQCNLRGSCDRAYVKARKEDVGRTVDVMRILLTYGLDVITGNVDNRACLNKSVKESIKILLSEVVEVDSRGPGSSTVKAAQRKGQSAVPMKQGDWNCPKCDFLNFAKNIKCLRCDGEFQERYQLLHEDREHLPLKKGDWICKRCNFLNFAKNTRCLQCHEKPTNRLLNPGEWECVS

SEQ ID NO: 182523 - protein, 325 aa, Zea Mays
MHRRLATAATAPALRRFSHHSARPQPDPREQFQVLEELRSDLALAGDAPAGVAIAHPWPEWISLMEHLLRQGHVDPSTFAAASLSSKDANAVRTACLRFGRQRPELIRHVSRWDIQVAMRCGCPSIDRKVVNSGKRLRAYVGLDEGEVCSQCNLRGSCDRAYVKARKEDVGRTVDVMRILLTYGLDVITGNVDNRACLNKSVKESIKILLSEVVEVDSRGPGSSTVKAAQRKGQSAVPMKQGDWNCPKCDFLNFAKNIKCLRCDGEFQERYQLLHEDREHLPLKKGDWICKRCNFLNFAKNTRCLQCHEKPTNRLLNPGEWECVS

SEQ ID NO: 182524 - protein, 177 aa, Zea Mays
MAHESDGSPGPESASFSGRPIPPVILTRPTKGWPCEVAGPRPRARPSCLLVDPGDICPPQRVLCVLCQHLALVLGVPAIVAGLHRIYRVLRQQTPPSRSTGAIEARFPCVVALTSTTPGTSKCRHAYLSASFSTTSSPASSSRPRLLRLLRSDNCVLRRHSRRAAPQPSRRPSLLVL

SEQ ID NO: 182525 - protein, 632 aa, Zea Mays
MQYIKLVAVDASEYIFKLALLRKRYDHVMSMIKNSQLCGQAVISYLQQKGFPEVALHFVKDEKTRFNLALESGNIQIAVASAKEIDDKDHWYKLGIEALRQGNVGIVEYAYQRTKNFERLAFLYLITGYLDKVGFMCKIAGQNNNLMGQFHNALYLGDAKKRVEILENAGQLPLAYVTAATHGLTEFAERIAAELGENVPSLPEGKPKSLLIPPAPLTACGDWPLLRVMRGIFEGGLDATGRADLEEDDEAAGADWGDEELDIVDASEVVANGDGFDVEEGEPNEEGGEEGGWDLEDLELPPETETPKAVGNARSALFVAPTPGIPVSQIWTQRSSLAGEQAAAGNFDTAMRLLSRQLGIKNFVPLMPLFLDLHMGSHTYLRGLAAAPVISVAVEKGWNESASPNVRGPPALVFSFSRMEDRLKAAYKATTEGKFPEALRQFLSILHTIPVIVVDSRREVDEVKELIEIVREYVLGLRMELKRKELRDDVTRQQELAAYFTNCKLQRVHMRLVLASAMALCFKQKNYATAAHFARMLLENSPQEAQAKKARQVLQACHDKDDSHQLNYDFRNPFVVCGATYVPIYRGQKDVSCPYCGSRFVPSIEGQLCTICELAAVGADASGLLCSPTQSR

SEQ ID NO: 182526 - protein, 141 aa, Zea Mays
MVNDLIGAGKSYRTLSDILDKDIQNDCVKKQGSHSRNLRRVRLGLGLIKALFEQFLATEGSLYDAATIAYGQVCAPFHSWAIRKAVGAGMYTLPTREQLVVRLNETDLSVQKQMRRYIDASSPIIEYIDNLFLSRNISLDW

SEQ ID NO: 182527 - protein, 176 aa, Zea Mays
MKMGDWICTQCQFMNFSRNKICFKCEEPHPKRQLNPGEWECPSCDFVNFRRNAICKKCNQDRPEDDTRDSQRGLRKTRGAGKFRRFDYIDQKSDDDDDNAWFQKRGASMRSKPDQRTTTAKSRGSDGLDDILVTTKRRSTKQDEDDEVLPYEGARKHVVSRRATPSQRRFTAARNQ

SEQ ID NO: 182528 - protein, 344 aa, Zea Mays
MSGCPNNNRKPVYSAKRLREYVQVKEEDACSICKFKASCDRAYVTPKGEVEVRTVDVVRILLSYAMDKNHSGDNSVIEESVQESAKKLLSKLTEFSDTTIDPSLPKPAFQVARKAQGSVGKGRETTAVEMKKGDWLCTNCNFLNFARNRHCLECKADGPKKIEAAVDAMKMGDWICTQCQFMNFSRNKICFKCEEPHPKRQLNPGEWECPSCDFVNFRRNAICKKCNQDRPEDDTRDSQRGLRKTRGAGKFRRFDYIDQKSDDDDDNAWFQKRGASMRSKPDQRTTTAKSRGSDGLDDILVTTKRRSTKQDEDDEVLPYEGARKHVVSRRATPSQRRFTAARNQ

SEQ ID NO: 182529 - protein, 55 aa, Zea Mays
MRRQSIPGITPHHWALCIVEEANMMYEAPTTWTYAASTTMMYLPLLWGIDIPWVH

SEQ ID NO: 182530 - protein, 69 aa, Zea Mays
MVIDAVLPGYRRSSTRQDTRWSTFQKLFMLVGPTTSLGPEKKCNQPIIVCGPGVHSFATFSGATMWRRR

SEQ ID NO: 182531 - protein, 120 aa, Zea Mays
MKTKLSWWWWRQPAPQQVKDAAIPAKRTDGYDLAFLAPLPTQGDGAPAPPWIQWANAMVPLEPTHPKPCIACKEETSPESTTQRRLSHPWSLFPHTAARSEVKGAIPPLLSTSPSSSIVL

SEQ ID NO: 182532 - protein, 77 aa, Zea Mays
MNSFKSLHRAMIAATTHKHTPMDPGSSLTLDLGMQTDLLRDLPSGWRFRTDCDCSRRSSFLLSGNQQRNLSNDNASY

SEQ ID NO: 182533 - protein, 282 aa, Zea Mays
MGTVLDSHFLALTAIVTVGYQLLFFIITALLRFDKVTDFAGSTNFIIIAILTLALKGAWHFRQIVLTVLVTIWGLRLGLFLLMRILQWGEDRRFDKMRDNLGKLAVFWIFQAVWVWSVSLPVTVVNASDRNPSIEARDIIGWIIWLVGICVEATADQQKLVFKNSPSNRGKWCNAGLWKYSRHPNYFGEIFLWWGVFVASTPVISDAEWLVILGPIFLTLLLLFVSGIPLLESSADKRYGRLEEYRAYKNTTRLPSSLSSRSTILGREVIQSNQNEPIDGSA

SEQ ID NO: 182534 - protein, 319 aa, Zea Mays
MGTVLDSHFLALTAIVTVGYQLLFFIITALLRFDKVTDFAGSTNFIIIAILTLALKGAWHFRQIVLTVLVTIWGLRLGLFLLMRILQWGEDRRFDKMRDNLGKLAVFWIFQAVWVWSVSLPVTVVNASDRNPSIEARDIIGWIIWLVGICVEATADQQKLVFKNSPSNRGKWCNAGLWKYSRHPNYFGEIFLWWGVFVASTPVISDAEWLVILGPIFLTLLLLFVSGIPLLESSADKRYGRLEEYRAYKNTTSPLIPLPPAVYGSLPAWFKVAFLLELPLYNPGPGGDPIIIPPSIPRGYSGVWPLIYRSRGSNMYLVG

SEQ ID NO: 182535 - protein, 126 aa, Zea Mays
MHYVMGDCFGKGMGTEQFSEAHLLWKRSKPPNFPTRYNLTRFAITLNELTPGLKEKLPPTDSRLRPDQRCLEKGEYERANAEKLRLEQKQRQHKGRGCTLLPLPLLLLAIEQTILKSYFSGTKDAG

SEQ ID NO: 182536 - protein, 322 aa, Zea Mays
MRILSIAAFAVSGYASTDGRSCKPFNPLLGETYEADYPDKGLRFFSEKVSHHPMVIACHCVGTGWRFWADSNLKSKFWGRSIQLDPVGALTLEFDDGEVFQWSKVTTSIYNLILGKLYCDHYGTMRIQGNCEYSCKLKFKEQSIIDRNPHQVQGVVQDRNGRTVATLFGKWDESMHYVMGDCFGKGMGTEQFSEAHLLWKRSKPPNFPTRYNLTRFAITLNELTPGLKEKLPPTDSRLRPDQRCLEKGEYERANAEKLRLEQKQRQARKMQDSGWKPRWFAKDKATDTYRYLGGYWESREKSSWEGCPDIFGQDPNDLMIAD

SEQ ID NO: 182537 - protein, 606 aa, Zea Mays
MHPFCCAPLVPVSPAASAAPAASSAVAGTQAVMPPPQPPPLPPPPPRNNSATGGERRARAAGVSGGGGGDSSPLEGVKLNEIVGGGISGIMYKWVNYGRGWRPRWFALHEGVLSFYKIHGPDRIILSRETERGAKVIGEESLRRLNRPSAFSPSHSNGHHHPRNPIGEIHLKVSTVRESRSDDRRFSIFSGTKTLHLRAETREDRAAWLEALRVTKDMFPRMSSSEMVGPGDTAAAVAVSTERLRQRLQQEGVSEAAIADSERIVREEFEALHKQLVLAKQKHALLLETLRQLETEKVDLENTLVDESQRQSKEYGSASKPRHEKYSEGSASESDDYNEPQDPAEETDDEANLYFDTRDFLSSSSFKSSGSDFQRSEAGSDDEDDYPMDGINPSMKSIGVSYAYVRRRNRLPDPVEKEKGVSLWSMIKDNIGKDLTKVCLPVYFNEPLSSLQKCFEDLEYSYLIDRASEWGKRGNSLMRILSIAAFAVSGYASTDGRSCKPFNPLLGETYEADYPDKGLRFFSEKVSHHPMVIACHCVGTGWRFWADSNLKSKFWGRSIQLDPVGALTLEFDDGEVFQWSKVTTSIYNLILGKLYCDHYGTMRIQG

SEQ ID NO: 182538 - protein, 612 aa, Zea Mays
MHPFCCAPLVPVSPAASAAPAASSAVAGTQAVMPPPQPPPLPPPPPRNNSATGGERRARAAGVSGGGGGDSSPLEGVKLNEIVGGGISGIMYKWVNYGRGWRPRWFALHEGVLSFYKIHGPDRIILSRETERGAKVIGEESLRRLNRPSAFSPSHSNGHHHPRNPIGEIHLKVSTVRESRSDDRRFSIFSGTKTLHLRAETREDRAAWLEALRVTKDMFPRMSSSEMVGPGDTAAAVAVSTERLRQRLQQEGVSEAAIADSERIVREEFEALHKQLVLAKQKHALLLETLRQLETEKVDLENTLVDESQRQSKEYGSASKPRHEKYSEGSASESDDYNEPQDPAEETDDEANLYFDTRDFLSSSSFKSSGSDFQRSEAGSDDEDDYPMDGINPSMKSIGVSYAYVRRRNRLPDPVEKEKGVSLWSMIKDNIGKDLTKVCLPVYFNEPLSSLQKCFEDLEYSYLIDRASEWGKRGNSLMRILSIAAFAVSGYASTDGRSCKPFNPLLGETYEADYPDKGLRFFSEKVSHHPMVIACHCVGTGWRFWADSNLKSKFWGRSIQLDPVGALTLEFDDGEVFQWSKVTTSIYNLILGKLYCDHYGTMRIQGARCCSG

SEQ ID NO: 182539 - protein, 470 aa, Zea Mays
MLVIFCILYMIEFIEEKSTKLLTEKVDLENTLVDESQRQSKEYGSASKPRHEKYSEGSASESDDYNEPQDPAEETDDEANLYFDTRDFLSSSSFKSSGSDFQRSEAGSDDEDDYPMDGINPSMKSIGVSYAYVRRRNRLPDPVEKEKGVSLWSMIKDNIGKDLTKVCLPVYFNEPLSSLQKCFEDLEYSYLIDRASEWGKRGNSLMRILSIAAFAVSGYASTDGRSCKPFNPLLGETYEADYPDKGLRFFSEKVSHHPMVIACHCVGTGWRFWADSNLKSKFWGRSIQLDPVGALTLEFDDGEVFQWSKVTTSIYNLILGKLYCDHYGTMRIQGNCEYSCKLKFKEQSIIDRNPHQVQGVVQDRNGRTVATLFGKWDESMHYVMGDCFGKGMGTEQFSEAHLLWKRSKPPNFPTRYNLTRFAITLNELTPGLKVHTLHVSRKNCHQQTQDYDQTRDVWRKVNMKGQMLRS

SEQ ID NO: 182540 - protein, 393 aa, Zea Mays
MHPFCCAPLVPVSPAASAAPAASSAVAGTQAVMPPPQPPPLPPPPPRNNSATGGERRARAAGVSGGGGGDSSPLEGVKLNEIVGGGISGIMYKWVNYGRGWRPRWFALHEGVLSFYKIHGPDRIILSRETERGAKVIGEESLRRLNRPSAFSPSHSNGHHHPRNPIGEIHLKVSTVRESRSDDRRFSIFSGTKTLHLRAETREDRAAWLEALRVTKDMFPRMSSSEMVGPGDTAAAVAVSTERLRQRLQQEGVSEAAIADSERIVREEFEALHKQLVLAKQKHALLLETLRQLEKRLIWRIPLLMRAKGSQKSMDLLLNQGMRSIVKEVLANLMIIMNHKIQLKRLTMKQIFTLIQEIFYPQALLKVVDLISKGLKLVRMMKMIIQWMELILL

SEQ ID NO: 182541 - protein, 871 aa, Zea Mays
MKKSDNQPSCKGKHSSCSPVHHPFRSRLPGSRRHPPVPGAKIKRSQNTKESATSPATGATSRAPAGADPDFSMHPFCCAPLVPVSPAASAAPAASSAVAGTQAVMPPPQPPPLPPPPPRNNSATGGERRARAAGVSGGGGGDSSPLEGVKLNEIVGGGISGIMYKWVNYGRGWRPRWFALHEGVLSFYKIHGPDRIILSRETERGAKVIGEESLRRLNRPSAFSPSHSNGHHHPRNPIGEIHLKVSTVRESRSDDRRFSIFSGTKTLHLRAETREDRAAWLEALRVTKDMFPRMSSSEMVGPGDTAAAVAVSTERLRQRLQQEGVSEAAIADSERIVREEFEALHKQLVLAKQKHALLLETLRQLETEKVDLENTLVDESQRQSKEYGSASKPRHEKYSEGSASESDDYNEPQDPAEETDDEANLYFDTRDFLSSSSFKSSGSDFQRSEAGSDDEDDYPMDGINPSMKSIGVSYAYVRRRNRLPDPVEKEKGVSLWSMIKDNIGKDLTKVCLPVYFNEPLSSLQKCFEDLEYSYLIDRASEWGKRGNSLMRILSIAAFAVSGYASTDGRSCKPFNPLLGETYEADYPDKGLRFFSEKVSHHPMVIACHCVGTGWRFWADSNLKSKFWGRSIQLDPVGALTLEFDDGEVFQWSKVTTSIYNLILGKLYCDHYGTMRIQGNCEYSCKLKFKEQSIIDRNPHQVQGVVQDRNGRTVATLFGKWDESMHYVMGDCFGKGMGTEQFSEAHLLWKRSKPPNFPTRYNLTRFAITLNELTPGLKEKLPPTDSRLRPDQRCLEKGEYERANAEKLRLEQKQRQARKMQDSGWKPRWFAKDKATDTYRYLGGYWESREKSSWEGCPDIFGQDPNDLMIAD

SEQ ID NO: 182542 - protein, 780 aa, Zea Mays
MHPFCCAPLVPVSPAASAAPAASSAVAGTQAVMPPPQPPPLPPPPPRNNSATGGERRARAAGVSGGGGGDSSPLEGVKLNEIVGGGISGIMYKWVNYGRGWRPRWFALHEGVLSFYKIHGPDRIILSRETERGAKVIGEESLRRLNRPSAFSPSHSNGHHHPRNPIGEIHLKVSTVRESRSDDRRFSIFSGTKTLHLRAETREDRAAWLEALRVTKDMFPRMSSSEMVGPGDTAAAVAVSTERLRQRLQQEGVSEAAIADSERIVREEFEALHKQLVLAKQKHALLLETLRQLECRVCHALMLVIFCILYMIEFIEEKSTKLLTEKVDLENTLVDESQRQSKEYGSASKPRHEKYSEGSASESDDYNEPQDPAEETDDEANLYFDTRDFLSSSSFKSSGSDFQRSEAGSDDEDDYPMDGINPSMKSIGVSYAYVRRRNRLPDPVEKEKGVSLWSMIKDNIGKDLTKVCLPVYFNEPLSSLQKCFEDLEYSYLIDRASEWGKRGNSLMRILSIAAFAVSGYASTDGRSCKPFNPLLGETYEADYPDKGLRFFSEKVSHHPMVIACHCVGTGWRFWADSNLKSKFWGRSIQLDPVGALTLEFDDGEVFQWSKVTTSIYNLILGKLYCDHYGTMRIQGNCEYSCKLKFKEQSIIDRNPHQVQGVVQDRNGRTVATLFGKWDESMHYVMGDCFGKGMGTEQFSEAHLLWKRSKPPNFPTRYNLTRFAITLNELTPGLKEKLPPTDSRLRPDQRCLEKGEYERANAEKLRLEQKQRQVIGDTLTL

SEQ ID NO: 182543 - protein, 661 aa, Zea Mays
MHPFCCAPLVPVSPAASAAPAASSAVAGTQAVMPPPQPPPLPPPPPRNNSATGGERRARAAGVSGGGGGDSSPLEGVKLNEIVGGGISGIMYKWVNYGRGWRPRWFALHEGVLSFYKIHGPDRIILSRETERGAKVIGEESLRRLNRPSAFSPSHSNGHHHPRNPIGEIHLKVSTVRESRSDDRRFSIFSGTKTLHLRAETREDRAAWLEALRVTKDMFPRMSSSEMVGPGDTAAAVAVSTERLRQRLQQEGVSEAAIADSERIVREEFEALHKQLVLAKQKHALLLETLRQLECRVCHALMLVIFCILYMIEFIEEKSTKLLTEKVDLENTLVDESQRQSKEYGSASKPRHEKYSEGSASESDDYNEPQDPAEETDDEANLYFDTRDFLSSSSFKSSGSDFQRSEAGSDDEDDYPMDGINPSMKSIGVSYAYVRRRNRLPDPVEKEKGVSLWSMIKDNIGKDLTKVCLPVYFNEPLSSLQKCFEDLEYSYLIDRASEWGKRGNSLMRILSIAAFAVSGYASTDGRSCKPFNPLLGETYEADYPDKGLRFFSEKVSHHPMVIACHCVGTGWRFWADSNLKSKFWGRSIQLDPVGALTLEFDDGEVFQWSKVTTSIYNLILGKLYCDHYGTMRIQGNCEYSCKLKFKEQSIIDRNPHQENCA

SEQ ID NO: 182544 - protein, 663 aa, Zea Mays
MHPFCCAPLVPVSPAASAAPAASSAVAGTQAVMPPPQPPPLPPPPPRNNSATGGERRARAAGVSGGGGGDSSPLEGVKLNEIVGGGISGIMYKWVNYGRGWRPRWFALHEGVLSFYKIHGPDRIILSRETERGAKVIGEESLRRLNRPSAFSPSHSNGHHHPRNPIGEIHLKVSTVRESRSDDRRFSIFSGTKTLHLRAETREDRAAWLEALRVTKDMFPRMSSSEMVGPGDTAAAVAVSTERLRQRLQQEGVSEAAIADSERIVREEFEALHKQLVLAKQKHALLLETLRQLETEKVDLENTLVDESQRQSKEYGSASKPRHEKYSEGSASESDDYNEPQDPAEETDDEANLYFDTRDFLSSSSFKSSGSDFQRSEAGSDDEDDYPMDGINPSMKSIGVSYAYVRRRNRLPDPVEKEKGVSLWSMIKDNIGKDLTKVCLPVYFNEPLSSLQKCFEDLEYSYLIDRASEWGKRGNSLMRILSIAAFAVSGYASTDGRSCKPFNPLLGETYEADYPDKGLRFFSEKVSHHPMVIACHCVGTGWRFWADSNLKSKFWGRSIQLDPVGALTLEFDDGEVFQWSKVTTSIYNLILGKLYCDHYGTMRIQGNCEYSCKLKFKEQSIIDRNPHQASVTFLTMERHILLNNFVEKIAWEHVFESAGNYGM

SEQ ID NO: 182545 - protein, 327 aa, Zea Mays
MADALTMLEQIGRIENTKVVYVGDGNNIVHSWLLLADVLPFHFVCACPKGFEPDAHIVEMARGAGISKIEITNSPREAVKGADVVYTDVWASMGQKEEVDYRKQKFQGFTFNSTPGWRHSILVSRDKKRCYCRRTQSFGARFCRYAINVHVAVKEGCRAANPPPPPPLLPAINVHASHRAADPPPSSPSARRPWLDHFSFPGVEDEDEAVVFFQQRYLVGRDSGWAGPGGPIFFYCGNEGDIACASCLDETQISPYCYWGLASSAPILQFEDIVPSTIFYDLVSDDFRDPENKWRPFRLVELSVQLSGHGGLPTSIRISQAFASQSY

SEQ ID NO: 182546 - protein, 380 aa, Zea Mays
MDSTNVTIRERDDKEQIRVDINEVASVDILDLAKYAYVPVINGLTDYNHPCQIMADALTMLEQIGRIENTKVVYVGDGNNIVHSWLLLADVLPFHFVCACPKGFEPDAHIVEMARGAGISKIEITNSPREAVKGADVVYTDVWASMGQKEEVDYRKQKFQGFTFNSTPGWRHSILVSRDKKRCYCRRTQSFGARFCRYAINVHVAVKEGCRAANPPPPPPLLPAINVHASHRAADPPPSSPSARRPWLDHFSFPGVEDEDEAVVFFQQRYLVGRDSGWAGPGGPIFFYCGNEGDIACASCLDETQISPYCYWGLASSAPILQFEDIVPSTIFYDLVSDDFRDPENKWRPFRLVELSVQLSGHGGLPTSIRISQAFASQSY

SEQ ID NO: 182547 - protein, 81 aa, Zea Mays
MIKEGPESVSLSTARSLICAIQRREKKKRKGAWTVVLVVGISLSSIALFSSASYVEVAFSHYSIYTQLLCCALYIHRTFSS

SEQ ID NO: 182548 - protein, 414 aa, Zea Mays
MIAGMAVGFNLVFEHDNLITAICFASVVVNLLPYTLSRLDKVAGICNACIAGFTLLCFVLGLLISHPHTPVNMNAMFPKLSGESAYSLMALLGANIIVHNFYTHSAFVQVQRRSSHTLGSLFHDHLFSILFIFTGIYLVNYILLSSAADESSETVVMNFQDATELMHQIFTNPAGPIVLLVILLFSSHIISLTCIVSGEVISENFFGVKLPLSAHHLLPKGLAMVLNIYFAKVAGPEGIYQLLIMCPVIQAMLLPSSIIPILRVSSSRLLMGRYRIALCIEIFAFLAFLLVVFTNIIFTAEIMFGTSTWTNNLKGDTGSPAILPYSVVVLISCASIGFTLLLAVTPLKSASNEAQTHLSSMHSQRGALGTTQREATSLKKFEHEEVQSCSVGAVLMGSSEGHKKSVHLRRTLSG

SEQ ID NO: 182549 - protein, 509 aa, Zea Mays
MNSVHSIESLAAGDAQHKLFQTLGPTLLISMAYIDLGKWLVAVDAGSRFGYDLVLLVLFFNFSAILFQYLSTCIGMVTGKNLAEAWLSLLTSELTMIAGMAVGFNLVFEHDNLITAICFASVVVNLLPYTLSRLDKVAGICNACIAGFTLLCFVLGLLISHPHTPVNMNAMFPKLSGESAYSLMALLGANIIVHNFYTHSAFVQVQRRSSHTLGSLFHDHLFSILFIFTGIYLVNYILLSSAADESSETVVMNFQDATELMHQIFTNPAGPIVLLVILLFSSHIISLTCIVSGEVISENFFGVKLPLSAHHLLPKGLAMVLNIYFAKVAGPEGIYQLLIMCPVIQAMLLPSSIIPILRVSSSRLLMGRYRIALCIEIFAFLAFLLVVFTNIIFTAEIMFGTSTWTNNLKGDTGSPAILPYSVVVLISCASIGFTLLLAVTPLKSASNEAQTHLSSMHSQRGALGTTQREATSLKKFEHEEVQSCSVGAVLMGSSEGHKKSVHLRRTLSG

SEQ ID NO: 182550 - protein, 410 aa, Zea Mays
MAVGFNLVFEHDNLITAICFASVVVNLLPYTLSRLDKVAGICNACIAGFTLLCFVLGLLISHPHTPVNMNAMFPKLSGESAYSLMALLGANIIVHNFYTHSAFVQVQRRSSHTLGSLFHDHLFSILFIFTGIYLVNYILLSSAADESSETVVMNFQDATELMHQIFTNPAGPIVLLVILLFSSHIISLTCIVSGEVISENFFGVKLPLSAHHLLPKGLAMVLNIYFAKVAGPEGIYQLLIMCPVIQAMLLPSSIIPILRVSSSRLLMGRYRIALCIEIFAFLAFLLVVFTNIIFTAEIMFGTSTWTNNLKGDTGSPAILPYSVVVLISCASIGFTLLLAVTPLKSASNEAQTHLSSMHSQRGALGTTQREATSLKKFEHEEVQSCSVGAVLMGSSEGHKKSVHLRRTLSG

SEQ ID NO: 182551 - protein, 476 aa, Zea Mays
MLDLGSAMILCYWCCSSISQPFYSNICQRVSAWSLGRILQSKVICVVLGLQAWLSLLTSELTMIAGMAVGFNLVFEHDNLITAICFASVVVNLLPYTLSRLDKVAGICNACIAGFTLLCFVLGLLISHPHTPVNMNAMFPKLSGESAYSLMALLGANIIVHNFYTHSAFVQVQRRSSHTLGSLFHDHLFSILFIFTGIYLVNYILLSSAADESSETVVMNFQDATELMHQIFTNPAGPIVLLVILLFSSHIISLTCIVSGEVISENFFGVKLPLSAHHLLPKGLAMVLNIYFAKVAGPEGIYQLLIMCPVIQAMLLPSSIIPILRVSSSRLLMGRYRIALCIEIFAFLAFLLVVFTNIIFTAEIMFGTSTWTNNLKGDTGSPAILPYSVVVLISCASIGFTLLLAVTPLKSASNEAQTHLSSMHSQRGALGTTQREATSLKKFEHEEVQSCSVGAVLMGSSEGHKKSVHLRRTLSG

SEQ ID NO: 182552 - protein, 376 aa, Zea Mays
MDKVAGICNACIAGFTLLCFVLGLLISHPHTPVNMNAMFPKLSGESAYSLMALLGANIIVHNFYTHSAFVQVQRRSSHTLGSLFHDHLFSILFIFTGIYLVNYILLSSAADESSETVVMNFQDATELMHQIFTNPAGPIVLLVILLFSSHIISLTCIVSGEVISENFFGVKLPLSAHHLLPKGLAMVLNIYFAKVAGPEGIYQLLIMCPVIQAMLLPSSIIPILRVSSSRLLMGRYRIALCIEIFAFLAFLLVVFTNIIFTAEIMFGTSTWTNNLKGDTGSPAILPYSVVVLISCASIGFTLLLAVTPLKSASNEAQTHLSSMHSQRGALGTTQREATSLKKFEHEEVQSCSVGAVLMGSSEGHKKSVHLRRTLSG

SEQ ID NO: 182553 - protein, 375 aa, Zea Mays
MTILSQPYVLQVLLLIYYHTHSPDCSHPHTPVNMNAMFPKLSGESAYSLMALLGANIIVHNFYTHSAFVQVQRRSSHTLGSLFHDHLFSILFIFTGIYLVNYILLSSAADESSETVVMNFQDATELMHQIFTNPAGPIVLLVILLFSSHIISLTCIVSGEVISENFFGVKLPLSAHHLLPKGLAMVLNIYFAKVAGPEGIYQLLIMCPVIQAMLLPSSIIPILRVSSSRLLMGRYRIALCIEIFAFLAFLLVVFTNIIFTAEIMFGTSTWTNNLKGDTGSPAILPYSVVVLISCASIGFTLLLAVTPLKSASNEAQTHLSSMHSQRGALGTTQREATSLKKFEHEEVQSCSVGAVLMGSSEGHKKSVHLRRTLSG

SEQ ID NO: 182554 - protein, 714 aa, Zea Mays
MPAALVPYRQDELKILRGDDNPGPYQEHDRVYRYDYYNDLGDPDKGEEHARPILGGSQEHPYPRRCRTGRHPTKKDPNSESRLFLLNLNIYVPRDERFGHLKMSDFLGYSLKTIIEAVLPTLGTFVDDTPKEFDSFEDILGLYELGPEAPNNPLIAEIRKKIPSEFLRSILPNGSHDHPLKMPLPNVIKSDVLKKAPEFKFGWRTDEEFARETLAGVNPVIIKRLTEFPAKSTLDPRQYGDHTSKITEAHIRHNMGGLSVQNALRNKRLFILDHHDHFMPYLDEINELEGNFIYASRTLLFLKDDGTLKPLAIELSLPHPDGQQRGAVSKVYTPAHTGVEGHVWQLAKAYACVNDSAWHQLISHWLNTHAVIEPFVIATNRQLSVVHPVHKLLSPHYRDTLNINALARQTLINAGGVFERTVFPAKYALGMSADVYKSWNFNEQALPADLVKRGVAVPDQSSPYGVRLLIKDYPYAVDGLVIWWAIERWVKEYLDIYYPNDGELQRDVELQAWWKEVREEAHGDLKDRDWWPRMDTVQQLARACTTIIWVASALHAAVNFGQYPYAGYLPNRPTASRRPMPEPGSHDYKKLGAGQKEADMVFIRTITSQFQTILGISLIEILSKHSSDEVYLGQRDEPDRWTSDAKALDAFKRFGSRLVQIENRIKTMNDSPDLKNRKGPVEMPYMLLYPNTSDVTGEKAEGLTAMGIPNSISI

SEQ ID NO: 182555 - protein, 178 aa, Zea Mays
MPPCNFLQQSDETPMVWEILLYMYVLYSPDWHYRSTMPTFLFLYGAAFAVVHFFARFQFVFKLHYIGLCFLCIPRMYKYYIQTKDVAAKRLAKLWVLTLTLGTLCWLVDRIFCKKLSHWYVNPQGHAWWHVLMGLNSYYANTFLMFCRAQQRGWEARITYLLGFLPYVKVQKPEKKRE

SEQ ID NO: 182556 - protein, 50 aa, Zea Mays
MSLTPFSQPSCGLSLHFSSPCQLHVLLPPSTLQVTPIDTRFNLHGYPKNY

SEQ ID NO: 182557 - protein, 56 aa, Zea Mays
MRLLKPFLLVLCTFLCTFRHHSAKDILISMAKGYHAKTAWQNCKCIEDVGLFSCSW

SEQ ID NO: 182558 - protein, 184 aa, Zea Mays
MLSRPGGTTNLVEPRGQAAALPSGGPAVQPWWNIKWKRCWSRKAPCHIADTCFGARVFGTILAAGSEPINCFCSISISCSIAVLRPLLRRRCCSLWKSRCVSEEPVYVNAKQYRGILRRRQSRAKAELERKRWSKQESRIFTSPRHQHAMTRRARGNGGRFLNTKKSDRVPPDDLIQLRRHNEA

SEQ ID NO: 182559 - protein, 141 aa, Zea Mays
MLSRPGGTTNLVEPRGQAAALPSGGPAVQPWWNIKWKRCWSRKAPCHIADTCFGARVFGTILAAGSEPINCFCSISISCSIAVLRPLLRRRCCSLWKSRCVSEEPVYVNAKQYRGILRRRQSRAKAELERKRWSKQERLVY

SEQ ID NO: 182560 - protein, 50 aa, Zea Mays
MQHSSTQTLTTQALLLPMEVKMCVRGACLCERQAVPRHSKTAAVTCQGRA

SEQ ID NO: 182561 - protein, 221 aa, Zea Mays
MEGTTQPTAGAREKLLPTSAAASLPPYLDPHPADSSSYAVLLVPVRRRLRRGGRCIAPCLTALLLALAGFLLWPADPDISLARFHLGHVSVVARPAVAVTISAALKVRVRNPDLFALDYTRLDVAIGYRGKPLGLVTSGGGRVQARAVSYVDANLQLDGIRVVEDAIYLLKDLARGSVPFDALAEVEGHLHFFFLSIPVKNIVGGLGFRGAGHIYKPMRNP

SEQ ID NO: 182562 - protein, 71 aa, Zea Mays
MHILDKRFDEILRVSSNSRTRSRIPFVRSLCGRLAGTFFLFCGEQDHSTLCWSAASCQIDTSYFLTQMVYY

SEQ ID NO: 182563 - protein, 681 aa, Zea Mays
MATTTFPTSTPFFAAHHGPRRSRPSISAAVYSRSRRWRPLRVACEKVVGIDLGTTNSAVAAMEGGKPTIVTNAEGARTTPSVVAYTKSGDRLVGQIAKRQAVVNPENTFFSVKRFIGRKMNEVDEESKQVSYRVIRDDNGNVKLDCPAIGKQFAAEEISVLRKLVDDASKFLNDKVTKAVITVPAYFNDSQRTATKDAGRIAGLEVLRIINEPTAASLAYGFEKKNNETILVFDLGGGTFDVSVLEVGDGVFEVLSTSGDTHLGGDDFDKRIVDWLAGNFKNDEGIDLLKDKQALQRLTEAAEKAKMELSSLTQTNISLPFITATADGPKHIETTLTRAKFEELCSDLLDRLRTPVDNALRDAKLQFKDIDEVILVGGSTRIPAVQELVKKMTGKDPNVTVNPDEVVALGAAVQAGVLSGDVSDIVLLDVTPLSLGLETLGGVMTKIIPRNTTLPTSKSEVFSTAADGQTSVEINVLQGEREFVRDNKSLGSFRLDGIPPAPRGVPQIEVKFDIDANGILSVTAVDKGTGKKQDITITGASTLPKDEVERMVDEAEKFAKEDKEKRDAIDTKNQAESVIYQTEKQLKELGDKVPGDVKGKVESKLQELKDAVAGGSTQTMKDAISALNQEVMQIGQSLYSQQGAPGAGPGPADASAGSAAGTSEKPGDDGDVIDADFTDSK

SEQ ID NO: 182564 - protein, 93 aa, Zea Mays
MDASEPGEHRGRELRASSPWGRIARRGERMLGHATISREGRDGSGSGRGEVALVRRRLKTKLREGVASGEGAGQGEGQQLAPSRARRRKVWGG

SEQ ID NO: 182565 - protein, 572 aa, Zea Mays
MIAKNLMPNNWHQISNPSRSAPLNVSTLGFRYPHSHRASPRTDPWIGAALARSVHAELLTPMSRSFFPTCSSQKAEIEEMGKELDDLRAKVEALTAQLRANSDLADGLKRAGADQAAWLRDARAEAERNAVEAAASSEEAAATGDRCGVLESRLAKNGQALRHLYAAHEALKGTLREKIEGLEGDKRGLLTALEDAEGRRVEHEAALRACDNEIARLRGLLSEKDWRGSEAEKRVLTPREVVMRDDMLVKPEEEKATVEGKLNWKAEQFRHLEEALNKLHDGFRAVKKEWGLDRSTSVDRIGTLEDDLDSKTRVTEDFPSRLDMCSQALAHEEGCRKRVEAELSELRLMYGYVVSEYEGAKSMMESLSSKTDGGIAYLRRALAEKVTLLKEIGYSKAHLEQENEDLRSSLKEYQEAQIGGTYAVVSLKSLWEKFRALEQTHRSCTKKLRDKEEEWRIQMTKLVNDLVECISDLESKDILIGQLQNELRGSYRSLELQTVESWEALIFLTVVLGKFHESCSFVDTAKLNMQHHCQEIEKEIGFAKRQLEEQSCIIVQSQAEQKQQSKVIAKLH

SEQ ID NO: 182566 - protein, 170 aa, Zea Mays
MSKPAVHSVPVEVERIDIGEPENPGPKYNSRSTYQPVSIDPFALSPDPNEQENLDIFGDDDGNASPNNLASGEGAPARGFDINLPNQDNMDDEIADVDVNDEADEGLNAADALRAQVNAEGQQGQDSSSSSGTSSSSSSGSGSGSGSGSSSSDSDGSDADSASSGGDVDI

SEQ ID NO: 182567 - protein, 187 aa, Zea Mays
MASGSSNGEPSTAPQANRWYDLRLGSSCRDPSPTAKFCTLRYEFKPASIDKTQAGSLQSTKDNRVTVEFHNNQPGKPKVTFEGSQEEYKDNDGVLFFDGETFRLERLHRAVKRLRHVRVPGESAALNLAGTTTGVGAESQSPPLPKVSKSQTMSKPAVHSVPVEVERIDIGEPENPVVTVLSKFSLQ

SEQ ID NO: 182568 - protein, 529 aa, Zea Mays
MAIRAGRSALHLHALAFLILAASPCLQVQALVDHRKQISDWGRQPNFELQNMSSSQRDGSHLLGRSKEITHRKLRGRIGVRNKMEVVQQDDEALVKLENTGIERSKAVDSAVLGKYSIWRRENENEKADSRVRLMRDQMIMARIYSVLAKSRGKLDLYQELLARLKESQRSLGEATADAELPKSASDRIKAMGQVLSKARDLLYDCKEITQRLRAMLQSADEQVRSLKKQSTFLSQLAAKTIPNGIHCLSMRLTIDYYLLSPEKRKFPNSENLENPDLYHYALFSDNVLAASVVVNSTIMNAKEPEKHVFHLVTDKLNFGAMNMWFLLNPPGDATMHVENVDDFKWLNSSYCPVLKQLESAAMKEYYFKADRPKTLSAGSSNLKYRNPKYLSMLNHLRFYLPQVYPKLNKILFLDDDIVVQRDLTGLWEVDLNGNVNGAVETCGESFHRFDKYLNFSNPNIAQNFDPNACGWAYGMNMFDLEEWKKKDITGIYHKWQNMVNWKILHYLHLDTFSFNIAFNFPIRTQPSC

SEQ ID NO: 182569 - protein, 186 aa, Zea Mays
MPALDLQNIRRRHTPQVRRLHLHSRFVTKLGGVARGSRLNVVLRAVRRGVVTPDPDPTPPKSHIRMEGPRVRSPYATSSSSSPPHCAATSSSDARMEGPRPCTPKSQNVCTIRPLVTVMCFHQLSEGMGLGGCILQAKYVARMKAGLVFFFSTTTPFGIALELALTKMYRENSPTTLIVLWCRDAS

SEQ ID NO: 182570 - protein, 200 aa, Zea Mays
MEGNKGHRALLHTAFACSGGNNPISWKLRRFYSSNEKHLPAISDPEIESAFKDLLAASWNELPDSLVAEAKKAASKATDDSAGQEALKNVFRAAEACEEFSGTLVTLRMALDDLCGLTGENVGPLPGYIEDAVKAAYNRYMTYLESFGPEENYLRKKVETELGTKMIHLKMRCSGIGSEWGKISLIGTSGISGSYVELRA

SEQ ID NO: 182571 - protein, 92 aa, Zea Mays
MALDDLCGLTGENVGPLPGYIEDAVKAAYNRYMTYLESFGPEENYLRKKVETELGTKMIHLKMRCSGIGSEWGKISLIGTSGISGSYVELRA

SEQ ID NO: 182572 - protein, 428 aa, Zea Mays
MSTSPAASSSAPTAFAASAVTMAAEAADGPVLSVVSKRLRALRKKYNRITQMEESLAAGKSLNREQEELSSRSAPAPAATASSSDSDSSVQDLLALVYFGSLFDVKQQSDFVSLVYTRELERSSCLTYDYVGDDPEDSLVETDLNAVSALATLAASRPPAAAGVSHRDALQACAHHARLWLSRADEPIHPDSTITYAGVRAKLDRIMASGYYTAQLEMRTPMDLAAAVANFGAGGVQVQESMVVSPQALEAVEESQDVEEHKDEKEDSEATEIYSEHQAPVVDAEHVDDEGLVNPADEVPSAEAEQETLDDYVDDQEQKDQQFTQRRSYQNQRSGGGRGGGRRGYPNGRGVRGYQNGRGGGYQNGRGGGGYQNGRGGGGGYYESGYYQPRNYNNRGRGGRNSYYNNHGGGAQAGGHGHPGRVELGANA

SEQ ID NO: 182573 - protein, 377 aa, Zea Mays
MAAPRSSGGGHPDYPPETGVYYRGDLAPGSVDDSEWEEEEEDDDEEEASSSGREPETEETRFKSGIEGMLTRLQKDREQARPPPRSSTHDTREQSDDDALAGNSGAPSHIAAGGRHIRRVPENGSVRGSHYQNGIIEGNNTLESSSNDAWKTWTLGKGGLSHFEVAEVLPTERRKLSQHGDIASVQNDVQRSSNGVAVSDYPSDGVGTERDEIHSRLQSLELDLSSALKTLRSRFDKVLSHMSNSNGATVLDDISDDWELEETKVMQAQEELRSIRAKIAVLEGKIALEIIERNKIIEDKQRRLDEVEKALNELRTVCIMWANPATDVLLVGSFDGWTSQRKLERSENGMFSLNLRLYPGRYEELHYRRSNPHIECS

SEQ ID NO: 182574 - protein, 381 aa, Zea Mays
MPPRPALGARRSWRRRFTTSCAAPPSREPETEETRFKSGIEGMLTRLQKDREQARPPPRSSTHDTREQSDDDALAGNSGAPSHIAAGGRHIRRVPENGSVRGSHYQNGIIEGNNTLESSSNDAWKTWTLGKGGLSHFEVAEVLPTERRKLSQHGDIASVQNDVQRSSNGVAVSDYPSDGVGTERDEIHSRLQSLELDLSSALKTLRSRFDKVLSHMSNSNGATVLDDISDDWELEETKVMQAQEELRSIRAKIAVLEGKIALEIIERNKIIEDKQRRLDEVEKALNELRTVCIMWANPATDVLLVGSFDGWTSQRKLERSENGMFSLNLRLYPGRYENAAKNRRGDFVYGGKGFLPVKVRHSFIQVCVTEVLKACHRSKCL

SEQ ID NO: 182575 - protein, 231 aa, Zea Mays
MPPRPALGARRSWRRRFTTSCAAPPSREPETEETRFKSGIEGMLTRLQKDREQARPPPRSSTHDTREQSDDDALAGNSGAPSHIAAGGRHIRRVPENGSVRGSHYQNGIIEGNNTLESSSNDAWKTWTLGKGGLSHFEVAEVLPTERRKLSQHGDIASVQNDVQRSSNGVAVSDYPSDGVGTERDEIHSRLQSLELDLSSALKTLRSRFDKVLSHMSVVYFFSQIVMEQLC

SEQ ID NO: 182576 - protein, 244 aa, Zea Mays
MAAPRSSGGGHPDYPPETGVYYRGDLAPGSVDDSEWEEEEEDDDEEEASSSGREPETEETRFKSGIEGMLTRLQKDREQARPPPRSSTHDTREQSDDDALAGNSGAPSHIAAGGRHIRRVPENGSVRGSHYQNGIIEGNNTLESSSNDAWKTWTLGKGGLSHFEVAEVLPTERRKLSQHGDIASVQNDVQRSSNGVAVSDYPSDGVGTERDEIHSRLQSLELDLSSALKTLRSRFDKVLSHMSV

SEQ ID NO: 182577 - protein, 161 aa, Zea Mays
MPVIEFHQDEVWELPPGAEALARSDKTRVEMFRLGGRAMGVQGHPEYSKDVLMSIADRLLRHNHILDCQVEVAKTSFDVRQPDKELWSKVCRGFLKGRLQSSQQQGLPGGSGQDELRRAAAGQGAVEQGVQGLPQGKAPVVAAARCGAIAGGNWGGIGCLG

SEQ ID NO: 182578 - protein, 330 aa, Zea Mays
MGMGPLDNAASAALEAAAAAAAAPSRAGSYAVLQCGEDSEYVRQKYGGYFAVFRALLEEDGERWRVYSAVRGELPADAEAAGFDGFVISGSCADAHGDEPWILALVDLTRRVHAAGKRVLGVCFGHQILCRALGGRTGRSAKGWDIGVSCIHPTAAAARLFAPLKLPVHMPVIEFHQDEVWELPPGAEALARSDKTRVEMFRLGGRAMGVQGHPEYSKDVLMSIADRLLRHNHILDCQVEVAKTSFDVRQPDKELWSKVCRGFLKGRLQSSQQQGLPGGSGQDELRRAAAGQGAVEQGVQGLPQGKAPVVAAARCGAIAGGNWGGIGCLG

SEQ ID NO: 182579 - protein, 327 aa, Zea Mays
MGMGPLDNAASAALEAAAAAAAAPSRAGSYAVLQCGEDSEYVRQKYGGYFAVFRALLEEDGERWRVYSAVRGELPADAEAAGFDGFVISGSCADAHGDEPWILALVDLTRRVHAAGKRVLGVCFGHQILCRALGGRTGRSAKGWDIGVSCIHPTAAAARLFAPLKLPVHMPVIEFHQDEVWELPPGAEALARSDKTRVEMFRLGGRAMGVQGHPEYSKDVLMSIADRLLRHNHILVEVAKTSFDVRQPDKELWSKVCRGFLKGRLQSSQQQGLPGGSGQDELRRAAAGQGAVEQGVQGLPQGKAPVVAAARCGAIAGGNWGGIGCLG

SEQ ID NO: 182580 - protein, 188 aa, Zea Mays
MTCPAATATATTARIGARRGPCLWRSERRASFLVRSTSLLPDRPARDTRARAASELQQAPRPASATVPAHKVTVHDRQRGVIHEFVVPEDQYILHTAEAQDIRLPFACRHGCCTSCAVRIKSGQIRQPEALGISAELKDKGYALLCVGFPSGDVEVETQDEDEHVVCQFAGILAPIREILCTRASGKR

SEQ ID NO: 182581 - protein, 190 aa, Zea Mays
MTCPAATATATTARIGARRGPCLWRSERRASFLVRSTSLLPDRPARDTRARAASELQQAPRPASATVPAHKVTVHDRQRGVIHEFVVPEYILHTAEAQDIRLPFACRHGCCTSCAVRIKSGQIRQPEALGISAELKDKGYALLCVGFPSGDVEVETQDEDEVYWLQFGRYFARGPVERDDYALELAMGDE

SEQ ID NO: 182582 - protein, 145 aa, Zea Mays
MSIVPVVVLYRCTQLLCWLSRMPTDQKLRRHDRCCSSNSTKEIISNISSLSSDHRIELRNSRTPETVEPMAVLHLFNPISQTKCSNQASNCGEPHQQFSSGKQQVSRCVPYLEICRSFSLGKQRMAKRTETSCKEKCKNKSSEYS

SEQ ID NO: 182583 - protein, 172 aa, Zea Mays
MAGVTGTLWCAARVAGPVAAAAAAGVPAPVSLCTSSRKSLGSTRIVCVPGAVKTLWLPVFLPSQASASANPFHPIRIEKDTRFLVRLYRRIAPNPLRERAQAAMATAEAGPPTRSAISHEALRADDASSSPSASPLVNVSGPVLHSQPLMKMSMQSHQHAQGSTLRFVSRLR

SEQ ID NO: 182584 - protein, 69 aa, Zea Mays
MELFVSGLHRGRDWMRGLSANREGLAATPLMREGLDAAVAPLMVRPRDAGGMRPRAGRVAGGRTCTAPR

SEQ ID NO: 182585 - protein, 74 aa, Zea Mays
MGAFCKVVLDTLALNSYDTRDTVHRCQSSHQYHRWKTRRRYLCLSKSQTLSFFPSAIPPKNQHTSNTHTHMPVF

SEQ ID NO: 182586 - protein, 67 aa, Zea Mays
MSTHNALFMPVEACPHTRMKNNDIISPTTYQVLGFDFKNVGLPIHLHYHLNAKKENLEFFYTQCMST

SEQ ID NO: 182587 - protein, 405 aa, Zea Mays
MGAAARKPAAAGVLPIWLCLVCASRAQPYIGVNYGEVADNLPSADETARLLRSTSISKVRLYGVDAGLIRALAGSGISVVVGVANGDIPSLAADPAAASRWLAANVLPFVPATTISAVAVGNEVLESGDATLGAALLPAMQNLRAAAAAAGGGAAGIRFSTVNTMGVMAQSDPPSTGAFHPDVAPQLQQILGFLSRTGAPFMINPYPWFAYQSDPRPDTLAFCLFQPNAGRVDGGSKIRYTNMFDAQLDAVKSALVRAGYGDVDVVVAETGWPTRGDAGEPGATAENARAYVSNLVAHLRSGAGTPLMPGKAVETYLFALYDEDLKPGPTSERSFGLYHTDLSMAYDANNARRTGRNFPFLFSCRLRGMQCRSSCLFRRTGRNFPFLFSCPDCLPALGQAGMCHV

SEQ ID NO: 182588 - protein, 1114 aa, Zea Mays
MVMEAMCPRQIGLDEDLPLFALKLINSAIELGGSSIQKHPKLLSLVQDELFRNLMQFGLSMSPLILSIVCSIALNLYHHLRTELKLQLEAFFSCIIIRLAQPRFGATYHQQEVAMEALVDFCRQKNFMVEMYANLDCDITCRNVFEELANLLSKSAFPINCPLSSMHILALEGLIAVIQGMADRIGNAVSRPELLPVELDEYTPFWTVKCENFSDPRHWVKFVRQRKYVKRRLMIGADHFNRDPKKGLEFLQGTHLLPEKLDPQSVACFFRYTAGLDKNLVGDFLGNHDEFCVQVLHEFAQTFDFQEMNLDTALRLFLETFRLPGESQKIQRVLEAFSDRYYEQSPQSFANKDTALLLSYSIIMLNTDQHNMQVKKKMTEDDFIKNNRNINGGSDLPREMLSELYHSICRNEIKTTPEQGLGYFEMSPSRWIDLMRKSKSTSPYIIGDSQPFLDHDMFAVMSGPTIAAIAVVFDHSEHEEVLLTCIEGFLGVAKISAFHHLEDVLDDLVVSLCKFTTLLNTSLVEEPVTAFGDDLKARLATETLFTIANRYGDYIRTGWRNVLDCILRLHKLGLLPARVASDAADDSELPAEAVQRKAAPSSVPPSHIPVMGTPRKSSGLMGRFSQLLSLDSEEPRSQPTEQQLAAHQRTLQTIQKCRIDSIFTESKFLQPDSLLQLAKALIWAAGRPQKVASSPDDEDTAVFCLELLIAITLNNRDRIVLLWQGVYEHIASIVQSTVMPCALVEKAIFGLLRICQRLLPYKENLADELLRSLQLVLKLDARVADAYCENITQEVARLVKANAAHIKSQMGWRTVILLLSITARHPDASEVGFEAIVFIMTEGAHLSLANYGFCIDAARQFAESRVGLADRSVRALDLMSDSVRNLALWSQEIKATTFEEGEKGPEAIREMWLRLLQALKKLSLDQREEVRNHALASLQRCLTSTGELCLQSATWSHAFDLVIFSLLDDLLEISQNHSQKDYRNMEGSLVLAMKLVAKVYLQLLPDLFGLSSFCKLWLGVLSRMEKYVKVKVRGKRSDRLQEVVPDLLKNILLVMKSKGILAKRSTIGGDSLWELTWLHANNISTSLLPDVFPSQEYEQQSSTGSPRGPSPVEA

SEQ ID NO: 182589 - protein, 481 aa, Zea Mays
MRDDNSSKNKLSWSKTLVRKWFNIKTKAKDFHSDYAAEEAGVQWRTSFSDRDACKSKKSRTERLTKRNVERDGRVENGFDGAYITNTQDYRVFVATWNVGGRSPSSHLNLEDWLHTSPAADIYVIGFQEIVPLNAGNVLLTEDNGPAKKWVSLVRKTLNNLDQQGSGVYNYHTPSPAPDPIVELNVDFERSSRRQRNSSFFHRRSFQSLNRSSRIDMMDPHSLVDRRFSVCDRISFGSRPSDVDTSVRCGGSSDDETIDEESPSGMFFPPMPCAYGAPLCDGSRYCLVASKQMVGIFLMVWVRSDIREHVKNLKVSCVGRGLMGYLGNKGSISMSMSLHQTSFCFVCTHLTSGQKDGDQLRRNADVVEILRKTRFPHVHGAGEEKSPETILDHDRVIWLGDLNYRIALSYRSVKALVEMHNWKQLLEKDQLRIEQRFGRVFAGWREGRIYFPPTYKYSYNSDRYAGDDMRPNEKRRTPAWV

SEQ ID NO: 182590 - protein, 57 aa, Zea Mays
MVFQLVAWRKKKHSTMGISSDKFFLFLKKKHLGVKVPLSTQSNICRYQFDNLSLHKK

SEQ ID NO: 182591 - protein, 161 aa, Zea Mays
MAASNGGGGPGPGPISAEAEAALGEAIRLVFGRWTALQMAVENQWGGRDSRAKADQLGESILFWFCRTKGPYYFEDLVDMMYDKISESFNAYFEDNSIEEIVGDDDDDSDSSDDGDDTSMVADEEAGPEEMAVDRPRPPKPTPDADGWTVVPPRRGGRSKK

SEQ ID NO: 182592 - protein, 114 aa, Zea Mays
MAEPGLEGSQPVDLSKHPSGIVPTLQNIVSTVNLDCKLDLKAIALQARNAEYNPKRFAAVIMRIREPKTTALIFASGKMVCTGAKSEQQSKLAARKYARIIQKLGFPAKFKPGF

SEQ ID NO: 182593 - protein, 172 aa, Zea Mays
MLSGSSIAGSAQGEACLLNYNHMSFGGGPLEVGTEQEAEKLASQNDKDSANDVLSAPPKLVYNNYVLRLSRELLVAVASGWDKHVVIIDKIIPQAWKDEPVARILELCILHIAMAEMASKGTPHKVVINEAVDLAKRFCDGGAPRVINGCLRTFVKDHVDVAGTSQEAKSKS

SEQ ID NO: 182594 - protein, 52 aa, Zea Mays
MQSLTHSPTLPPSRSWLPPPYDGTVHTRHLLPPPMFLRGSVSGGCNGCRSAW

SEQ ID NO: 182595 - protein, 63 aa, Zea Mays
MFAFNTLFSIRRESTICGEQNVTKNGEQVTTESRDPGALQAAMSNRRTRSAYPLVPTAPQTLD

SEQ ID NO: 182596 - protein, 88 aa, Zea Mays
MATLRMILDSQLMRLLWPSYLIISGLPPRHARSRHCPLLLHYLRLYRHPQGVPGTGTGLGAAFRTPRSVGACRTRMRRSHTSPRMNAD

SEQ ID NO: 182597 - protein, 99 aa, Zea Mays
MATLRMILDSQLMRLLWPRPTSSPCSLSSLSSSTSLSSPLSSPTGGTRNWDRIRSCLQDSKVCRSLQNKNEKIAHLSQNECRLMGSCIHKVTYSVRQLC

SEQ ID NO: 182598 - protein, 51 aa, Zea Mays
MQIDGKLHSQSNLFSSAALLTLFTNITTWLKSRASKRSFSFQFFSTSLSFI

SEQ ID NO: 182599 - protein, 329 aa, Zea Mays
MDDDRDHDQDPDASSPAAPWRRSVKRKLGAEAGDEAGPAARVEAEDERAALREAAAAAQSTASALRVEVEEERLAAASAASEAMAMMLRLQRDKAEVQMELRQFRRFADEKMALDAAEIDQLRALLAQRARRLLRLRSRLREYRLQCLHLGIPLPEGEDLVAQNAAEEEEEDLLLLEGEEGYIVGDGGYYYPELRCNDGEYYYEDGREEEDVVALDLERRICLLEHDQEPRLLEPPHEKEEGTHLYTDEVLPDMSEHELGGLYADEMLSKEDVETMNNLHNDDEELPESPTAGNDDGEEASEADGADSVSGSGSDRVYTICLENTQLGL

SEQ ID NO: 182600 - protein, 249 aa, Zea Mays
MARSRGTGTTAPAGRVAMDCLGKGTRSTTPREKRCISTTTPSRSAPTSHSRRRPSSWKNGGRRLMVFLLKAVLHTKLSQNLSLMPQLLSEREREIPVLVFSAGLADIIEEVFRQKLHKTFKNIKVVSNRMVFNEEGRLIAFKGKTIHVLNKNEHALDMAAPVHGNPGDPNGSMDDYSLVKKRTNVLLLGDHIGDLGMSDGLNYDNRIAVGFLNANIEKSLKDYSSAFDIVYLNDAPMHGVVQLVSELCP

SEQ ID NO: 182601 - protein, 399 aa, Zea Mays
MFGRAPKKSDNTKYYEILGVPKSASQDDLKKAYRKAAIKNHPDKGGDPEKFKELAQAYEVLSDPEKREIYDQYGEDALKEGMGGGGGGSSRGRRQRRGEDVVHSLKVSLEDLYNGISKKLSLSRNVICSKCKGKGSKSGASMRCPGCQGSGMKVTIRQLGPSMIQQMQQPCNECKGTGESINEKDRCPGCKGEKVVQEKKVLEVHVEKGMQHSQKITFPGEADEAPDTVTGDIVFVLQQKDHSKFKRKGEDLFYEHTLSLTEALCGFQFVLTHLDNRQLLIKSNPGEVVKPDQFKAINDEGMPIYQRPFMKGKLYIHFTVEFPDSLAPEQCKALESVLPPKPSSKLTDMEIDECEETTMHDVNNIEEEMRRKQAHAAQEAYEEDDEMPGGAQRVQCAQQ

SEQ ID NO: 182602 - protein, 455 aa, Zea Mays
MGKQAMGIYVTNYQLRMDTLAYVLYYPQKPLVTTRAMEHLHFRQLPAGINAIVAIACYSGYNQEDSVIMNQSSIDRGFFRSLFFRSYRDEEKKMGTLIKEEFGRPNRENTMGMRHGSYDKLDDDGLAPPGTRVSGEDVIIGKTSPIPQDDAQGQASRYSKRDHSTALRHSESGMVDQVLLTTNADGLRFVKVRMRSVRIPQIGDKFSSRHGQKGTVGMTYTQEDMPWTIEGITPDIIVNPHAIPSRMTIGQLIECIMGKVAAQMGKEGDATPFTDVTVDNISKALHKCNYQMRGFETMYNGHTGRKLTAMIFLGPTYYQRLKHMVDDKIHSRGRGPVQILTRQPAEGRSRDGGLRFGEMERDCMIAHGAAFFLKERLFDQSDAYRVHVCEKCGLIAIANLKKNSFECRGCKNKTDIVQVHIPYACKLLFQELMAMAIAPRMLTHDMKTGKDQKKR

SEQ ID NO: 182603 - protein, 513 aa, Zea Mays
MISMTINDLQNARHNPEEAYSETYTHCEIHPSLILGVCASIIPFPDHNQSPRNTYQSAMGKQAMGIYVTNYQLRMDTLAYVLYYPQKPLVTTRAMEHLHFRQLPAGINAIVAIACYSGYNQEDSVIMNQSSIDRGFFRSLFFRSYRDEEKKMGTLIKEEFGRPNRENTMGMRHGSYDKLDDDGLAPPGTRVSGEDVIIGKTSPIPQDDAQGQASRYSKRDHSTALRHSESGMVDQVLLTTNADGLRFVKVRMRSVRIPQIGDKFSSRHGQKGTVGMTYTQEDMPWTIEGITPDIIVNPHAIPSRMTIGQLIECIMGKVAAQMGKEGDATPFTDVTVDNISKALHKCNYQMRGFETMYNGHTGRKLTAMIFLGPTYYQRLKHMVDDKIHSRGRGPVQILTRQPAEGRSRDGGLRFGEMERDCMIAHGAAFFLKERLFDQSDAYRVHVCEKCGLIAIANLKKNSFECRGCKNKTDIVQVHIPYACKLLFQELMAMAIAPRMLTHDMKTGKDQKKR

SEQ ID NO: 182604 - protein, 1177 aa, Zea Mays
MTSTRMGWTWATAGITSAAAATRGTARRRTTRWGMARGVGTGTRWRRRRMGTPSSRKISRRTTPGPSSPPTSRRRASCASSSTPSMSSSRTPCKRLSMSPPTSRSGPSRSTTPAVRPSLPRVMKKGHDCEEVTETAEYPKVFIGKVPIMLRSSYCTLYQQSEKDLTELGECPYDQGGYFIINGSEKVLIAQEKMSTNHVYVFKKRQPNKFAYVAEVRSMAENQNRPASSMFVRMLSRAGAKGGSSGQYIRATLPYIRADIPIIIVFRALGFVADKDILEHICYDFSDTQMMELLRPSLEEAFVIQNQQVALDYIGKRGATVGVTREKRIKYAKEILQKEMLPHVGVGEFCETKKAYYFGYIIHRLLMCALSRRAEDDRDHYGNKRLDLAGPLLGGLFRMLFRKLTRDVRSYVQKCVDNGKEVNLQFAIKAKTITSGLKYSLATGNWGQANQAGTRAGVSQVLNRLTYASTLSHLRRLNSPIGREGKLAKPRQLHNSHWGMMCPAETPEGQACGLVKNLALMVYITVGSAANPILEFLEEWGTENFEEISPAVIPQAAKIFVNGCWVGIHRNPDLLVKTLRRLRRQIDVNTEVGVVRDIRLKELRLYTDYGRCSRPLFIVEGQRLLIKKAHIRALQQRETPDEGWHELVSKGYIEYIDTEEEETTMISMTINDLQNARHNPEEAYSETYTHCEIHPSLILGVCASIIPFPDHNQSPRNTYQSAMGKQAMGIYVTNYQLRMDTLAYVLYYPQKPLVTTRAMEHLHFRQLPAGINAIVAIACYSGYNQEDSVIMNQSSIDRGFFRSLFFRSYRDEEKKMGTLIKEEFGRPNRENTMGMRHGSYDKLDDDGLAPPGTRVSGEDVIIGKTSPIPQDDAQGQASRYSKRDHSTALRHSESGMVDQVLLTTNADGLRFVKVRMRSVRIPQIGDKFSSRHGQKGTVGMTYTQEDMPWTIEGITPDIIVNPHAIPSRMTIGQLIECIMGKVAAQMGKEGDATPFTDVTVDNISKALHKCNYQMRGFETMYNGHTGRKLTAMIFLGPTYYQRLKHMVDDKIHSRGRGPVQILTRQPAEGRSRDGGLRFGEMERDCMIAHGAAFFLKERLFDQSDAYRVHVCEKCGLIAIANLKKNSFECRGCKNKTDIVQVHIPYACKLLFQELMAMAIAPRMLTHDMKTGKDQKKR

SEQ ID NO: 182605 - protein, 170 aa, Zea Mays
MSTNHVYVFKKRQPNKFAYVAEVRSMAENQNRPASSMFVRMLSRAGAKGGSSGQYIRATLPYIRADIPIIIVFRALGFVADKDILEHICYDFSDTQMMELLRPSLEEAFVIQNQQRLLWTTLESVAQQLVSLEKRELNTQRKYFRRKCCLMLVLGNSVKLRRHTILGILF

SEQ ID NO: 182606 - protein, 326 aa, Zea Mays
MEEVEEANREAVESCRRVLALLSHPHDPAQVRSIALGTDEACTKFRKVVSLLSNGEVGTGEAGPSGTSASASHPRAKLVSRRQNPGFLTQKGFLDSNTPVVVLNSAAHPSPTSAQVHPRAGALDTEGVHPLGVGGPPKLVQPLSAHFQFGNVSSRYQQLPSHHHRHQQQEKLQAAEMFKRSNSGINLKFESASGTGTMSSARSFLSSLSMDGSVVASLDGKLPSSSSSFRLIGAPAMSDPANAAQQAPRRRCTGRGKDGTGKCALAGRCHCSKRSKKLRVKRSIKVPAVSNKIADIPPDEYSWRKYGQKPIKGSPHPRYGLNTEVV

SEQ ID NO: 182607 - protein, 93 aa, Zea Mays
MSSSRSTEELWQVFFANPLDWWDNRTNKKNPRYPDFKHKQTGEALWVDGRNNPNWVISQLAVLDSRMSSLQDNERKPVSYMYADEFMTLDGNR

SEQ ID NO: 182608 - protein, 262 aa, Zea Mays
MAILAVASPLKTLNPSPGDHSRCRLSSSLLHLPLPVPRWRRLRCSAQYSEAAAQPTSTTTARPADIPWSKELCNSVRLIGTVGTDVELRQLPSGSAVARGRLAVWKSATETTWVTLQFWDDLAIVASEHVKKGDRIFVSGRLVSDTVDEGPEKRHVYYKLAVQQLNFIESQPVRLYEPEASQDALGGRRADYFNSISNSTEDKNRDNMSSSRSTEELWQVFFANPLDWWDNRTNKRSAERLLGLCPQIVPSTEEPKVSRLQA

SEQ ID NO: 182609 - protein, 391 aa, Zea Mays
MLSSSSPSSSSRRDCGFPVQEVAPLTSGRLSHSSGPLNGGGSLSDSPPVSPEIDDAKYCRAASTPKAQAYRAGNKTVGRWLKDRREKRKEETRAHNAQVHAAVSVAAVAAAVAAVAAATATASASGGKDERAARTDMAVASAATLVAAQCVEAAEAMGAEREHLEAAVGSAVSVRTPGDIVTVTAAAATALRGAATLKARALKEVWNIAAVIPVEKGPGPVGGGGGGHHHQHHQKHGAPKQQLHRKMDSDGSSVSDLSLEEENSFLGICSQELLARGTELLKRTRKGALHWKVVSVYINRMGLVMLKTKSRHVAGTITKKKKSVVVEVCRDVPAWPGRHLLEDGGHRRYFGLRTAERRVVEFECRSQREYEMWTKGVARLLSVAAERKRLA

SEQ ID NO: 182610 - protein, 226 aa, Zea Mays
MNIFKKKVDPKEALRTSKREMAVATRGVEREIGSLQMEEKKLVAEIKKTAKTGNEAATKILARQLVRLRQQILNLQGTRAQIRGVATHTQAMYAGTSISAGMKGASKAMSAMNKQMEPAKQIKVMKEFQKQSTQLDMTLEMMSDAIDETLDKDEAEEETEELTNQVLDEIGVDVASQLSSAPKGRIGATNKKVDNGQARNVAAPALEPSSAEVEDLERRLASLRRT

SEQ ID NO: 182611 - protein, 138 aa, Zea Mays
MYAGTSISAGMKGASKAMSAMNKQMEPAKQIKVMKEFQKQSTQLDMTLEMMSDAIDETLDKDEAEEETEELTNQVLDEIGVDVASQLSSAPKGRIGATNKKVDNGQARPARNVAAPALEPSSAEVEDLERRLASLRRT

SEQ ID NO: 182612 - protein, 147 aa, Zea Mays
MECPSVSSKLVPAPAWRLQPRSRRPPPPSHVDEAAVGEALPSLGYRQLSGPWAPSRRASSVPLRGSLVEEIRQTKVYPLEETRLMHIAGKKGVLVPFFVNTVQALILFVHMPLRIFLYYPSPFQNHCTANCLHSKLSIQSFSFRCIH

SEQ ID NO: 182613 - protein, 184 aa, Zea Mays
MPQNSFIIATKTVSAEVYVFDYSKHPSKPPLDGACNPDLRLKGHNSEGYGLSWSIFNEGHLLSGSEDAQICLWDIKANSRNKSLDALQIFKHHDGVVEDVAWHLRHGYLFGSVGDDHHLLIWDLRSPSPARPVQSVVAHQGEVNCLAFNPFNEWVVATGSTDKTVKLFDLRKIHTSLHTFDCHK

SEQ ID NO: 182614 - protein, 224 aa, Zea Mays
MIAEVHMPCKDSFSKHCAKSKKVQIVQQINHDGEVNRARYMPQNSFIIATKTVSAEVYVFDYSKHPSKPPLDGACNPDLRLKGHNSEGYGLSWSIFNEGHLLSGSEDAQICLWDIKANSRNKSLDALQIFKHHDGVVEDVAWHLRHGYLFGSVGDDHHLLIWDLRSPSPARPVQSVVAHQGEVNCLAFNPFNEWVVATGSTDKTVKLFDLRKIHTSLHTFDCHK

SEQ ID NO: 182615 - protein, 347 aa, Zea Mays
MPKAGSGVADEEDFRAEVDERLINEEYKIWKKNTPFLYDLVITHALEWPSLTVQWLPERTEPPGKDHWVQKMILGTHTSDNEPNYLMLAQVQLPHEDTEADVRHYDDEHSDNGLFGAATGEYGGCISAAEYWWTNCSEPAKPTTKVQIVQQINHDGEVNRARYMPQNSFIIATKTVSAEVYVFDYSKHPSKPPLDGACNPDLRLKGHNSEGYGLSWSIFNEGHLLSGSEDAQICLWDIKANSRNKSLDALQIFKHHDGVVEDVAWHLRHGYLFGSVGDDHHLLIWDLRSPSPARPVQSVVAHQGEVNCLAFNPFNEWVVATGSTDKTVKLFDLRKIHTSLHTFDCHK

SEQ ID NO: 182616 - protein, 341 aa, Zea Mays
MPKAGSGVADEEDFRAEVDERLINEEYKIWKKNTPFLYDLVITHALEWPSLTVQWLPERTEPPGKDHWVQKMILGTHTSDNEPNYLMLAQVQLPHEDTEADVRHYDDEHSDNGLFGAATGEYGGCISAAEYWWTNCSEPAKPTTKINHDGEVNRARYMPQNSFIIATKTVSAEVYVFDYSKHPSKPPLDGACNPDLRLKGHNSEGYGLSWSIFNEGHLLSGSEDAQICLWDIKANSRNKSLDALQIFKHHDGVVEDVAWHLRHGYLFGSVGDDHHLLIWDLRSPSPARPVQSVVAHQGEVNCLAFNPFNEWVVATGSTDKTVKLFDLRKIHTSLHTFDCHK

SEQ ID NO: 182617 - protein, 230 aa, Zea Mays
MPKAGSGVADEEDFRAEVDERLINEEYKIWKKNTPFLYDLVITHALEWPSLTVQWLPERTEPPGKDHWVQKMILGTHTSDNEPNYLMLAQVQLPHEDTEADVRHYDDEHSDNGLFGAATGEVQIVQQINHDGEVNRARYMPQNSFIIATKTVSAEVYVFDYSKHPSKPPLDGACNPDLRLKGHNSEGYGLSWSIFNEGHLLSGSEDAQICLWDIKANSRNKSLDALQIFK

SEQ ID NO: 182618 - protein, 54 aa, Zea Mays
MTYMQCHRYSGPESSWWRIYALNVASLSSCKQNRFWVTASLASINSRSWCIKYS

SEQ ID NO: 182619 - protein, 53 aa, Zea Mays
MGRMVDEEIRRNDSYPDVGPFIFLCVISVKKLEEHSVQYLVSLKLLFHWFSVL

SEQ ID NO: 182620 - protein, 122 aa, Zea Mays
MAWRGAASRSIIAAVRARAASPSSTAASRLRSTAPLPAPSRRSVPAFAFATARPKWEGWLMRRSDGMIHILMHLMRTFVLKCKDWILWRLHPLETHRACVLFHAFCRVLSASCVGKRTVYLL

SEQ ID NO: 182621 - protein, 73 aa, Zea Mays
MAWRGAASRSIIAAVRARAASPSSTAASRLRSTAPLPAPSRRSVPAFAFATARPKWEGWLMRRSDGMIHILMK

SEQ ID NO: 182622 - protein, 200 aa, Zea Mays
MENLSLAEFTDTRCSALSYLSLLHTLRHTKRSEKPIHMQCMQPTFSSVHQVGTYLDEVADVDDERVGHGPDADPLAVGAPPDVEPPDVVLVQDGQGAGVLVPPHAEGQVGARARRVVVQPDEGRLVLEEAVQPVGPQLQAPGDQLQQLERQLFHRFRVLLQRLSAETYVWSSKTVIDEKCEGRVDSCRWTESGEGRTLGT

SEQ ID NO: 182623 - protein, 229 aa, Zea Mays
MDRFCLHRCMDRSVMPWAARLLAVACVSLAAKMEEYRAPALPEFRADDEYDFSSVSIRRMELLVLSTLGWRMGDVTPLDYLPCLSSSRLRRGGDGGLVAAKAAALIFSTAEAASVLDYRPSTVAVAAVLAAAHGAVTKEALESKMSSLSPSSLLDKDDVHACYSTMMLNESSSATPSKLLAAKRPAPSASGSTGAGSPYESVDADSSSFAAAADSNKRARLVELPAVGR

SEQ ID NO: 182624 - protein, 659 aa, Zea Mays
MSAAAGTPPEDGGDRPWQSYHTAYTNAKAGMEGVDKEKVQKVIYEMSKGSKYFENEQRKEAATKQKIEHLRAQCAVLTDNDISHFQKVADKKMLELEASRDLSKIWLHTDMDAFYAAVETLENPSLKGKPLAVGSMSMIATASYEARKFGVRAAMPGFIGCKLCPDLVFVPPNFERYTHYSELTRKVFQRYDPNFIATSLDEAYLNITNVCIERGITGEEETGLTCSAGVAPNRMIAKVCSDINKPNGQFILPNDWEAVLTFVSTLPIRKIGGIGKVTEQMLHQVLGISTCQEMLQKAAFLCALFSESSADFFLSVGLGLGGTETPEQRQRKSISCERTFTATNDSSLLFKKLASLAENLSDDLQKEGFKGKTLTLKLKTADFEVRTRAVTTRNYIDSKEDILVYATKLIKAEMPISLRLMGLRMSQLHDEKDDPSTSTQKTLDIFFRSSNSNSNGNGTTVQRITNSPGQDNDSISLTTKEEYLAPDAGTSVSTGQQDFFLHDEICFIPEQQRSLDNDTKEAVLSDPLGGTKSDDVSSSAKVTPTKKLDEPDPLISPKAVSSSSKPDQQSWIDGYICSICGFELPPGFEEERLEHSDFHLAETLQQEEAVDGTRHISNESWVAERPRSTAPTPKKKLKSSKEGKHIPIDSFFTKCNKSP

SEQ ID NO: 182625 - protein, 425 aa, Zea Mays
MIAKVCSDINKPNGQFILPNDWEAVLTFVSTLPIRKIGGIGKVTEQMLHQVLGISTCQEMLQKAAFLCALFSESSADFFLSVGLGLGGTETPEQRQRKSISCERTFTATNDSSLLFKKLASLAENLSDDLQKEGFKGKTLTLKLKTADFEVRTRAVTTRNYIDSKEDILVYATKLIKAEMPISLRLMGLRMSQLHDEKDDPSTSTQKTLDIFFRSSNSNSNGNGTTVQRITNSPGQDNDSISLTTKEEYLAPDAGTSVSTGQQDFFLHDEICFIPEQQRSLDNDTKEAVLSDPLGGTKSDDVSSSAKVTPTKKLDEPDPLISPKAVSSSSKPDQQSWIDGYICSICGFELPPGFEEERLEHSDFHLAETLQQEEAVDGTRHISNESWVAERPRSTAPTPKKKLKSSKEGKHIPIDSFFTKCNKSP

SEQ ID NO: 182626 - protein, 566 aa, Zea Mays
MSAAAGTPPEDGGDRPWQSYHTAYTNAKAGMEGVDKEKVQKVIYEMSKGSKYFENEQRKEAATKQKIEHLRAQCAVLTDNDISHFQKVADKKMLELEASRDLSKIWLHTDMDAFYAAVETLENPSLKGKPLAVGSMSMIATASYEVCSDINKPNGQFILPNDWEAVLTFVSTLPIRKIGGIGKVTEQMLHQVLGISTCQEMLQKAAFLCALFSESSADFFLSVGLGLGGTETPEQRQRKSISCERTFTATNDSSLLFKKLASLAENLSDDLQKEGFKGKTLTLKLKTADFEVRTRAVTTRNYIDSKEDILVYATKLIKAEMPISLRLMGLRMSQLHDEKDDPSTSTQKTLDIFFRSSNSNSNGNGTTVQRITNSPGQDNDSISLTTKEEYLAPDAGTSVSTGQQDFFLHDEICFIPEQQRSLDNDTKEAVLSDPLGGTKSDDVSSSAKVTPTKKLDEPDPLISPKAVSSSSKPDQQSWIDGYICSICGFELPPGFEEERLEHSDFHLAETLQQEEAVDGTRHISNESWVAERPRSTAPTPKKKLKSSKEGKHIPIDSFFTKCNKSP

SEQ ID NO: 182627 - protein, 286 aa, Zea Mays
MSAAAGTPPEDGGDRPWQSYHTAYTNAKAGMEGVDKEKVQKVIYEMSKGSKYFENEQRKEAATKQKIEHLRAQCAVLTDNDISHFQKVADKKMLELEASRDLSKIWLHTDMDAFYAAVETLENPSLKGKPLAVGSMSMIATASYEARKFGVRAAMPGFIGCKLCPDLVFVPPNFERYTHYSELTRKVFQRYDPNFIATSLDEAYLNITNVCIERGITGEEVAIELRSAIHQETGLTCSAGVAPNRMIAKVCSDINKPNGQFILPNDWEAVLTFVSTLPIRKIFVCR

SEQ ID NO: 182628 - protein, 666 aa, Zea Mays
MSAAAGTPPEDGGDRPWQSYHTAYTNAKAGMEGVDKEKVQKVIYEMSKGSKYFENEQRKEAATKQKIEHLRAQCAVLTDNDISHFQKVADKKMLELEASRDLSKIWLHTDMDAFYAAVETLENPSLKGKPLAVGSMSMIATASYEARKFGVRAAMPGFIGCKLCPDLVFVPPNFERYTHYSELTRKVFQRYDPNFIATSLDEAYLNITNVCIERGITGEEVAIELRSAIHQETGLTCSAGVAPNRMIAKVCSDINKPNGQFILPNDWEAVLTFVSTLPIRKIGGIGKVTEQMLHQVLGISTCQEMLQKAAFLCALFSESSADFFLSVGLGLGGTETPEQRQRKSISCERTFTATNDSSLLFKKLENLSDDLQKEGFKGKTLTLKLKTADFEVRTRAVTTRNYIDSKEDILVYATKLIKAEMPISLRLMGLRMSQLHDEKDDPSTSTQKTLDIFFRSSNSNSNGNGTTVQRITNSPGQDNDSISLTTKEEYLAPDAGTSVSTGQQDFFLHDEICFIPEQQRSLDNDTKEAVLSDPLGGTKSDDVSSSAKVTPTKKLDEPDPLISPKAVSSSSKPDQQSWIDGYICSICGFELPPGFEEERLEHSDFHLAETLQQEEAVDGTRHISNESWVAERPRSTAPTPKKKLKSSKEGKHIPIDSFFTKCNKSP

SEQ ID NO: 182629 - protein, 656 aa, Zea Mays
MSAAAGTPPEDGGDRPWQSYHTAYTNAKAGMEGVDKEKVQKVIYEMSKGSKYFENEQRKEAATKQKIEHLRAQCAVLTDNDISHFQKVADKKMLELEASRDLSKIWLHTDMDAFYAAVETLENPSLKGKPLAVGSMSMIATASYEARKFGVRAAMPGFIGCKLCPDLVFVPPNFERYTHYSELTRKVFQRYDPNFIATSLDEAYLNITNVCIERGITGEEVAIELRSAIHQETGLTCSAGVAPNRMIAKVCSDINKPNGQFILPNDWEAVLTFVSTLPIRKVLGISTCQEMLQKAAFLCALFSESSADFFLSVGLGLGGTETPEQRQRKSISCERTFTATNDSSLLFKKLASLAENLSDDLQKEGFKGKTLTLKLKTADFEVRTRAVTTRNYIDSKEDILVYATKLIKAEMPISLRLMGLRMSQLHDEKDDPSTSTQKTLDIFFRSSNSNSNGNGTTVQRITNSPGQDNDSISLTTKEEYLAPDAGTSVSTGQQDFFLHDEICFIPEQQRSLDNDTKEAVLSDPLGGTKSDDVSSSAKVTPTKKLDEPDPLISPKAVSSSSKPDQQSWIDGYICSICGFELPPGFEEERLEHSDFHLAETLQQEEAVDGTRHISNESWVAERPRSTAPTPKKKLKSSKEGKHIPIDSFFTKCNKSP

SEQ ID NO: 182630 - protein, 184 aa, Zea Mays
MPKPPAGFVLNEWGRCIAAAFKCIFIIVRSWPAAGHQYHRLGPPTSCNAGPVLSPFDREFSTKKISIMKRIALSALIKIYGCFLFHLASDFDNMRPHLIIVGALKMINIIAPSWRVIPATNMIDKIRKDPQLKKKICFNPYMYRGNLALQIGCKLLSVSLDIKKSLHEVRSSPSVRPPHATLVA

SEQ ID NO: 182631 - protein, 168 aa, Zea Mays
MPKPPAGFVLNEWGRCIAAAFKCIFIIVRSWPAAGHQYHRLGPPTSCNAGPVLSPFDREFSTKKISIMKRIALSALIKIYGCFLFHLASDFDNMRPHLIIVGALKMINIIAPSWRVIPATNMIDKIRKDPQLKKKICFNPYMYRGNLALQIGCKLLSVSLDIKKSLHE

SEQ ID NO: 182632 - protein, 74 aa, Zea Mays
MINIIAPSWRVIPATNMIDKIRKDPQLKKKRKPRTANRLQTPFRQPRHQEEPARVTSARTTSSLIVPGASCCTT

SEQ ID NO: 182633 - protein, 100 aa, Zea Mays
MITRSQQKRYCFQEECSCEQSSSQLPLPCPLRNKKESQHLGSPDFLKLNNWNSVRIYSLNQREDPCRTWWLGRCGNFSNSDPFSFHNFHFITTQISWIAY

SEQ ID NO: 182634 - protein, 179 aa, Zea Mays
MPKPPAGFVLNEWGRCIAAAFKCIFIIVRSWPAAGHQYHRLGPPTSCNAGPVLSPFDREFSTKKISIMKRIALSALIKIYGCFLFHLASDFDNMRPHLIIVGALKMINIIAPSWRVIPATNMIDKIRKDPQLKKKRKPRTANRLQTPFRQPRHQEEPARVTSARTTSSLIVPGASCCTT

SEQ ID NO: 182635 - protein, 287 aa, Zea Mays
MIKIWYTLRNAEYRLSFERNLELSEEVAECQKSDVIEDNHHDINLGTPVTIFRLAEEDMPQDPEKTDDESSYENMGEELGDLTLQAEEYIIQMQSRLDAMKKELHDLRRKNSALQMQRFVGEEKNDLLDYLRSLTPEKVAELSESSCPGVQEAIHSVVHGLLATLSPKIHSKAPPPLDNTSGGVLNLGGEDDDCAELVENASLPFQPLISVPRDYLARLLFWYCEADLIGIVMFIYHVATEHRHFQLFRCMLLGHYIRGLEYRLELAQLLRISSDVGSFSGGDDHVV

SEQ ID NO: 182636 - protein, 258 aa, Zea Mays
MTGYTLRNAEYRLSFERNLELSEEVAECQKSDVIEDNHHDINLGTPVTIFRLAEEDMPQDPEKTDDESSYENMGEELGDLTLQAEEYIIQMQSRLDAMKKELHDLRRKNSALQMQRFVGEEKNDLLDYLRSLTPEKVAELSESSCPGVQEAIHSVVHGLLATLSPKIHSKAPPPLDNTSGGVLNLGGEDDDCAELVENASLPFQPLISVPRDYLARLLFWCMLLGHYIRGLEYRLELAQLLRISSDVGSFSGGDDHVV

SEQ ID NO: 182637 - protein, 271 aa, Zea Mays
MPTAYSLRAPPSTAQQRLRLPPPPLPLCPAGGGAARRRRVVGVASASASPFDELYARGRPAHGPSKKSMLWNLIQDIEPLDLSVIQKDVAPETVDAMKRTISGMLGLLPSDQFRVIVEALWNPFFKLLVSSIMTGYTLRNAEYRLSFERNLELSEEVAECQKSDVIEDNHHDINLGTPVTIFRLAEEDMPQDPEKTDDESSYENMGEELGDLTLQAEEYIIQMQSRLDAMKKVTTVCCFISQPVSFTTMLRYLTLYLPQLCIYLLVHKFKL

SEQ ID NO: 182638 - protein, 122 aa, Zea Mays
MSGLTGDTMDSHRLIALAGHQGYDKQNALVGELFLNYFCEGKYIGDKQVLLDAARKVGIEGAEELFQDPTKGVDEVQEELKKYSSGISGVPHFVINDKYQLSGGQPPNVFMRAFEMAAKDGA

SEQ ID NO: 182639 - protein, 178 aa, Zea Mays
MIPVSEFLFTRVPTLCLSACFAWKVRWHPFFLNPDAPKEGVRKSDFYKAKFGPVQYERVISRMAEIFRGLGLEYDMSGLTGDTMDSHRLIALAGHQGYDKQNALVGELFLNYFCEGKYIGDKQVLLDAARKVGIEGAEELFQDPTKGVDEINDKYQLSGGQPPNVFMRAFEMAAKDGA

SEQ ID NO: 182640 - protein, 576 aa, Zea Mays
MLVAGRWSRSKERMEGTLLLLLLGLLLVLPLLLVKLVVVNKYFPAAPWQPGKPPLRLPPGPRQLPVIGSLHHLLASRHGGLLHRAMRELSIQHGPVMLLRLGAVPTLVVSSAEAAREVLKTHDAAFASRHQTPTLDVFSLGGRDILFSPYGELWRQLRRICVLELFSARRVQSFRRIREEEAAGLLRSVADSCAGGSAVVDIGERACRAMNDTVVRSAVGGRCARRDEFLRELHRAVVLTSGFNLADLYPSSRLVRRLSRALRETERCNRNVRDIMGDIIREQLQTAAGDGGRGEREEEEKDNNLLAVLLRLQRDGGDDAQCPLTTDVISTVVLEIFSAGSETSATTLEWALSELTRNPRVMRRAQAEMREAFRGQRRLGEADTARLRYLPLVVKETLRLHVPVPFLLPRECREACRVMGYDVARGTKVLVNAWAIARDAAYWGDPEAFRPERFEGGGGAVDFRGADMEFIPFGAGRRMCPGMSLGLVNMELALAGLLYHFDWTLPDGDGKVLDMSEAFGITVKRKSKLVLRATPRVPFSIRTAAAPGRHVWRSPADQDSGSTPAPDTSARSCPES

SEQ ID NO: 182641 - protein, 81 aa, Zea Mays
MEHLHSSLPLSLRLVLGASAFLLLDSVAVICYVAEGQARADPLAVVGLFCSCSRETAYMPRSILRCANSSVRCSMREGYTT

SEQ ID NO: 182642 - protein, 209 aa, Zea Mays
MYRGGLDRFKKAQTLEPFSVKSESGTKKAPAAAGTAKALAPLTLPLDSNFVPGQNHQSPQGTISRVAGQDGDAPGHVGTQVGGGQSTWQPPDWAIEPRPGVYYLDVVKDGEVIDRINLDNRRHLFGRQVPACDFVLDHQSVSRQHAAVIPHRNGRYDHLATNNGNVYSSVEATVLCNYKELRKGTTSTALAYPHCQKKLNLLALLNAHY

SEQ ID NO: 182643 - protein, 175 aa, Zea Mays
MYRGGLDRFKKAQTLEPFSVKSESGTKKAPAAAGTAKALAPLTLPLDSNFVPGQNHQSPQGTISRVAGQDGDAPGHVGTQVGGGQSTWQPPDWAIEPRPGVYYLDVVKDGEVIDRINLDNRRHLFGRQVPACDFVLDHQSVSRQHAAVIPHRNGRLESSCPITCNSIICSYVFHV

SEQ ID NO: 182644 - protein, 290 aa, Zea Mays
MIGNGQHPEVFHLVQNFNLEDKYPPFSLLKGYIQKAKQTFVEMFKKSQTHESLELYGCMAPWVARTLDIQATLCCRQKFEAAILLLTDFFRNWAIPKELWIAHYLAEQKLTDSKQRSAIMAEIKYLMSGYEKKQRSENLSTWASQHPPTESKRRNRKRKEEEQEHHEAQYNQQQQEQNENKLIQGKRHQLHQENMAQVTQQQQQHMQPTTRPATLKLPTPAIPLVLNAAQIQNFARPAYAAVPGVHNYPAQPGWSAAQGSPFVPQFMSPQYMGLPFNPFGLHPTCYPRRR

SEQ ID NO: 182645 - protein, 398 aa, Zea Mays
MPQIRRHLSFKWSSYSYPTRTSDTTEQAKLVAKDWKKMIDNTVCCRELDTLSRGLLQFLIAYNIVSEFNIHDIISIFAMVRKGYKNNNIAKLCEDLGLADRATGLIDYMIGNGQHPEVFHLVQNFNLEDKYPPFSLLKGYIQKAKQTFVEMFKKSQTHESLELYGCMAPWVARTLDIQATLCCRQKFEAAILLLTDFFRNWAIPKELWIAHYLAEQKLTDSKQRSAIMAEIKYLMSGYEKKQRSENLSTWASQHPPTESKRRNRKRKEEEQEHHEAQYNQQQQEQNENKLIQGKRHQLHQENMAQVTQQQQQHMQPTTRPATLKLPTPAIPLVLNAAQIQNFARPAYAAVPGVHNYPAQPGWSAAQGSPFVPQFMSPQYMGLPFNPFGLHPTCYPRRR

SEQ ID NO: 182646 - protein, 309 aa, Zea Mays
MGTAAPAMMPTEDLEAAIAELPAKKGVLREAFHTLAACSPYPLPFTWEDLDAHVSSVQSSISRRFSQLRALEAAGTARSSKNKEEDNEVEEEDEVVEEEEEEEEVEEEMVEEDEEEEEEEDEEEGEEEQEEEEEEEVVEEEGEEEEGEEEQEEEEADDEIDNQKEEDREGGEDNKRDADEETLTTKVSAGQGKETEGEEELDGYAQGDGEEQGTEEEEMVEETTKKQLRGLPADGRKEFVEACKRMDAETLVEFVICFSISSKKLLSAMHHAPDPAALVLQVVKLLVSNKNFRHNRAGQAGGEGLEEND

SEQ ID NO: 182647 - protein, 339 aa, Zea Mays
MPQIRRHLSFKWSSYSYPTRTSDTTEQAKLVAKDWKKMIDNTVCCRELDTLSRGLLQFLIAYNIVSEFNIHDIISIFAMVRKGYKNNNIAKLCEDLGLADRATGLIDYMIGNGQHPEVFHLVQNFNLEDKYPPFSLLKGYIQKAKQTFVEMFKKSQTHESLNWAIPKELWIAHYLAEQKLTDSKQRSAIMAEIKYLMSGYEKKQRKRKEEEQEHHEAQYNQQQQEQNENKLIQGKRHQLHQENMAQVTQQQQQHMQPTTRPATLKLPTPAIPLVLNAAQIQNFARPAYAAVPGVHNYPAQPGWSAAQGSPFVPQFMSPQYMGLPFNPFGLHPTCYPRRR

SEQ ID NO: 182648 - protein, 70 aa, Zea Mays
MNGKKIWSRRSSILPEFVGSTVLIYNGKSHVRCKITEGKVGHKFGEFAFTRRRRPHRTITGKGNQGKGRK

SEQ ID NO: 182649 - protein, 316 aa, Zea Mays
MAGRSTYDNPFEEGAAAAEVNPFADQAKRGGPTAQSSYSGGAFYTTQSQRPAPPSTRLSPLAPEPAGFYNDFATPVDIPMDDTNNKDRKTREKELLAKEAELNRREKEIKRREDAAARAGVVLEEKNWPPFFPIIHNDIGNEIPVHLQSTLYVAFASLLGLVVCLFWNIICVTAAWAKGSGPKIWFLAIIYFILGCPGAYYLWYRPLYRAMRNESALKFGWFFLFYLVHIAFCVYAAVSPSILFVGKSLTGIFPAISLIGDSVIVGIFYFIGFALFCLESLLSMCVIQRVYLYFRGSGKEAEMRREAARSAARAAF

SEQ ID NO: 182650 - protein, 608 aa, Zea Mays
MVSLEGCSKTTPAEIVLAVKCDMGSDFISNSFKLWGVQDYLSFTMRYVGIIHLNQEQVIAARRFQTTILSLLISNDLSEVSNYIKNLLEMPASPGAVYLLLPVVSGKIDWRSIKFSASEMPEATNMDMRHCYPCKDTGIVQTKDGTFCSCMLRNSIVCTPHNGMFYAVCGFLDLNANSLLHRSDGSFLSYKTYFKERYNLDLRCEDQALLEARKLVEVRNFLHKCNYKKEKERSGKSVVELPPELCIVVMSPMSAITLRSFTFIPSIMYRIQCMLLSMNLKMQLGPSMQQFDIPALKILEALTTKNCQEEFSQESLETLGDSFLKYITTQHFFVKYKHQHEGMLTKMKKNVISNAALCQLACSNNLVGYIRSEAFNPKTWIVPGVGYDICDRSLRKLKSKRIADSVEALIGAYLSTAGEQAAYIFLKSLGMDIEFHKMPIERVITIKAEEFINVKSLELLLDYSFNDPSLLMEALTHGSYQIAGTTPCYQRLEFLGDAVLDHIFTDYFYHQYPECTPELLTDLRSASVNNSCYAHAAVKAGLHKHVLHSSSALHKRMADYLDKFEQSFSGPSHGWEAGISLPKVMWLNLSLVQFTSTPSMTKGSFGEA

SEQ ID NO: 182651 - protein, 544 aa, Zea Mays
MNAKVYTVASESALLQYIPIATTKIVEYDDYIVTSELYSHTIRCLNKLETKHLEILKGKLHGSPLENSEKRIKKLNAMFLYCISDLGVWLAAKAAEILQSNKESCVSFWGEELDEKLEGFVRNYVRDVYSDLSEIILKMTKRGVQRHIGEDFAEDLQDGLLTSKVYFLIKSLMGYRHMQDLRCIVFVERVITSIVLEALLSTINQMSGWSVRYMASGRNCGLQHQSRNKHVEIVDSFRSGKVHLIIATQILEEGLDVPSCNLIIRFDQAATVRSFIQSRGRARMQHSDYVLLVRRGDVNALSKTQKFLKSGQIMREESQRLESTCCQPLLNTLCNEEFYGVESTGAIVTLNSSIQLINFFCSKLPSDEYFKPLPRFKIDKALGTCTLHLPMSSPVQTIYAEGKVSIIKKVVCLKACRELHAVGALTDYLLPESSVPCEDEPDIVVDKYKNGQPDYFPEQLVDNWSSFSRRGFYYCYMVSLEGCSKTTPAEIVLAVKCDMGSDFISNSFKLWGVQDYLSFTMRYVGIIHLNQEQHLLELCIYFCQ

SEQ ID NO: 182652 - protein, 496 aa, Zea Mays
MTRAAAEAAGEVVVEEDLPPSCDPQTQARWYQLEALERALAGNTLVFLETGAGKTLIAVLLLRRFAHRIRSSPPPSFAVFLVPTVVLVNQQAGVIKEHTDLRVAQFYGDMGVDFWNADTWRGRIDGAEVLVMTPQILLDNLRHSIFRLRDIPLLIFDECHRATGNSPYACILKEFYHPQLNSRPSDSIPTIFGMTASLIARNLALDKYSEEISEFENLMNAKVYTVASESALLQYIPIATTKIVEYDDYIVTSELYSHTIRCLNKLETKHLEILKGKLHGSPLENSEKRIKKLNAMFLYCISDLGVWLAAKAAEILQSNKESCVSFWGEELDEKLEGFVRNYVRDVYSDLSEIILKMTKRGVQRHIGEDFAEDLQDGLLTSKVYFLIKSLMGYRHMQDLRCIVFVERVITSIVLEALLSTINQMSGWSVRYMASGRNCGLQHQSRNKHVEIVDSFRSGKVHLIIATQILEEGLDVPSCNLIIRFDQAATGRCQCSF

SEQ ID NO: 182653 - protein, 1375 aa, Zea Mays
MTRAAAEAAGEVVVEEDLPPSCDPQTQARWYQLEALERALAGNTLVFLETGAGKTLIAVLLLRRFAHRIRSSPPPSFAVFLVPTVVLVNQQAGVIKEHTDLRVAQFYGDMGVDFWNADTWRGRIDGAEVLVMTPQILLDNLRHSIFRLRDIPLLIFDECHRATGNSPYACILKEFYHPQLNSRPSDSIPTIFGMTASLIARNLALDKYSEEISEFENLMNAKVYTVASESALLQYIPIATTKIHLEILKGKLHGSPLENSEKRIKKLNAMFLYCISDLGVWLAAKAAEILQSNKESCVSFWGEELDEKLEGFVRNYVRDVYSDLSEIILKMTKRGVQRHIGEDFAEDLQDGLLTSKVYFLIKSLMGYRHMQDLRCIVFVERVITSIVLEALLSTINQMSGWSVRYMASGRNCGLQHQSRNKHVEIVDSFRSGKVHLIIATQILEEGLDVPSCNLIIRFDQAATVRSFIQSRGRARMQHSDYVLLVRRGDVNALSKTQKFLKSGQIMREESQRLESTCCQPLLNTLCNEEFYGVESTGAIVTLNSSIQLINFFCSKLPSDEYFKPLPRFKIDKALGTCTLHLPMSSPVQTIYAEGKVSIIKKVVCLKACRELHAVGALTDYLLPESSVPCEDEPDIVVDKYKNGQPDYFPEQLVDNWSSFSRRGFYYCYMVSLEGCSKTTPAEIVLAVKCDMGSDFISNSFKLWGVQDYLSFTMRYVGIIHLNQEQVIAARRFQTTILSLLISNDLSEVSNYIKNLLEMPASPGAVYLLLPVVSGKIDWRSIKFSASEMPEATNMDMRHCYPCKDTGIVQTKDGTFCSCMLRNSIVCTPHNGMFYAVCGFLDLNANSLLHRSDGSFLSYKTYFKERYNLDLRCEDQALLEARKLVEVRNFLHKCNYKKEKERSGKSVVELPPELCIVVMSPMSAITLRSFTFIPSIMYRIQCMLLSMNLKMQLGPSMQQFDIPALKILEALTTKNCQEEFSQESLETLGDSFLKYITTQHFFVKYKHQHEGMLTKMKKNVISNAALCQLACSNNLVGYIRSEAFNPKTWIVPGVGYDICDRSLRKLKSKRIADSVEALIGAYLSTAGEQAAYIFLKSLGMDIEFHKMPIERVITIKAEEFINVKSLELLLDYSFNDPSLLMEALTHGSYQIAGTTPCYQRLEFLGDAVLDHIFTDYFYHQYPECTPELLTDLRSASVNNSCYAHAAVKAGLHKHVLHSSSALHKRMADYLDKFEQSFSGPSHGWEAGISLPKVLGDVVESIAGAIYIDAKHDKGVVWRSMKRILEPLVTPDTLQNDPVKELQEFCDSKGYTLEYTVTRDNGVSSVVAEVRTEGTTYKATRTGFSKLDAKKLAASSVLRDLKAADTKQYSANGISCT

SEQ ID NO: 182654 - protein, 1185 aa, Zea Mays
MTRAAAEAAGEVVVEEDLPPSCDPQTQARWYQLEALERALAGNTLVFLETGAGKTLIAVLLLRRFAHRIRSSPPPSFAVFLVPTVVLVNQQAGVIKEHTDLRVAQFYGDMGVDFWNADTWRGRIDGAEVLVMTPQILLDNLRHSIFRLRDIPLLIFDECHRATGNSPYACILKEFYHPQLNSRPSDSIPTIFGMTASLIARNLALDKYSEEISEFENLMNAKVYTVASESALLQYIPIATTKIVEYDDYIVTSELYSHTIRCLNKLETKHLEILKGKLHGSPLENSEKRIKKLNAMFLYCISDLGVWLAAKAAEILQSNKESCVSFWGEELDEKLEGFVRNYVRDVYSDLSEIILKMTKRGVQRHIGEDFAEDLQDGLLTSKVYFLIKSLMGYRHMQDLRCIVFVERVITSIVLEALLSTINQMSGWSVRYMASGRNCGLQHQSRNKHVEIVDSFRSGKVHLIIATQILEEGLDVPSCNLIIRFDQAATVRSFIQSRGRARMQHSDYVLLVRRGDVNALSKTQKFLKSGQIMREESQRLESTCCQPLLNTLCNEEFYGVESTGAIVTLNSSIQLINFFCSKLPSDEYFKPLPRFKIDKALGTCTLHLPMSSPVQTIYAEGKVSIIKKVVCLKACRELHAVGALTDYLLPESSVPCEDEPDIVVDKYKNGQPDYFPEQLVDNWSSFSRRGFYYCYMVSLEGCSKTTPAEIVLAVKCDMGSDFISNSFKLWGVQDYLSFTMRYVGIIHLNQEQVIAARRFQTTILSLLISNDLSEVSNYIKNLLEMPASPGAVYLLLPVVSGKIDWRSIKFSASEMPEATNMDMRHCYPCKDTGIVQTKDGTFCSCMLRNSIVCTPHNGMFYAVCGFLDLNANSLLHRSDGSFLSYKTYFKERYNLDLRCEDQALLEARKLVEVRNFLHKCNYKKEKERSGKSVVELPPELCIVVMSPMSAITLRSFTFIPSIMYRIQCMLLSMNLKMQLGPSMQQFDIPALKILEALTTKNCQEEFSQESLETLGDSFLKYITTQHFFVKYKHQHEGMLTKMKKNVISNAALCQLACSNNLVGYIRSEAFNPKTWIVPGVGYDICDRSLRKLKSKRIADSVEALIGAYLSTAGEQAAYIFLKSLGMDIEFHKMPIERVITIKAEEFINVKSLELLLDYSFNDPSLLMEALTHGSYQIAGTTPCYQI

SEQ ID NO: 182655 - protein, 870 aa, Zea Mays
MREESQRLESTCCQPLLNTLCNEEFYGVESTGAIVTLNSSIQLINFFCSKLPSDEYFKPLPRFKIDKALGTCTLHLPMSSPVQTIYAEGKVSIIKKVVCLKACRELHAVGALTDYLLPESSVPCEDEPDIVVDKYKNGQPDYFPEQLVDNWSSFSRRGFYYCYMVSLEGCSKTTPAEIVLAVKCDMGSDFISNSFKLWGVQDYLSFTMRYVGIIHLNQEQVIAARRFQTTILSLLISNDLSEVSNYIKNLLEMPASPGAVYLLLPVVSGKIDWRSIKFSASEMPEATNMDMRHCYPCKDTGIVQTKDGTFCSCMLRNSIVCTPHNGMFYAVCGFLDLNANSLLHRSDGSFLSYKTYFKERYNLDLRCEDQALLEARKLVEVRNFLHKCNYKKEKERSGKSVVELPPELCIVVMSPMSAITLRSFTFIPSIMYRIQCMLLSMNLKMQLGPSMQQFDIPALKILEALTTKNCQEEFSQESLETLGDSFLKYITTQHFFVKYKHQHEGMLTKMKKNVISNAALCQLACSNNLVGYIRSEAFNPKTWIVPGVGYDICDRSLRKLKSKRIADSVEALIGAYLSTAGEQAAYIFLKSLGMDIEFHKMPIERVITIKAEEFINVKSLELLLDYSFNDPSLLMEALTHGSYQIAGTTPCYQRLEFLGDAVLDHIFTDYFYHQYPECTPELLTDLRSASVNNSCYAHAAVKAGLHKHVLHSSSALHKRMADYLDKFEQSFSGPSHGWEAGISLPKVLGDVVESIAGAIYIDAKHDKGVVWRSMKRILEPLVTPDTLQNDPVKELQEFCDSKGYTLEYTVTRDNGVSSVVAEVRTEGTTYKATRTGFSKLDAKKLAASSVLRDLKAADTKQYSANGISCT

SEQ ID NO: 182656 - protein, 283 aa, Zea Mays
MAPVSANTLFSFSFVPSIMYRIQCLLLSAKLKIQLGPRMQQFNITAMKILEALTTKECQEKFSMESLETLGDSFIKYVTGQNLFNKYKHREDMLTSMREEKVSNPALCQLACKSEIVGYIRGELFNPQKWTIPGFGYDSRGNNKVFFRATNNMYSLKKISIKSKRIADTVEALTGAYLSTCGELAAVHFIKALGMDVELHSKMQVERTITTKSEELIDAESLQTMLKYVFYDTSLLVEALTHSSYNITGITACNEKIPQLYTSTVDKSTKSFCEQLLLCTCSC

SEQ ID NO: 182657 - protein, 446 aa, Zea Mays
MAPVSANTLFSFSFVPSIMYRIQCLLLSAKLKIQLGPRMQQFNITAMKILEALTTKECQEKFSMESLETLGDSFIKYVTGQNLFNKYKHREDMLTSMREEKGYIRGELFNPQKWTIPGFGYDSRGNNKVFFRATNNMYSLKKISIKSKRIADTVEALTGAYLSTCGELAAVHFIKALGMDVELHSKMQVERTITTKSEELIDAESLQTMLKYVFYDTSLLVEALTHSSYNITGITACNERLEFLGDAVLDYILTYYFYRKYPNCTPALLTNLRKASVNNCCYAHAAVKAGLHKHILHSSSKQMVNDLENSGRSFSGPSHGWEAGISLPEDLADLFEAIAGAIYVDSGNDKEVVWSAIRRLLEPLATPGTMEPDPVSELKELCEHKHYPKPSYSPTRDSVAGVTRVVAQVTAARTVYSGTGTGRNQDVAEVLAAKALLKKIKAAARG

SEQ ID NO: 182658 - protein, 355 aa, Zea Mays
MQQFNITAMKGYIRGELFNPQKWTIPGFGYDSRGNNKVFFRATNNMYSLKKISIKSKRIADTVEALTGAYLSTCGELAAVHFIKALGMDVELHSKMQVERTITTKSEELIDAESLQTMLKYVFYDTSLLVEALTHSSYNITGITACNERLEFLGDAVLDYILTYYFYRKYPNCTPALLTNLRKASVNNCCYAHAAVKAGLHKHILHSSSKQMVNDLENSGRSFSGPSHGWEAGISLPEDLADLFEAIAGAIYVDSGNDKEVVWSAIRRLLEPLATPGTMEPDPVSELKELCEHKHYPKPSYSPTRDSVAGVTRVVAQVTAARTVYSGTGTGRNQDVAEVLAAKALLKKIKAAARG

SEQ ID NO: 182659 - protein, 393 aa, Zea Mays
MAPVSANTLFSFSFVPSIMYRIQCLLLSAKLKIQLGPRMQQFNITAMKGYIRGELFNPQKWTIPGFGYDSRGNNKVFFRATNNMYSLKKISIKSKRIADTVEALTGAYLSTCGELAAVHFIKALGMDVELHSKMQVERTITTKSEELIDAESLQTMLKYVFYDTSLLVEALTHSSYNITGITACNERLEFLGDAVLDYILTYYFYRKYPNCTPALLTNLRKASVNNCCYAHAAVKAGLHKHILHSSSKQMVNDLENSGRSFSGPSHGWEAGISLPEDLADLFEAIAGAIYVDSGNDKEVVWSAIRRLLEPLATPGTMEPDPVSELKELCEHKHYPKPSYSPTRDSVAGVTRVVAQVTAARTVYSGTGTGRNQDVAEVLAAKALLKKIKAAARG

SEQ ID NO: 182660 - protein, 712 aa, Zea Mays
MDGPASPSAAAETDTRGGEAPSKAKRGNAEEKYQHGQPVYFPEELMDNWVSFSLRGLYYCYNISLQGSCNTTADPTDIILAVKCDMGPDFFRYSFNLGGTDITIKYLYKIHLNQEQVLFARRFQITVLSLLINSNSSEVSNAIKYFREWQVDLGVVYLLLPTASGKIDWCILQNSVVYAPRERKFYIITGLDLNANQPLDLNNRSAVSCKSKPLLVASGLFTVQNFLYKCYGKRKEPTSVKLPPELCKIVMAPVSANTLFSFSFVPSIMYRIQCLLLSAKLKIQLGPRMQQFNITAMKILEALTTKECQEKFSMESLETLGDSFIKYVTGQNLFNKYKHREDMLTSMREEKVSNPALCQLACKSEIVGYIRGELFNPQKWTIPGFGYDSRGNNKVFFRATNNMYSLKKISIKSKRIADTVEALTGAYLSTCGELAAVHFIKALGMDVELHSKMQVERTITTKSEELIDAESLQTMLKYVFYDTSLLVEALTHSSYNITGITACNERLEFLGDAVLDYILTYYFYRKYPNCTPALLTNLRKASVNNCCYAHAAVKAGLHKHILHSSSKQMVNDLENSGRSFSGPSHGWEAGISLPEDLADLFEAIAGAIYVDSGNDKEVVWSAIRRLLEPLATPGTMEPDPVSELKELCEHKHYPKPSYSPTRDSVAGVTRVVAQVTAARTVYSGTGTGRNQDVAEVLAAKALLKKIKAAARG

SEQ ID NO: 182661 - protein, 260 aa, Zea Mays
MDGPASPSAAAETDTRGGEAPSKAKRGNAEEKYQHGQPVYFPEELMDNWVSFSLRGLYYCYNISLQGSCNTTADPTDIILAVKCDMGPDFFRYSFNLGGTDITIKYLYKIHLNQEQVLFARRFQITVLSLLINSNSSEVSNAIKYFREWQVDLGVVYLLLPTASGKIDWCGIKFSTSSAYDVTDKNMRHCHSCKDADILQTMDDPCCRCILQNSVVYAPRERKFYIITGLDLNANQPLDLNNRSAVSCKSRYSFCMLWMW

SEQ ID NO: 182662 - protein, 661 aa, Zea Mays
MWRLKIGERPSNPLLRSPNGFLGREVWEFDPAAGTPEERAEVDRLRQEYTRNRFTRRQCSDLLMRMQYAKQNLHNTNLPAIKIDQDSDVTEETILITLRRALNQYSSLQGPAGHWPGDYGGISFILPLMMIGVYDWAGNNAIIPELWMLPHFLPIHPGRFWCFCRMVYMPMAYIYGKKFVGPITTTILEIRNELYNIPYNKINWNKACNSCAKEDLIYEPSWLQSIAMAYLNKFIEPLSNLWPMNKLRERAMSDLMEHIHYEDETSNYVGLCPINKALNMICCWIEKPNSNEFRQHLPRIHDFLWLGEDGMKSKVYVGCHSWETALIVQAFCSTGLTEEFCSTLQKAHQFLKNAQVIKNIPDYKSYYRERTKGSWTLSNGENFWPIADTTAEALKAILLLSNIPSELVGDPIKQERLYDAVDCLLSFVNKDGTLSSAECKRTTSWVEFINPSESFRNIIVDYPYPECTSSLIQALVLFRGKHPIYRRDEIDKIIKSGASFIEKVQRKDGSWYGSWAVCFTYATFFAIKGLVAAGRTYRNSLAIRKACNFLLSKQLGTGGWGENYLGCQIEEYVDSGSPHGVNTAQAMLALLYAGQVEQDPAPLYRAAKELINMQMENGEFPQQEIVGNFNSSLFFNYPNYRNLFPIWALGEFRRRLVAKKG

SEQ ID NO: 182663 - protein, 514 aa, Zea Mays
MDASTFSPNSSWFWCFCRMVYMPMAYIYGKKFVGPITTTILEIRNELYNIPYNKINWNKACNSCAKEDLIYEPSWLQSIAMAYLNKFIEPLSNLWPMNKLRERAMSDLMEHIHYEDETSNYVGLCPINKALNMICCWIEKPNSNEFRQHLPRIHDFLWLGEDGMKSKVYVGCHSWETALIVQAFCSTGLTEEFCSTLQKAHQFLKNAQVIKNIPDYKSYYRERTKGSWTLSNGENFWPIADTTAEALKAILLLSNIPSELVGDPIKQERLYDAVDCLLSFVNKDGTLSSAECKRTTSWVEFINPSESFRNIIVDYPYPECTSSLIQALVLFRGKHPIYRRDEIDKIIKSGASFIEKVQRKDGSWYGSWAVCFTYATFFAIKGLVAAGRTYRNSLAIRKACNFLLSKQLGTGGWGENYLGCQIEEYVDSGSPHGVNTAQAMLALLYAGQVEQDPAPLYRAAKELINMQMENGEFPQQEIVGNFNSSLFFNYPNYRNLFPIWALGEFRRRLVAKKG

SEQ ID NO: 182664 - protein, 718 aa, Zea Mays
MWRLKIGERPSNPLLRSPNGFLGREVWEFDPAAGTPEERAEVDRLRQEYTRNRFTRRQCSDLLMRMQYAKQNLHNTNLPAIKIDQDSDVTEETILITLRRALNQYSSLQGPAGHWPGDYGGISFILPLMIFALHVTRSMDEVLSIEHIREICRYIYNMQNEDGGWGTHTLGPSSMFGTCVNYATLRILGEVLDGENDALSKGRSWILSHGSATAAPQWAKIYLSMIGVYDWAGNNAIIPELWMLPHFLPIHPGRFWCFCRMVYMPMAYIYGKKFVGPITTTILEIRNELYNIPYNKINWNKACNSCAKEDLIYEPSWLQSIAMAYLNKFIEPLSNLWPMNKLRERAMSDLMEHIHYEDETSNYVGLCPINKVYVGCHSWETALIVQAFCSTGLTEEFCSTLQKAHQFLKNAQVIKNIPDYKSYYRERTKGSWTLSNGENFWPIADTTAEALKAILLLSNIPSELVGDPIKQERLYDAVDCLLSFVNKDGTLSSAECKRTTSWVEFINPSESFRNIIVDYPYPECTSSLIQALVLFRGKHPIYRRDEIDKIIKSGASFIEKVQRKDGSWYGSWAVCFTYATFFAIKGLVAAGRTYRNSLAIRKACNFLLSKQLGTGGWGENYLGCQIEEYVDSGSPHGVNTAQAMLALLYAGQVEQDPAPLYRAAKELINMQMENGEFPQQEIVGNFNSSLFFNYPNYRNLFPIWALGEFRRRLVAKKG

SEQ ID NO: 182665 - protein, 392 aa, Zea Mays
MQSFLSYGCFHIFSQFILEDLIYEPSWLQSIAMAYLNKFIEPLSNLWPMNKLRERAMSDLMEHIHYEDETSNYVGLCPINKALNMICCWIEKPNSNEFRQHLPRIHDFLWLGEDGMKSKVIKNIPDYKSYYRERTKGSWTLSNGENFWPIADTTAEALKNKDGTLSSAECKRTTSWVEFINPSESFRNIIVDYPYPECTSSLIQALVLFRGKHPIYRRDEIDKIIKSGASFIEKVQRKDGSWYGSWAVCFTYATFFAIKGLVAAGRTYRNSLAIRKACNFLLSKQLGTGGWGENYLGCQIEEYVDSGSPHGVNTAQAMLALLYAGQVEQDPAPLYRAAKELINMQMENGEFPQQEIVGNFNSSLFFNYPNYRNLFPIWALGEFRRRLVAKKG

SEQ ID NO: 182666 - protein, 551 aa, Zea Mays
MWRLKIGERPSNPLLRSPNGFLGREVWEFDPAAGTPEERAEVDRLRQEYTRNRFTRRQCSDLLMRMQYAKQNLHNTNLPAIKIDQDSDVTEETILITLRRALNQYSSLQGPAGHWPGDYGGISFILPLMIFALHVTRSMDEVLSIEHIREICRYIYNMQNEDGGWGTHTLGPSSMFGTCVNYATLRILGEVLDGENDALSKGRSWILSHGSATAAPQWAKIYLSMIGVYDWAGNNAIIPELWMLPHFLPIHPGRFWCFCRMVYMPMAYIYGKKFVGPITTTILEIRNELYNIPYNKINWNKACNSCAKEDLIYEPSWLQSIAMAYLNKFIEPLSNLWPMNKLRERAMSDLMEHIHYEDETSNYVGLCPINKALNMICCWIEKPNSNEFRQHLPRIHDFLWLGEDGMKSKVYVGCHSWETALIVQAFCSTGLTEEFCSTLQKAHQFLKNAQVIKNIPDYKSYYRERTKGSWTLSNGENFWPIADTTAEALKAILLLSNIPSELVGDPIKQERLYDAVDCLLSFVNKDGTLSSAECKRTTSWVEVRIPLHGIN

SEQ ID NO: 182667 - protein, 658 aa, Zea Mays
MWRLKIGERPSNPLLRSPNGFLGREVWEFDPAAGTPEERAEVDRLRQEYTRNRFTRRQCSDLLMRMQYAKQNLHNTNLPAIKIDQDSDVTEETILITLRRALNQYSSLQGPAGHWPGDYGGISFILPLMIFALHVTRSMDEVLSIEHIREICRYIYNMQNEDGGWGTHTLGPSSMFGTCVNYATLRILGEVLDGENDALSKGRSWILSHGSATAAPQWAKIYLSMIGVYDWAGNNAIIPELWMLPHFLPIHPGRFWCFCRMVYMPMAYIYGKKFVGPITTTILEIRNELYNIPYNKINWNKACNSCAKEDLIYEPSWLQSIAMAYLNKFIEPLSNLWPMNKLRERAMSDLMEHIHYEDETSNYVGLCPINKALNMICCWIEKPNSNEFRQHLPRIHDFLWLGEDGMKSKVYVGCHSWETALIVQAFCSTGLTEEFCSTLQKAHQFLKNAQVIKNIPDYKSYYRERTKGSWTLSNGENFWPIADTTAEALKNKDGTLSSAECKRTTSWVEFINPSESFRNIIVDYPYPECTSSLIQALVLFRGKHPIYRRDEIDKIIKSGASFIEKVQRKDGSWYGSWAVCFTYATFFAIKGLVAAGRTYRNSLAIRKACNFLLSKQLGTGGWGENYLGCQIEEYVDSGSPHGVNTAQAMLALLYAGQV

SEQ ID NO: 182668 - protein, 628 aa, Zea Mays
MIFALHVTRSMDEVLSIEHIREICRYIYNMQNEDGGWGTHTLGPSSMFGTCVNYATLRILGEVLDGENDALSKGRSWILSHGSATAAPQWAKIYLSMIGVYDWAGNNAIIPELWMLPHFLPIHPGRFWCFCRMVYMPMAYIYGKKFVGPITTTILEIRNELYNIPYNKINWNKACNSCAKEDLIYEPSWLQSIAMAYLNKFIEPLSNLWPMNKLRERAMSDLMEHIHYEDETSNYVGLCPINKALNMICCWIEKPNSNEFRQHLPRIHDFLWLGEDGMKSKVYVGCHSWETALIVQAFCSTGLTEEFCSTLQKAHQFLKNAQVIKNIPDYKSYYRERTKGSWTLSNGENFWPIADTTAEALKAILLLSNIPSELVGDPIKQERLYDAVDCLLSFVNKDGTLSSAECKRTTSWVEFINPSESFRNIIVDYPYPECTSSLIQALVLFRGKHPIYRRDEIDKIIKSGASFIEKVQRKDGSWYGSWAVCFTYATFFAIKGLVAAGRTYRNSLAIRKACNFLLSKQLGTGGWGENYLGCQIEEYVDSGSPHGVNTAQAMLALLYAGQVEQDPAPLYRAAKELINMQMENGEFPQQEIVGNFNSSLFFNYPNYRNLFPIWALGEFRRRLVAKKG

SEQ ID NO: 182669 - protein, 715 aa, Zea Mays
MWRLKIGERPSNPLLRSPNGFLGREVWEFDPAAGTPEERAEVDRLRQEYTRNRFTRRQCSDLLMRMQYAKQNLHNTNLPAIKIDQDSDVTEETILITLRRALNQYSSLQGPAGHWPGDYGGISFILPLMIFALHVTRSMDEVLSIEHIREICRYIYNMQNEDGGWGTHTLGPSSMFGTCVNYATLRILGEVLDGENDALSKGRSWILSHGSATAAPQWAKIYLSMIGVYDWAGNNAIIPELWMLPHFLPIHPGRFWCFCRMVYMPMAYIYGKKFVGPITTTILEIRNELYNIPYNKINWNKACNSCAKEDLIYEPSWLQSIAMAYLNKFIEPLSNLWPMNKLRERAMSDLMEHIHYEDETSNYVGLCPINKALNMICCWIEKPNSNEFRQHLPRIHDFLWLGEDGMKSKVIKNIPDYKSYYRERTKGSWTLSNGENFWPIADTTAEALKAILLLSNIPSELVGDPIKQERLYDAVDCLLSFVNKDGTLSSAECKRTTSWVEFINPSESFRNIIVDYPYPECTSSLIQALVLFRGKHPIYRRDEIDKIIKSGASFIEKVQRKDGSWYGSWAVCFTYATFFAIKGLVAAGRTYRNSLAIRKACNFLLSKQLGTGGWGENYLGCQIEEYVDSGSPHGVNTAQAMLALLYAGQVEQDPAPLYRAAKELINMQMENGEFPQQEIVGNFNSSLFFNYPNYRNLFPIWALGEFRRRLVAKKG

SEQ ID NO: 182670 - protein, 404 aa, Zea Mays
MLGMGSAVETLCGQAYGAHKYDMLGIYLQRSTVLLMATGVPLAALYAFSRPVLVLLGESPEIASAAAVFVYGLVPQIFAYAANFPIQKFMQAQSIMGPSAYISAAALAAHLALSYLVVYRLGLGLLGASLTLSASWWAIVAAQFAYIVTSSRCRLTWRGFSWQAFSGLPSFFRLSLASAVMLCLETWYFQILVLIAGLLKDPELALASLSVCMTISGWVFMISVGFNAAASVRVSNELGAGNPRAAAFSVVVVTLLSFVLSVLVSAVILLCRDYISYIFTEGEDVSQAVSRLTPLLAFTLILNGIQLQPVLSGVAVGCGWQAFVAYVNVGCYYIVGIPLGCLLGFYFDLGAAGIWSGMIGGTLMQTLILIWVTFRTNWNKEVEEAQKRLNKWDDGKAPLLSAQE

SEQ ID NO: 182671 - protein, 491 aa, Zea Mays
MGSAGGGGESKLESPLLGASSTGHGEAVVSGQLESILGDASVPWGTRMASASAVEMRLLIFSGHLGTLELAAASLGNTGIQVFAYGLMLGMGSAVETLCGQAYGAHKYDMLGIYLQRSTVLLMATGVPLAALYAFSRPVLVLLGESPEIASAAAVFVYGLVPQIFAYAANFPIQKFMQAQSIMGPSAYISAAALAAHLALSYLVVYRLGLGLLGASLTLSASWWAIVAAQFAYIVTSSRCRLTWRGFSWQAFSGLPSFFRLSLASAVMLCLETWYFQILVLIAGLLKDPELALASLSVCMTISGWVFMISVGFNAAASVRVSNELGAGNPRAAAFSVVVVTLLSFVLSVLVSAVILLCRDYISYIFTEGEDVSQAVSRLTPLLAFTLILNGIQLQPVLSGVAVGCGWQAFVAYVNVGCYYIVGIPLGCLLGFYFDLGAAGIWSGMIGGTLMQTLILIWVTFRTNWNKEVEEAQKRLNKWDDGKAPLLSAQE

SEQ ID NO: 182672 - protein, 216 aa, Zea Mays
MEQLVGVHHHHHSLSPRAPRTPTRPQPQPQPHPLLHHLPSNRFRDLHSQIHNHIHPAVPAASRVLRATPPFFLILLAAVYLLASVTIFSAPTPLLRLRLASPRPLILPKPAPPPPPPAPELFDLDGGSVRVRLTNVGAAVTSFLVPDKNGVLADVVLGFDSLDPYLFVNCDLRVSQRSRIALVLTVGVSLIRMEPHLTLAALLVELQIESRMESSL

SEQ ID NO: 182673 - protein, 801 aa, Zea Mays
MERMHCTPSAGWRSMLPLVLATLTSVLLAGPAADHGALGSPPPDPVQCSSGGGTADCTVSSAYGVFPDRSTCRASAAVYPASEDELVRAVAGAAAAGTKMKVATRYSHSIPPLACPGSGRGEGLVISTRRLDRVVSVDPAAGRVTVESGVTLRDLVEEAAKAGLALPYEPYWWGLTVGGMLGTGAHGSSLWGNGSAVHEYVVGMRIVTPAAAAEGYAKVRVLTAADPDLDAAKVSLGVLGVISQVTLALQPLFKRSVTFSERDDDDLAEQVGTFGYRHEFADIAWFPGHGRAVYRIDDRLPLSAPDDGAMDFIGFRATPTLAIQATRLAEDLFERADNGSGKCLTSRVTHATLSAAGYGLQWRSGGLFAGYPVVGPQHRMQASGGLPVRRAVLFVAEVRRLRDLEPRALCGVELYDGILIRYVKASTAHLGKPAPRGEPSGDMVDFDITYYRSRDSGRPRLFEDVLEEVEQMGIFKYGGLPHWGKNRNLAFVGAARKYSGLPRFLRVKDAYDPDGLFSSDWSNMMLGIGGRSPTTDAPGCALEGMCVCSRDEHCAPEQGYVCRPGKVYKEARVCTRATQSPEPGGFPQRYPAPPLAAPAKARAQFINVGTAGPTAGATGTLLRRYPRLPEPSCSSLCSRKRRVYPSPPLRPPPPPPPARRPPLLWMLRVATGILDGRQPCGGRVVPLLLLARRHGYPPRPPHKNIARLLKAKRFRKPDISETIQELLGGKVGRGQLSGGLVVDVGANVGMASFVAAVMGFRVLAFDDSSPCSRICSGYSTGCTSTGCSTALWCITLRGCSF

SEQ ID NO: 182674 - protein, 57 aa, Zea Mays
MFDLEKLVKLGELYDQNFTVVDRVMLTEQLKTYIVHVRRRAAFSTCEDIASLSMKMV

SEQ ID NO: 182675 - protein, 117 aa, Zea Mays
MRRKHAKSIKSKFNDLMSTHPPLNEAYSDVCVFRMSSANDASACPIRLWHRNLILDSIEGLQCRHRHSWKSSTDGHRAPRWAVLSTAARTACVGAILTPAPTSAPATQHADDTSSSL

SEQ ID NO: 182676 - protein, 103 aa, Zea Mays
MASPPSIHGRSAPLRPKSRGWKAEEKAVSCGGGGASEIPELAVIRELHLRTIDELGLDKSIVSVFPLDVRNTFTPHRNLRLHSRPLLLPPLPRDPSPQHAGVA

SEQ ID NO: 182677 - protein, 196 aa, Zea Mays
MASPPSIHGRSAPLRPKSRGWKGSRGSLSLDAPVAASKLRRERRPAPASVNPGPQCLRRRRGLAVRCQTGSTAAPFLRTEEPPAAAAGARNAQAGFTFVMKFGGSSLASAERMREAEEKAVSCGGGGASEIPELAVIRELHLRTIDELGLDKSIVSVFPLDVRNTFTPHRNLRLHSRPLLLPPLPRDPSPQHAGVA

SEQ ID NO: 182678 - protein, 84 aa, Zea Mays
MASPPSIHGRSAPLRPKSRGWKAEEKAVSCGGGGASEIPELAVIRELHLRTIDELGLDKSIVSGMLLFAPLCSWNASVVPLALS

SEQ ID NO: 182679 - protein, 138 aa, Zea Mays
MLLQQCNANQLKELCNSSVSSSVLIPHLNNLVQQTMFQQDLIMNLLSNLQQSEKVDGTQPIISSQVRTMENDKVADTVNSVKERSLLVKISELQSRMIILTDELIAAKLKHVQLQQELNALYCREEIVDIRDEDNEET

SEQ ID NO: 182680 - protein, 103 aa, Zea Mays
MFQQDLIMNLLSNLQQSEKVDGTQPIISSQVRTMENDKVADTVNSVKERSLLVKISELQSRMIILTDELIAAKLKHVQLQQELNALYCREEIVDIRDEDNEET

SEQ ID NO: 182681 - protein, 496 aa, Zea Mays
MKVLLMTLQNAPPGLDYERDRRFSKSFKEMVAMCLVKDQTKRPTAEKLLKHSFFKNAKPPELTIKNILSGLPPLWDRVKALQLKDAAQLALKKMPSSEQEALSLSEYQRGVSAWNFDIEDLKAQASLIHDDEPPEIKEDDDIPRNIEDLSSRNHLAKSSANECNSSQRAFATTLNSDGNSPTMNEAFDFDISDADTTRRADGYESNTRQNDSLPSTSKRDPESNHWASDGQRQLTSGGNNSSTSERGYGFERDASVQMISDKQRSEMRKTASLSGPLSLPTRASANSLSAPIRSSGGYVDSSGDKSKRSVVEIKGRFSVTSENVDLAKVQEGPLSSLSRKSPEGSLLRKSASTGDYFVNPKLMCNANQLKELCNSSVSSSVLIPHLNNLVQQTMFQQDLIMNLLSNLQQSEKVDGTQPIISSQVRTMENDKVADTVNSVKERSLLVKISELQSRMIILTDELIAAKLKHVQLQQELNALYCREEIVDIRDEDNEET

SEQ ID NO: 182682 - protein, 761 aa, Zea Mays
MGRNGSVKRSASSSAAGAAAGPPSFSVNPADYRLMEEVGYGAHAVVYRAIFLPTEDVVAVKCLDLDQLNNNIDEIQREAQIMSLIDHPNVIRAYCSFVVEHSLWVIMPFMTEGSCLHLMKISYQEGFDEPVIGSILKETLKALEYLHRQGQIHRDVKAGNILIDGAGVVKLGDFGVSACMFDRGDRQRSRNTFVGTPCWMAPEVLQPGTGYNFKADIWSFGITALELAHGHAPFSKYPPMKVLLMTLQNAPPGLDYERDRRFSKSFKEMVAMCLVKDQTKRPTAEKLLKHSFFKNAKPPELTIKNILSGLPPLWDRVKALQLKDAAQLALKKMPSSEQEALSLSEYQRGVSAWNFDIEDLKAQASLIHDDEPPEIKEDDDIPRNIEDLSSRNHLAKSSANECNSSQRAFATTLNSDGNSPTMNEAFDFDISDADTTRRADGYESNTRQNDSLPSTSKRDPESNHWASDGQRQLTSGGNNSSTSERGYGFERQKLWAWLMDCQYLVMLSAYYCSGYDRDASVQMISDKQRSEMRKTASLSGPLSLPTRASANSLSAPIRSSGGYVDSSGDKSKRSVVEIKGRFSVTSENVDLAKVQEGPLSSLSRKSPEGSLLRKSASTGDYFVNPKLMCNANQLKELCNSSVSSSVLIPHLNNLVQQTMFQQDLIMNLLSNLQQSEKVDGTQPIISSQVRTMENDKVADTVNSVKERSLLVKISELQSRMIILTDELIAAKLKHVQLQQELNALYCREEIVDIRDEDNEET

SEQ ID NO: 182683 - protein, 709 aa, Zea Mays
MGRNGSVKRSASSSAAGAAAGPPSFSVNPADYRLMEEVGYGAHAVVYRAIFLPTEDVVAVKCLDLDQLNNNIDEIQREAQIMSLIDHPNVIRAYCSFVVEHSLWVIMPFMTEGSCLHLMKISYQEGFDEPVIGSILKETLKALEYLHRQGQIHRDVKAGNILIDGAGVVKLGDFGVSACMFDRGDRQRSRNTFVGTPCWMAPEVLQPGTGYNFKADIWSFGITALELAHGHAPFSKYPPMKVLLMTLQNAPPGLDYERDRRFSKSFKEMVAMCLVKDQTKRPTAEKLLKHSFFKNAKPPELTIKNILSGLPPLWDRVKALQLKDAAQLALKKMPSSEQEALSLSEYQRGVSAWNFDIEDLKAQASLIHDDEPPEIKEDDDIPRNIEDLSSRNHLAKSSANECNSSDADTTRRADGYESNTRQNDSLPSTSKRDPESNHWASDGQRQLTSGGNNSSTSERGYGFERDASVQMISDKQRSEMRKTASLSGPLSLPTRASANSLSAPIRSSGGYVDSSGDKSKRSVVEIKGRFSVTSENVDLAKVQEGPLSSLSRKSPEGSLLRKSASTGDYFVNPKLMCNANQLKELCNSSVSSSVLIPHLNNLVQQTMFQQDLIMNLLSNLQQSEKVDGTQPIISSQVRTMENDKVADTVNSVKERSLLVKISELQSRMIILTDELIAAKLKHVQLQQELNALYCREEIVDIRDEDNEET

SEQ ID NO: 182684 - protein, 715 aa, Zea Mays
MGRNGSVKRSASSSAAGAAAGPPSFSVNPADYRLMEEVGYGAHAVVYRAIFLPTEDVVAVKCLDLDQLNNNIDEIQREAQIMSLIDHPNVIRAYCSFVVEHSLWVIMPFMTEGSCLHLMKISYQEGFDEPVIGSILKETLKALEYLHRQGQIHRDVKAGNILIDGAGVVKLGDFGVSACMFDRGDRQRSRNTFVGTPCWMAPEVLQPGTGYNFKADIWSFGITALELAHGHAPFSKYPPMKVLLMTLQNAPPGLDYERDRRFSKSFKEMVAMCLVKDQTKRPTAEKLLKHSFFKNAKPPELTIKNILSGLPPLWDRVKALQLKDAAQLALKKMPSSEQEALSLSEYQRGVSAWNFDIEDLKAQASLIHDDEPPEIKEDDDIPRNIEDLSSRNHLAKSSANECNSSQRAFATTLNSDGNSPTMNEAFDFDISDADTTRRADGYESNTRQNDSLPSTSKRDPESNHWASDGQRQLTSGGNNSSTSERGYGFERQKLWAWLMDCQYLVMLSAYYCSGYDRDASVQMISDKQRSEMRKTASLSGPLSLPTRASANSLSAPIRSSGGYVDSSGDKSKRSVVEIKGRFSVTSENVDLAKVQEGPLSSLSRKSPEGSLLRKSASTGDYFVNPKLMAVAGSREAHISPFSWLGRRKLGVINGDWGMLKLKEAERHDLNIKRKKDLLEDQIQDVMKAAHKSQATTSGPTHNPEIHQQTPKKPKA

SEQ ID NO: 182685 - protein, 611 aa, Zea Mays
MGRNGSVKRSASSSAAGAAAGPPSFSVNPADYRLMEEVGYGAHAVVYRAIFLPTEDVVAVKCLDLDQLNNNIDEIQREAQIMSLIDHPNVIRAYCSFVVEHSLWVIMPFMTEGSCLHLMKISYQEGFDEPVIGSILKETLKALEYLHRQGQIHRDVKAGNILIDGAGVVKLGDFGVSACMFDRGDRQRSRNTFVGTPCWMAPEVLQPGTGYNFKADIWSFGITALELAHGHAPFSKYPPMKVLLMTLQNAPPGLDYERDRRFSKSFKEMVAMCLVKDQTKRPTAEKLLKHSFFKNAKPPELTIKNILSGLPPLWDRVKALQLKDAAQLALKKMPSSEQEALSLSEYQRGVSAWNFDIEDLKAQASLIHDDEPPEIKEDDDIPRNIEDLSSRNHLAKSSANECNSSQRAFATTLNSDGNSPTMNEAFDFDISDADTTRRADGYESNTRQNDSLPSTSKRDPESNHWASDGQRQLTSGGNNSSTSERGYGFERDASVQMISDKQRSEMRKTASLSGPLSLPTRASANSLSAPIRSSGGYVDSSGDKSKRSVVEIKGRFSVTSENVDLAKVQEGPLSSLSRKSPEGSLLRKSASTGDYFVNPKLMDPRTGHVIL

SEQ ID NO: 182686 - protein, 611 aa, Zea Mays
MGRNGSVKRSASSSAAGAAAGPPSFSVNPADYRLMEEVGYGAHAVVYRAIFLPTEDVVAVKCLDLDQLNNNIDEIQREAQIMSLIDHPNVIRAYCSFVVEHSLWVIMPFMTEGSCLHLMKISYQEGFDEPVIGSILKETLKALEYLHRQGQIHRDVKAGNILIDGAGVVKLGDFGVSACMFDRGDRQRSRNTFVGTPCWMAPEVLQPGTGYNFKADIWSFGITALELAHGHAPFSKYPPMKVLLMTLQNAPPGLDYERDRRFSKSFKEMVAMCLVKDQTKRPTAEKLLKHSFFKNAKPPELTIKNILSGLPPLWDRVKALQLKDAAQLALKKMPSSEQEALSLSEYQRGVSAWNFDIEDLKAQASLIHDDEPPEIKEDDDIPRNIEDLSSRNHLAKSSANECNSSQRAFATTLNSDGNSPTMNEAFDFDISDADTTRRADGYESNTRQNDSLPSTSKRDPESNHWASDGQRQLTSGGNNSSTSERGYGFERDASVQMISDKQRSEMRKTASLSGPLSLPTRASANSLSAPIRSSGGYVDSSGDKSKRSVVEIKGRFSVTSENVDLAKVQEGPLSSLSRKSPEGSLLRKSASTGDYFVNPKLMCMQPATCAW

SEQ ID NO: 182687 - protein, 515 aa, Zea Mays
MGRNGSVKRSASSSAAGAAAGPPSFSVNPADYRLMEEVGYGAHAVVYRAIFLPTEDVVAVKCLDLDQLNNNIDEIQREAQIMSLIDHPNVIRAYCSFVVEHSLWVIMPFMTEGSCLHLMKISYQEGFDEPVIGSILKETLKALEYLHRQGQIHRDVKAGNILIDGAGVVKLGDFGVSACMFDRGDRQRSRNTFVGTPCWMAPEVLQPGTGYNFKADIWSFGITALELAHGHAPFSKYPPMKVLLMTLQNAPPGLDYERDRRFSKSFKEMVAMCLVKDQTKRPTAEKLLKHSFFKNAKPPELTIKNILSGLPPLWDRVKALQLKDAAQLALKKMPSSEQEALSLSEYQRGVSAWNFDIEDLKAQASLIHDDEPPEIKEDDDIPRNIEDLSSRNHLAKSSANECNSSDADTTRRADGYESNTRQNDSLPSTSKRDPESNHWASDGQRQLTSGGNNSSTSERGYGFERDASVQMISDKQRSEMRKTASLSGPLSLPTRASANSLSAPIRSSGGSLALL

SEQ ID NO: 182688 - protein, 459 aa, Zea Mays
MEEPTESRPAGAEDLANGAKDPEGPPPEVEEEEVEEPPRSATAKQEEAKEVLGSEGSRPFTMRELLGELREDGETAVGGSTARSAFGDGNGVGSADAEGSSYSQDSAQFSSHHDVAMDLINSVTGVDEEGRSRQRILSFAAKRYVNAIESNPDDPDAYYNWALVLQESADNVDPNSSSSKDALLEEACKKYAEATRLSPTLYDAYYNWAIAIADRAKMRGRTKEAEELWKQAILNYEKAVQLNWNSPQALNNWGLGLQELSAIVPARDKQTIIKTAISKFRAAIQLQFDFHRAIYNLGTVLYGLAEDTMRSGKPDVSPNELYSQSAIYVAAAHALKPNYSVYRSALRLVRSMLPLPYLKVGYLTAPPANNSIAPHGDWEVSQFILNHEGLQQADASDQPPSQSPGHLDRGRKPVRINVADIVSVSACADLTLPSGAGLCIETIHGPTFLGVENSAIARN

SEQ ID NO: 182689 - protein, 177 aa, Zea Mays
MRSGKPDVSPNELYSQSAIYVAAAHALKPNYSVYRSALRLVRSMLPLPYLKVGYLTAPPANNSIAPHGDWEVSQFILNHEGLQQADASDQPPSQSPGHLDRGRKPVRINVADIVSVSACADLTLPSGAGLCIETIHGPTFLVAHSWEALDGWLDAIRLVYTIFARGKSDVLAGIITG

SEQ ID NO: 182690 - protein, 502 aa, Zea Mays
MEEPTESRPAGAEDLANGAKDPEGPPPEVEEEEVEEPPRSATAKQEEAKEVLGSEGSRPFTMRELLGELREDGETAVGGSTARSAFGDGNGVGSADAEGSSYSQDSAQFSSHHDVAMDLINSVTGVDEEGRSRQRILSFAAKRYVNAIESNPDDPDAYYNWALVLQESADNVDPNSSSSKDALLEEACKKYAEATRLSPTLYDAYYNWAIAIADRAKMRGRTKEAEELWKQAILNYEKAVQLNWNSPQALNNWGLGLQELSAIVPARDKQTIIKTAISKFRAAIQLQFDFHRAIYNLGTVLFKFHDNDTRAFSFIMLQYGLAEDTMRSGKPDVSPNELYSQSAIYVAAAHALKPNYSVYRSALRLVRSMLPLPYLKVGYLTAPPANNSIAPHGDWEVSQFILNHEGLQQADASDQPPSQSPGHLDRGRKPVRINVADIVSVSACADLTLPSGAGLCIETIHGPTFLVAHSWEALDGWLDAIRLVYTIFARGKSDVLAGIITG

SEQ ID NO: 182691 - protein, 58 aa, Zea Mays
MFKSCGNTTRSRIEVDFKVNLGPNILLPKIARPLSISYTEKNRTFVTNKWKESYYFLF

SEQ ID NO: 182692 - protein, 412 aa, Zea Mays
MEESKQSTKTVKVNHEGSNSSEKGDESGCVSPFESEDVLENSGMGEATTEEGIPCLSTEQEVQDDTSETKPEQMNGNQSSSSSSDEEGSERSVVTQVEASHKNLASVCESSFEDGQESIPRYSNTGGNMDDVVLSKAARPVKSARATEDFETWQRIIRLDAVRANDEWISYSPSQAAVSKERAIESAKAVFLKDYDHLEPYRIHHASRLVAILEAYAIYDQEIGYCQGMSDLLAPLLAVLEDDDEAFWCFAGFMRKARHNFRLDEVGIRRQLNMVARIIKYKDFHLYRHLEMLQAEDCFFVYRMVVVMFRRELTFEQTLCLWEVMWADQAANRAEIANSSWRKLQLGAPPTDDLLLYAIAASVLQKRKLIIESYNSMDEIIRECNSMAGQLDIWKLLDDAHDLVVTLHDRIE

SEQ ID NO: 182693 - protein, 556 aa, Zea Mays
MWAWGCVERVAAGFLGGPLAAGGRWNTAVAVGVTAAAGLVLVAIVVSSRRGGLKSPWWRRRRKAPLTAQEWCDLFTPQGKLQDGGVKLLKKVRSGGIEPSIRAQVWPFLLGVDSSEAQRDVVKAQNRKGYLLLRKHCLRKLAYIMEESKQSTKTVKVNHEGSNSSEKGDESGCVSPFESEDVLENSGMGEATTEEGIPCLSTEQEVQDDTSETKPEQMNGNQSSSSSSDEEGSERSVVTQVEASHKNLASVCESSFEDGQESIPRYSNTGGNMDDVVLSKAARPVKSARATEDFETWQRIIRLDAVRANDEWISYSPSQAAVSKERAIESAKAVFLKDYDHLEPYRIHHASRLVAILEAYAIYDQEIGYCQGMSDLLAPLLAVLEDDDEAFWCFAGFMRKARHNFRLDEVGIRRQLNMVARIIKYKDFHLYRHLEMLQAEDCFFVYRMVVVMFRRELTFEQTLCLWEVMWADQAANRAEIANSSWRKLQLGAPPTDDLLLYAIAASVLQKRKLIIESYNSMDEIIRECNSMAGQLDIWKLLDDAHDLVVTLHDRIE

SEQ ID NO: 182694 - protein, 601 aa, Zea Mays
MRHLTAKRKSNREAGIFRSRAPPAAGVVAQEGSRGAIRRASAPDVGVGLRRARGRGLPRRPPRRRRPLEHRRRRRGHGRRGPRARRHRRLFPGGLKSPWWRRRRKAPLTAQEWCDLFTPQGKLQDGGVKLLKKVRSGGIEPSIRAQVWPFLLGVYSLDSSEAQRDVVKAQNRKGYLLLRKHCLRKLAYIMEESKQSTKTVKVNHEGSNSSEKGDESGCVSPFESEDVLENSGMGEATTEEGIPCLSTEQEVQDDTSETKPEQMNGNQSSSSSSDEEGSERSVVTQVEASHKNLASVCESSFEDGQESIPRYSNTGGNMDDVVLSKAARPVKSARATEDFETWQRIIRLDAVRANDEWISYSPSQAAVSKERAIESAKAVFLKDYDHLEPYRIHHASRLVAILEAYAIYDQEIGYCQGMSDLLAPLLAVLEDDDEAFWCFAGFMRKARHNFRLDEVGIRRQLNMVARIIKYKDFHLYRHLEMLQAEDCFFVYRMVVVMFRRELTFEQTLCLWEVMWADQAANRAEIANSSWRKLQLGAPPTDDLLLYAIAASVLQKRKLIIESYNSMDEIIRECNSMAGQLDIWKLLDDAHDLVVTLHDRIE

SEQ ID NO: 182695 - protein, 600 aa, Zea Mays
MRHLTAKRKSNREAGIFRSRAPPAAGVVAQEGSRGAIRRASAPDVGVGLRRARGRGLPRRPPRRRRPLEHRRRRRGHGRRGPRARRHRRLFPQGGLKSPWWRRRRKAPLTAQEWCDLFTPQGKLQDGGVKLLKKVRSGGIEPSIRAQVWPFLLGVLDSSEAQRDVVKAQNRKGYLLLRKHCLRKLAYIMEESKQSTKTVKVNHEGSNSSEKGDESGCVSPFESEDVLENSGMGEATTEEGIPCLSTEQEVQDDTSETKPEQMNGNQSSSSSSDEEGSERSVVTQVEASHKNLASVCESSFEDGQESIPRYSNTGGNMDDVVLSKAARPVKSARATEDFETWQRIIRLDAVRANDEWISYSPSQAAVSKERAIESAKAVFLKDYDHLEPYRIHHASRLVAILEAYAIYDQEIGYCQGMSDLLAPLLAVLEDDDEAFWCFAGFMRKARHNFRLDEVGIRRQLNMVARIIKYKDFHLYRHLEMLQAEDCFFVYRMVVVMFRRELTFEQTLCLWEVMWADQAANRAEIANSSWRKLQLGAPPTDDLLLYAIAASVLQKRKLIIESYNSMDEIIRECNSMAGQLDIWKLLDDAHDLVVTLHDRIE

SEQ ID NO: 182696 - protein, 169 aa, Zea Mays
MLADKLIALDMGALIAGAKYHGEFEDRPKAVLKEVTYSDGQTILFIDEIHKLQMPWLQKAKLLLRELKTVKADLSFAKERYAQLEEENKMLRESYDMGDNPEANDQVMFLKFEPRQCMLILASRFLTATFRPLAVRLRAPLLPKVHTNVTKGITLCALSGLESSIILQT

SEQ ID NO: 182697 - protein, 308 aa, Zea Mays
MARQIATANGPTGYNRDYLFSMEKALAIISHEDDSILELANEVRKVLNRTKETKITERLCSPEYKSLRVYCSWRCRVRELFYYLKGEQVDYGEEHSKACGHNRFGRIYHTGHYPVCYEHNPVHFVGHSVGTQVVRVLHQMLADKLIALDMGALIAGAKYHGEFEDRPKAVLKEVTYSDGQTILFIDEIHKLQMPWLQKAKLLLRELKTVKADLSFAKERYAQLEEENKMLRESYDMGDNPEANDQVMFLKFEPRQCMLILASRFLTATFRPLAVRLRAPLLPKVHTNVTKGITLCALSGLESSIILQT

SEQ ID NO: 182698 - protein, 414 aa, Zea Mays
MVLWVFGYGSLIWNPGFDFDDKILGFIKGYNRTFNLACIDHRGTPEHPARTCTLETDDEAICHLCMPPFIYTVTQCYMGKLTFFAVGNCILCQGWSRKRAKSNYLERRECEYDQKISIDFYKEGDPLKPAVTGVLVFISTPDPIGNKYYLGPAPLQDMARQIATANGPTGYNRDYLFSMEKALAIISHEDDSILELANEVRKVLNRTKETKITERLCSPEYKSLRVYCSWRCRVRELFYYLKGEQVDYGEEHSKACGHNRFGRIYHTGHYPVCYEHNPVHFVGHSVGTQVVRVLHQMLADKLIALDMGALIAGAKYHGEFEDRPKAVLKEVTYSDGQTILFIDEIHKLQMPWLQKAKLLLRELKTVKADLSFAKERYAQLEEENKMLRESYDMGDNPEANDQLKMIHMMGRESV

SEQ ID NO: 182699 - protein, 103 aa, Zea Mays
MVLWVFGYGSLIWNPGFDFDDKILGFIKGYNRTFNLACIDHRGTPEHPARTCTLETDDEAICWGIAYCVKGGPEKELKAITWREESVSTTRRYPLISTRKEIP

SEQ ID NO: 182700 - protein, 221 aa, Zea Mays
MMVSVMSLLKTELTSFMVLYNRDNVESIGLDEAAKCLGVERRRIYDIVNVLEGVGHVAPPLRICLYDNCHPRIPNRRCPPLTRFLTSLTEDFSKGYNKWWSRNPNGVPLESLGYKQAGIPHLKWFGVEGQYNVMVIDLLGPSLKGLFNYCSRKFSLKTVLMLADQMCLSNQEQIVELLEREKLEKKLQDPAAEPICLPVEFLKAITCNFSTERELGRVSTE

SEQ ID NO: 182701 - protein, 80 aa, Zea Mays
MVLWVFGYGSLIWNPGFDFDDKILGFIKGYNRTFNLACIDHRGTPEHPARTCTLETDDEAICWGIAYCVKGGPEKELKAM

SEQ ID NO: 182702 - protein, 151 aa, Zea Mays
MMFLFSTLGIAGIPHLKWFGVEGQYNVMVIDLLGPSLKGLFNYCSRKFSLKTVLMLADQMISVVCYLARWSPARMPPPINSSPSVSPSMTTILSLVSSRTYKIVDYVEADTAHLSAPGLGVEFGSTHDHACYVCGALFQVLEQSGTDSGVT

SEQ ID NO: 182703 - protein, 181 aa, Zea Mays
MYEKGLVSAVGVSNYGPKQLLKIHSYLASRGVPLSSAQVQFSLLSMGDDQMELKSVCDSLGIRIIAYSPLGLGMLTGKYGASNLPKGPRSVLFRQILPGLEPLLSCLRRIAEKKGKTMPQVAINWCMCKGTVPIPGVKTVRHVQENLGALGWRLSSAEISELESAAMAAPRKMIQNVFQTA

SEQ ID NO: 182704 - protein, 135 aa, Zea Mays
MVWSTVLPLLDLYYYSTVLFCLFVCLLACCEIEEQRKIGVMMACLLTPPFSVHLCASGRHAAAYGFADICCLFLSSRIVFAWCAGPAASKFLESLGRDPLFIGVYFLHIMLTPMEVDVNNGSSCMHVFLEPTIIT

SEQ ID NO: 182705 - protein, 144 aa, Zea Mays
MRAKAESPTNHHRRYTSIEGGDQTLPGGAVLLLIHSLRFAPLLIHPRCASYRLPLAPISKSLPSRRVPGDSRSHTAPPRPPPTRAAPLFINSRRATPPRQLSPTSLPLRRALSWPTRRSKRPSTRMMGRVEKVLASSLEPSFEC

SEQ ID NO: 182706 - protein, 155 aa, Zea Mays
MMGQGGSELLGSYSSVPSAASSNYSAGLGLRSHVSACDSVSEVRARAFWLNPGVWSSGTSHKLLLDLLFHLAILNGSASYVTRKLEENKATKERIFYLSWFSLKNKLVDDKYLCSICLDGLQQHGWDHTCLSGPSLLPWLTGMECLNALDLIVSG

SEQ ID NO: 182707 - protein, 1456 aa, Zea Mays
MCYTCTYSVCKGCIKQGKFFGVRGNKGFCDTCYGTILLIESKEDGAKVGVDFDDIYSWEYLFKLYWLDLKGKHLLTIEELKSAKSHWIVPTTAGRREKEESSDELYDASNGQDATFDISSKKRIQNNSSGKRGQKRKKDGNITSRKCGISINSAGGLPNGSTGEGMALAGDKNWASSELLEFIGHMRNGDNSYISQFDVQVLLLEYIKQNNLHDPRRKSQIICDARLSNLFKKPRVDHFEMLKLLEMHYLVKQASTPNADSQRAIYSDSAQVNNGGHNELADTLGFDRRKAHKKIERELTINPEDYAAIDMHNINLIYLRRSVMEDLIDQVAAFSNKIAGAFVRIRISGLGNKEDMYRLVKVLGTHKVAERYTVSKKTTDYALEISNLEKKEIITMDTISNQDFTEEECKRLRQSMKFGLTARLKVVDVYEKAKIFQSLRFKDLLNTPEEKERMINEVPEVHVDSRMDPSYESAEEPEYKKAVDWTMHRNGPDLLFPGRKGTELNSVENHTQKSLDTSSLPTEDVDHRSGAGSNINLNNMAPEPASLGILSNDTEPEKVWHYKDPNGNVQGPFTLLQLSKWASFFPRDLRVWLTFESEENSLLLTEVLPKQQKDFIQLSTVTTSDKSMWAGSGQDRVNSNANNSSSPMGYNMVYPSALSSPSAECYDPTKDLKPLGGTSPSRSLKDAHALHEVQNQVNYSFTILSSTGSYAPPGSHDGRVSRDRVDEWNSSQDNGGIWRPTMNSSQKTNAQQHPDGCTGKDLMQTESKCSSHLVSVLTSQHSERDPATSLSTTSWPVFRTRCQQEGSSWTSATNAGAHDLQLSIALAKPETCSPTNPVEDRDSSSASALSCQSGAPVCVPQPDPTSTSNSRKIDATMDQHRTCQPDTSSVSFDLLHEPKSGSLFSLKTQDLEFEYPSPIPKQEGKGISVNQSGSTSVAHENLATKTCVRAPTSKIDSLQPLKERSHSTDRDSITQLEHLFEENVIKRNNKVVNPVSDAEGIAVSDVLESLTEQDCEKCSIHGVAPSQKMVPASAEEDQPQCSSPIALSPWGEPSYYQGEAVDSALWGVQDDPGNDMWSMPSPKPGFQPSSGLGADGKDASCIIEEARADPGDGAFVKTLPTQGEKKMEHGNSSASGSGVSERVKPKGSAASGPSLDGSTKVMGWQLPGSSLEGSAKVSGWKPPVLSLEGIANGSGSQASCPSTQRGTKSSGWQRSSSSPDGSRKASGWQQSSTSPEGSGKAHGWQRSGSFTQGGTKAAGRQPSRSCTDRIAKVDGWQRTSSSPEGSRKASGWHSSGRDSSKIASSASENRKLSSSHQATTPTGRHSLAKRQGSSDKGAAGWDEALGNSSEASKRQQGNSDKNAGSGVALGSNRSWHPSSGNPSRGGQGNHQHDRDSHSGDSRRGSSNYPRRSDNRHDHGSGGSSRPSSRGQSQRGLCKHYESGHCGKGSKCQYLHR

SEQ ID NO: 182708 - protein, 1458 aa, Zea Mays
MCYTCTYSVCKGCIKQGKFFGVRGNKGFCDTCYGTILLIESKEDGAKVGVDFDDIYSWEYLFKLYWLDLKGKHLLTIEELKSAKSHWIVPTTAGRREKEESSDELYDASNGQDATFDISSKKRIQNNSSGKRGQKRKKDGNITSRKCGISINSAGGLPNGSTGEGMALAGDKNWASSELLEFIGHMRNGDNSYISQFDVQVLLLEYIKQNNLHDPRRKSQIICDARLSNLFKKPRVDHFEMLKLLEMHYLVKQASTPNADSQRAIYSDSAQVNNGGHNELADTLGFDRRKAHKKIERELTINPEDYAAIDMHNINLIYLRRSVMEDLIDQVAAFSNKIAGAFVRIRISGLGNKEDMYRLVKVLGTHKVAERYTVSKKTTDYALEISNLEKKEIITMDTISNQDFTEEECKRLRQSMKFGLTARLKVVDVYEKAKIFQSLRFKDLQLLNTPEEKERMINEVPEVHVDSRMDPSYESAEEPEYKKAVDWTMHRNGPDLLFPGRKGTELNSVENHTQKSLDTSSLPTEDVDHRSGAGSNINLNNMAPEPASLGILSNDTEPEKVWHYKDPNGNVQGPFTLLQLSKWASFFPRDLRVWLTFESEENSLLLTEVLPKQQKDFIQLSTVTTSDKSMWAGSGQDRVNSNANNSSSPMGYNMVYPSALSSPSAECYDPTKDLKPLGGTSPSRSLKDAHALHEVQNQVNYSFTILSSTGSYAPPGSHDGRVSRDRVDEWNSSQDNGGIWRPTMNSSQKTNAQQHPDGCTGKDLMQTESKCSSHLVSVLTSQHSERDPATSLSTTSWPVFRTRCQQEGSSWTSATNAGAHDLQLSIALAKPETCSPTNPVEDRDSSSASALSCQSGAPVCVPQPDPTSTSNSRKIDATMDQHRTCQPDTSSVSFDLLHEPKSGSLFSLKTQDLEFEYPSPIPKQEGKGISVNQSGSTSVAHENLATKTCVRAPTSKIDSLQPLKERSHSTDRDSITQLEHLFEENVIKRNNKVVNPVSDAEGIAVSDVLESLTEQDCEKCSIHGVAPSQKMVPASAEEDQPQCSSPIALSPWGEPSYYQGEAVDSALWGVQDDPGNDMWSMPSPKPGFQPSSGLGADGKDASCIIEEARADPGDGAFVKTLPTQGEKKMEHGNSSASGSGVSERVKPKGSAASGPSLDGSTKVMGWQLPGSSLEGSAKVSGWKPPVLSLEGIANGSGSQASCPSTQRGTKSSGWQRSSSSPDGSRKASGWQQSSTSPEGSGKAHGWQRSGSFTQGGTKAAGRQPSRSCTDRIAKVDGWQRTSSSPEGSRKASGWHSSGRDSSKIASSASENRKLSSSHQATTPTGRHSLAKRQGSSDKGAAGWDEALGNSSEASKRQQGNSDKNAGSGVALGSNRSWHPSSGNPSRGGQGNHQHDRDSHSGDSRRGSSNYPRRSDNRHDHGSGGSSRPSSRGQSQRGLCKHYESGHCGKGSKCQYLHR

SEQ ID NO: 182709 - protein, 1507 aa, Zea Mays
MGAASWFATGGVARRCTTLRASSETNPSFGARASGIVGWHICSSCEKAVQYMCYTCTYSVCKGCIKQGKFFGVRGNKGFCDTCYGTILLIESKEDGAKVGVDFDDIYSWEYLFKLYWLDLKGKHLLTIEELKSAKSHWIVPTTAGRREKEESSDELYDASNGQDATFDISSKKRIQNNSSGKRGQKRKKDGNITSRKCGISINSAGGLPNGSTGEGMALAGDKNWASSELLEFIGHMRNGDNSYISQFDVQVLLLEYIKQNNLHDPRRKSQIICDARLSNLFKKPRVDHFEMLKLLEMHYLVKQASTPNADSQRAIYSDSAQVNNGGHNELADTLGFDRRKAHKKIERELTINPEDYAAIDMHNINLIYLRRSVMEDLIDQVAAFSNKIAGAFVRIRISGLGNKEDMYRLVKVLGTHKVAERYTVSKKTTDYALEISNLEKKEIITMDTISNQDFTEEECKRLRQSMKFGLTARLKVVDVYEKAKIFQSLRFKDLLNTPEEKERMINEVPEVHVDSRMDPSYESAEEPEYKKAVDWTMHRNGPDLLFPGRKGTELNSVENHTQKSLDTSSLPTEDVDHRSGAGSNINLNNMAPEPASLGILSNDTEPEKVWHYKDPNGNVQGPFTLLQLSKWASFFPRDLRVWLTFESEENSLLLTEVLPKQQKDFIQLSTVTTSDKSMWAGSGQDRVNSNANNSSSPMGYNMVYPSALSSPSAECYDPTKDLKPLGGTSPSRSLKDAHALHEVQNQVNYSFTILSSTGSYAPPGSHDGRVSRDRVDEWNSSQDNGGIWRPTMNSSQKTNAQQHPDGCTGKDLMQTESKCSSHLVSVLTSQHSERDPATSLSTTSWPVFRTRCQQEGSSWTSATNAGAHDLQLSIALAKPETCSPTNPVEDRDSSSASALSCQSGAPVCVPQPDPTSTSNSRKIDATMDQHRTCQPDTSSVSFDLLHEPKSGSLFSLKTQDLEFEYPSPIPKQEGKGISVNQSGSTSVAHENLATKTCVRAPTSKIDSLQPLKERSHSTDRDSITQLEHLFEENVIKRNNKVVNPVSDAEGIAVSDVLESLTEQDCEKCSIHGVAPSQKMVPASAEEDQPQCSSPIALSPWGEPSYYQGEAVDSALWGVQDDPGNDMWSMPSPKPGFQPSSGLGADGKDASCIIEEARADPGDGAFVKTLPTQGEKKMEHGNSSASGSGVSERVKPKGSAASGPSLDGSTKVMGWQLPGSSLEGSAKVSGWKPPVLSLEGIANGSGSQASCPSTQRGTKSSGWQRSSSSPDGSRKASGWQQSSTSPEGSGKAHGWQRSGSFTQGGTKAAGRQPSRSCTDRIAKVDGWQRTSSSPEGSRKASGWHSSGRDSSKIASSASENRKLSSSHQATTPTGRHSLAKRQGSSDKGAAGWDEALGNSSEASKRQQGNSDKNAGSGVALGSNRSWHPSSGNPSRGGQGNHQHDRDSHSGDSRRGSSNYPRRSDNRHDHGSGGSSRPSSRGQSQRGLCKHYESGHCGKGSKCQYLHR

SEQ ID NO: 182710 - protein, 1049 aa, Zea Mays
MQTITSEYEVWSNCPVKSDVYEKAKIFQSLRFKDLQLLNTPEEKERMINEVPEVHVDSRMDPSYESAEEPEYKKAVDWTMHRNGPDLLFPGRKGTELNSVENHTQKSLDTSSLPTEDVDHRSGAGSNINLNNMAPEPASLGILSNDTEPEKVWHYKDPNGNVQGPFTLLQLSKWASFFPRDLRVWLTFESEENSLLLTEVLPKQQKDFIQLSTVTTSDKSMWAGSGQDRVNSNANNSSSPMGYNMVYPSALSSPSAECYDPTKDLKPLGGTSPSRSLKDAHALHEVQNQVNYSFTILSSTGSYAPPGSHDGRVSRDRVDEWNSSQDNGGIWRPTMNSSQKTNAQQHPDGCTGKDLMQTESKCSSHLVSVLTSQHSERDPATSLSTTSWPVFRTRCQQEGSSWTSATNAGAHDLQLSIALAKPETCSPTNPVEDRDSSSASALSCQSGAPVCVPQPDPTSTSNSRKIDATMDQHRTCQPDTSSVSFDLLHEPKSGSLFSLKTQDLEFEYPSPIPKQEGKGISVNQSGSTSVAHENLATKTCVRAPTSKIDSLQPLKERSHSTDRDSITQLEHLFEENVIKRNNKVVNPVSDAEGIAVSDVLESLTEQDCEKCSIHGVAPSQKMVPASAEEDQPQCSSPIALSPWGEPSYYQGEAVDSALWGVQDDPGNDMWSMPSPKPGFQPSSGLGADGKDASCIIEEARADPGDGAFVKTLPTQGEKKMEHGNSSASGSGVSERVKPKGSAASGPSLDGSTKVMGWQLPGSSLEGSAKVSGWKPPVLSLEGIANGSGSQASCPSTQRGTKSSGWQRSSSSPDGSRKASGWQQSSTSPEGSGKAHGWQRSGSFTQGGTKAAGRQPSRSCTDRIAKVDGWQRTSSSPEGSRKASGWHSSGRDSSKIASSASENRKLSSSHQATTPTGRHSLAKRQGSSDKGAAGWDEALGNSSEASKRQQGNSDKNAGSGVALGSNRSWHPSSGNPSRGGQGNHQHDRDSHSGDSRRGSSNYPRRSDNRHDHGSGGSSRPSSRGQSQRGLCKHYESGHCGKGSKCQYLHR

SEQ ID NO: 182711 - protein, 103 aa, Zea Mays
MTNLYYGGTRIAASKIVFTNGSQDPWRHASKQKSSKDMPSYIMKCRNCGHGTDLRGCPQWPFRIEGDASNCSSLAVVNTARERIAKHIDLWLSQCSKPSVGAW

SEQ ID NO: 182712 - protein, 214 aa, Zea Mays
MMGSRVRIVFLLLAFLFARAAEPIAAAAPAGSRHLTKDERWMNQRLDHFSPTDHRQFKQRYFEFLDYHRAPGGPVFLRICGESACDGIPNDYLAVLAKKFGAAVVTPEHRYYGKSSPFKQLTTENLRFLSSKQALFDLAVFRQYYQESLNARYNRSGFDNPWFVIGVSYSGALSAWFRLKFPHLTCGSLASSGVVLAVYNYTDFDKQVDSPLRA

SEQ ID NO: 182713 - protein, 73 aa, Zea Mays
MMMNIILSRSLHLRSTIITNFPSSSTPGCPIPCLSPPNQASFKPIRIRIDQPSQIKHATAGERRGKRTEFFVF

SEQ ID NO: 182714 - protein, 85 aa, Zea Mays
MVPKTPAGAAEEQWIHWLQSWMRPCEVIVKQQIWSGLHSAQIHRRTTQRRTGVRRQKAGRGERHGRNSGKGRRTDDRRRTGADGA

SEQ ID NO: 182715 - protein, 216 aa, Zea Mays
MALAAPSSLRLLPTTPSQAPSPPCASRPRHLRELRLCQRLATAAAAAAAAAAAATAPLASSPTTSADTERRKHELLRAVQETRRGFAAGPDQRAAIEEAVVAVEERGAGKGTPIDLAALDGTWRLCYTSASDVLVLFEAAERLPLLQVGQIYQKFECKDRSDGGTVRNVVRWSIENLLEHNCWYLNAWTLEYIKSMTVGGARRCNTDGLCEVCCPV

SEQ ID NO: 182716 - protein, 245 aa, Zea Mays
MALAAPSSLRLLPTTPSQAPSPPCASRPRHLRELRLCQRLATAAAAAAAAAAAATAPLASSPTTSADTERRKHELLRAVQETRRGFAAGPDQRAAIEEAVVAVEERGAGKGTPIDLAALDGTWRLCYTSASDVLVLFEAAERLPLLQVGQIYQKFECKDRSDGGTVRNVVRWSIENLLEEQEGATLMVSAKFVVLSKRNIFLQFEEVAVENIKISEQLQTLIAPAILPRSFLSLQVYASPPGYIK

SEQ ID NO: 182717 - protein, 155 aa, Zea Mays
MALAAPSSLRLLPTTPSQAPSPPCASRPRHLRELRLCQRLATAAAAAAAAAAAATAPLASSPTTSVAVEERGAGKGTPIDLAALDGTWRLCYTSASDVLVLFEAAERLPLLQVGQIYQKFECKDRSDGGTVRNVVRWSIENLLEKGEAPDCFSRM

SEQ ID NO: 182718 - protein, 653 aa, Zea Mays
MLRLSIAVLTSPLLPTSVPAVRPHPRRLLRLRLRSLAASSSLSPSARSLRLLEWGKVCDAVASFAGTAHGRDATTKQLWEVEDVSYEQSQMLLQETEAAVLLLDNAGGAMDFSGLDTIESAIHSVSGGAVIKGLEAMAVTSLMMFVESLQVNIKAAMKLDEGSCSRLTTLTETILDAVINKSLVKSIQDIVDDDGSVKDTASPELRRYREQVQRLENRLYQLMDKLMRNADDEASLSEVCIVNGRCCIRTTMDNSSFFDGLLLSRSDAGSMIEPIVAVPLNDELQESRALVAKAELDVLSKLTDKIRLDLDSIQNLLQETIKLDKIAARAKYSIAYDGTFPDLYLPNFENETVTSATGGSIKQISSAQLPKKAWKLYMPNAYHPLLLQRHQENIHRAKRDVASATAEIRRRRIYGQDIAEEDQLASDLDSMKLRVSQLEKDQPVPVDFMIAEETTVLVITGPNTGGKTISLKTVGLASLMAKIGLYILASEPVKIPWFNAVYADIGDEQSLTQSLSTFSGHLKQIGAIRAESTSESLVLLDEVGAGTNPLEGAALGMSLLESFAEAGSFLTLATTHHGELKTLKYSNNSFENACMEFDEENLKPTFKILWGIPVDNGHGKTQTRISTTSSGGTISSYGATLYGCFVFSPFLTF

SEQ ID NO: 182719 - protein, 645 aa, Zea Mays
MLRLSIAVLTSPLLPTSVPAVRPHPRRLLRLRLRSLAASSSLSPSARSLRLLEWGKVCDAVASFAGTAHGRDATTKQLWEVEDVSYEQSQMLLQETEAAVLLLDNAGGAMDFSGLDTVAIESAIHSVSGGAVIKGLEAMAVTSLMMFVESLQVNIKAAMKLDEGSCSRLTTLTETILDAVINKSLVKSIQDIVDDDGSVKDTASPELRRYREQVQRLENRLYQLMDKLMRNADDEASLSEVCIVNGRCCIRTTMDNSSFFDGLLLSRSDAGSMIEPIVAVPLNDELQESRALVAKAELDVLSKLTDKIRLDLDSIQNLLQETIKLDKIAARAKYSIAYDGTFPDLYLPNFENETVTSATGGSIKQISSAQLPKKAWKLYMPNAYHPLLLQRHQENIHRAKRDVASATAEIRRRRIYGQDIAEEDQLASDLDSMKLRVSQLEKDQPVPVDFMIAEETTVLVITGPNTGGKTISLKTVGLASLMAKIGLYILASEPVKIPWFNAVYADIGDEQSLTQSLSTFSGHLKQIGAIRAESTSESLVLLDEVGAGTNPLEGAALGMSLLESFAEAGSFLTLATTHHGELKTLKYSNNSFENACMEFDEENLKPTFKILWGIPVDNGHGKTQTRISTTSSGGTISSYAVQGAS

SEQ ID NO: 182720 - protein, 830 aa, Zea Mays
MLRLSIAVLTSPLLPTSVPAVRPHPRRLLRLRLRSLAASSSLSPSARSLRLLEWGKVCDAVASFAGTAHGRDATTKQLWEVEDVSYEQSQMLLQETEAAVLLLDNAGGAMDFSGLDTIESAIHSVSGGAVIKGLEAMAVTSLMMFVESLQVNIKAAMKLDEGSCSRLTTLTETILDAVINKSLVKSIQDIVDDDGSVKDTASPELRRYREQVQRLENRLYQLMDKLMRNADDEASLSEVCIVNGRCCIRTTMDNSSFFDGLLLSRSDAGSMIEPIVAVPLNDELQESRALVAKAELDVLSKLTDKIRLDLDSIQNLLQETIKLDKIAARAKYSIAYDGTFPDLYLPNFENETVTSATGGSIKQISSAQLPKKAWKLYMPNAYHPLLLQRHQENIHRAKRDVASATAEIRRRRIYGQDIAEEDQLASDLDSMKLRVSQLEKDQPVPVDFMIAEETTVLVITGPNTGGKTISLKTVGLASLMAKIGLYILASEPVKIPWFNAVYADIGDEQSLTQSLSTFSGHLKQIGAIRAESTSESLVLLDEVGAGTNPLEGAALGMSLLESFAEAGSFLTLATTHHGELKTLKYSNNSFENACMEFDEENLKPTFKILWGIPGRSNAINITERLGLPLDIVESSRRLLGTAGAEINALIMDMERLKQEYQQHLQEAQYLLMQSKELHNNLELAQKSIVDHTSAQRKRKARVISEYAVMARSIIRKKFQQFQESAIAERVKEEENAVNDAKSDRVKDPMPANTSAIGNIQNIDTSLGMTANDDEDEVPEVGDSVYVPKLKNEATVVKIDSSKNEVQVQAGMMKLKLKLKDVKVQKRKVSR

SEQ ID NO: 182721 - protein, 344 aa, Zea Mays
MDNSSFFDGLLLSSRSDAGSMIEPIVAVPLNDELQESRALVAKAELDVLSKLTDKIRLDLDSIQNLLQETIKLDKIAARAKYSIAYDGTFPDLYLPNFENETVTSATGGSIKQISSAQLPKKAWKLYMPNAYHPLLLQRHQENIHRAKRDVASATAEIRRRRIYGQDIAEEDQLASDLDSMKLRVSQLEKDQPVPVDFMIAEETTVLVITGPNTGGKTISLKTVGLASLMAKIGLYILASEPVKIPWFNAVYADIGDEQSLTQSLSTFSGHLKQIGAIRAESTSESLVLLDEVGAGTNPLEGAALGMSLLESFAEAGSFLTLATTHHGELKTLKYRSLECNQYY

SEQ ID NO: 182722 - protein, 436 aa, Zea Mays
MDNSSFFDGLLLSRSDAGSMIEPIVAVPLNDELQESRALVAKAELDVLSKLTDKIRLDLDSIQNLLQETIKLDKIAARAKYSIAYDGTFPDLYLPNFENETVTSATGGSIKQISSAQLPKKAWKLYMPNAYHPLLLQRHQENIHRAKRDVASATAEIRRRRIYGQDIAEEDQLASDLDSMKLRVSQLEKDQPVPVDFMIAEETTVLVITGPNTGGKTISLKTVGLASLMAKIGLYILASEPVKIPWFNAVYADIGDEQSLTQSLSTFSGHLKQIGAIRAESTSESLVLLDEVGAGTNPLEGAALGMSLLESFAEAGSFLTLATTHHGELKTLKYSNNSFENACMEFDEENLKPTFKILWGIPGRSNAINITERLGLPLDIVESSRRLLGTAGAEINALIMDMERLKQEYQQHLQEAQYLLIPRSFITTWNWHKRAL

SEQ ID NO: 182723 - protein, 335 aa, Zea Mays
MDNSSFFDGLLLSRSDAGSMIEPIVAVPLNDELQESRALVAKAELDVLSKLTDKIRLDLDSIQNLLQETIKLDKIAARAKYSIAYDGTFPDLYLPNFENETVTSATGGSIKQISSAQLPKKAWKLYMPNAYHPLLLQRHQENIHRAKRDVASATAEIRRRRIYGQDIAEEDQLASDLDSMKLRVSQLEKDQPVPVDFMIAEETTVLVITGPNTGGKTISLKTVGLASLMAKIGLYILASEPVKIPWFNAVYADIGDEQSLTQSLSTFSGHLKQIGAIRAESTSESLVLLDEVGAGTNPLEGAALGMSLLESFAEAGSFLTLATTHHGELKTLKYS

SEQ ID NO: 182724 - protein, 603 aa, Zea Mays
MDNSSFFDGLLLSRSDAGSMIEPIVAVPLNDELQESRALVAKAELDVLSKLTDKIRLDLDSIQNLLQETIKLDKIAARAKYSIAYDGTFPDLYLPNFENETVTSATGGSIKQISSAQLPKKAWKLYMPNAYHPLLLQRHQENIHRAKRDVASATAEIRRRRIYGQDIAEEDQLASDLDSMKLRVSQLEKDQPVPVDFMIAEETTVLVITGPNTGGKTISLKTVGLASLMAKIVAKLAAVVTVVVSCRLLVADGATLGLYILASEPVKIPWFNAVYADIGDEQSLTQSLSTFSGHLKQIGAIRAESTSESLVLLDEVGAGTNPLEGAALGMSLLESFAEAGSFLTLATTHHGELKTLKYSNNSFENACMEFDEENLKPTFKILWGIPGRSNAINITERLGLPLDIVESSRRLLGTAGAEINALIMDMERLKQEYQQHLQEAQYLLMQSKELHNNLELAQKSIVDHTSAQRKRKARVISEYAVMARSIIRKKFQQFQESAIAERVKEEENAVNDAKSDRVKDPMPANTSAIGNIQNIDTSLGMTANDDEDEVPEVGDSVYVPKLKNEATVVKIDSSKNEVQVQAGMMKLKLKLKDVKVQKRKVSR

SEQ ID NO: 182725 - protein, 596 aa, Zea Mays
MLRLSIAVLTSPLLPTSVPAVRPHPRRLLRLRLRSLAASSSLSPSARSLRLLEWGKVCDAVASFAGTAHGRDATTKQLWEVEDVSYEQSQMLLQETEAAVLLLDNAGGAMDFSGLDTVAIESAIHSVSGGAVIKGLEAMAVTSLMMFVESLQVNIKAAMKLDEGSCSRLTTLTETILDAVINKSLVKSIQDIVDDDGSVKDTASPELRRYREQVQRLENRLYQLMDKLMRNADDEASLSEVCIVNGRCCIRTTMDNSSFFDGLLLSRSDAGSMIEPIVAVPLNDELQESRALVAKAELDVLSKLTDKIRLDLDSIQNLLQETIKLDKIAARAKYSIAYDGTFPDLYLPNFENETVTSATGGSIKQISSAQLPKKAWKLYMPNAYHPLLLQRHQENIHRAKRDVASATAEIRRRRIYGQDIAEEDQLASDLDSMKLRVSQLEKDQPVPVDFMIAEETTVLVITGPNTGGKTISLKTVGLASLMAKIGLYILASEPVKIPWFNAVYADIGDEQSLTQSLSTFSGHLKQIGAIRAESTSESLVLLDEVGAGTNPLEGAALGMSLLESFAEAGSFLTLATTHHGELKTLKYRSLECNQYY

SEQ ID NO: 182726 - protein, 675 aa, Zea Mays
MKLDEGSCSRLTTLTETILDAVINKSLVKSIQDIVDDDGSVKDTASPELRRYREQVQRLENRLYQLMDKLMRNADDEASLSEVCIVNGRCCIRTTMDNSSFFDGLLLSSRSDAGSMIEPIVAVPLNDELQESRALVAKAELDVLSKLTDKIRLDLDSIQNLLQETIKLDKIAARAKYSIAYDGTFPDLYLPNFENETVTSATGGSIKQISSAQLPKKAWKLYMPNAYHPLLLQRHQENIHRAKRDVASATAEIRRRRIYGQDIAEEDQLASDLDSMKLRVSQLEKDQPVPVDFMIAEETTVLVITGPNTGGKTISLKTVGLASLMAKIGLYILASEPVKIPWFNAVYADIGDEQSLTQSLSTFSGHLKQIGAIRAESTSESLVLLDEVGAGTNPLEGAALGMSLLESFAEAGSFLTLATTHHGELKTLKYSNNSFENACMEFDEENLKPTFKILWGIPGRSNAINITERLGLPLDIVESSRRLLGTAGAEINALIMDMERLKQEYQQHLQEAQYLLMQSKELHNNLELAQKSIVDHTSAQRKRKARVISEYAVMARSIIRKKFQQFQESAIAERVKEEENAVNDAKSDRVKDPMPANTSAIGNIQNIDTSLGMTANDDEDEVPEVGDSVYVPKLKNEATVVKIDSSKNEVQVQAGMMKLKLKLKDVKVQKRKVSR

SEQ ID NO: 182727 - protein, 106 aa, Zea Mays
MSGLSVVKSYCGHGIGELFHCAPNIPHYSRNKAVGIMKAGQTFTIEPMINAGVWNDRLWPDDWTAVTTDGKRSAQFEHTLLVTDTGCEVLTARLPSSPDVFPWLKP

SEQ ID NO: 182728 - protein, 290 aa, Zea Mays
MRVVPDEIEKPDWALDGIPKIEPDSDLQKRVEIKTPELIERMRETCRIAREVLDAAARVIKPGITTDEIDRVVHEETIARGGYPSPLNYHFFPKSCCTSVNEVICHGIPDARKLEDGDIVNVDVTVYYKGVHGDLNETYFVGNVDEASKQLVRCTYECLEKAIAIVKPGVRFREVGEIINRHASMSGLSVVKSYCGHGIGELFHCAPNIPHYSRNKAVGIMKAGQTFTIEPMINAGVWNDRLWPDDWTAVTTDGKRSAQFEHTLLVTDTGCEVLTARLPSSPDVFPWLKP

SEQ ID NO: 182729 - protein, 209 aa, Zea Mays
MEKGASEASAPCARCGKPAQLQCPKCAELKLPRENAAFCTQDCFRAAWSSHKSVHPKPGALASQQSPEGWKYCLRKGRGRALQLPRFEWTGPLRPYPISKMRVVPDEIEKPDWALDGIPKIEPDSDLQKRVEIKTPELIERMRETCRIAREVLDAAARVIKPGITTDEIDRVVHEETIARELPFLMILRWIPISIELPFLPQVMLHVCQ

SEQ ID NO: 182730 - protein, 198 aa, Zea Mays
MEKGASEASAPCARCGKPAQLQCPKCAELKLPRENAAFCTQDCFRAAWSSHKSVHPKPGALASQQSPEGWKYCLRKGRGRALQLPRFEWTGPLRPYPISKMRVVPDEIEKPDWALDGIPKIEPDSDLQKRVEIKTPELIERMRETCRIAREVLDAAARVIKPGITTDEIDRVVHEETIARGGYPSPLNYHFFPKSCCT

SEQ ID NO: 182731 - protein, 338 aa, Zea Mays
MEKGASEASAPCARCGKPAQLQCPKCAELKLPRENAAFCPLRPYPISKMRVVPDEIEKPDWALDGIPKIEPDSDLQKRVEIKTPELIERMRETCRIAREVLDAAARVIKPGITTDEIDRVVHEETIARGGYPSPLNYHFFPKSCCTSVNEVICHGIPDARKLEDGDIVNVDVTVYYKGVHGDLNETYFVGNVDEASKQLVRCTYECLEKAIAIVKPGVRFREVGEIINRHASMSGLSVVKSYCGHGIGELFHCAPNIPHYSRNKAVGIMKAGQTFTIEPMINAGVWNDRLWPDDWTAVTTDGKRSAQFEHTLLVTDTGCEVLTARLPSSPDVFPWLKP

SEQ ID NO: 182732 - protein, 461 aa, Zea Mays
MEDIEDKPVVMESDPDPDPDVHGAPMYESARAPAVQDLVAEYDQPAWTPAVREVEGDGVSPRVRLGDVGGPVVEDPAAPRSKTPAAREGEDIGTTPVVQQFETMSLSDGPAHVGAAKEGAKAEEWEGNAADMVGGVAGGASYTDRLKNAAAGTTEYGRKLASTVYEKVAGAGTGTGTAVGVGKRDDERTEAVPASNTRTDAARGAGYTDNIKSAAAGTTGYGKQLASTVYDKVAGVGTAVAPSRRQQEGSAKAEGAHSEAMPVSDTGAEEWKDAPATVEEANTESRPGYTDKIRSAAAGTTEYGKQLASTVYEKVASVGTAVAGKVQQATQSAGTATPGVGAQRDTGAAATATPGAGEQDKGVTVTGYIAEKLRPGDEDRALSEAISGAVQRRKDDAGDTVVQRVPAPGQAVASLTGGNRVSETVQPTTATGEDVKEGYAAEAPVIRGEEIGGAKLNTNAI

SEQ ID NO: 182733 - protein, 918 aa, Zea Mays
MFKSRWRGGRAKAVFKLQFHATQVPELGWEAMVVVVTPQDAGRPTARSEPAEVTDGACRWAAPVMEATKLPTGKDKIYQFLVYETGSSKAALLGEATVNLAEYADALKPSVVTLPLKGSPGALLHDGLLIRKPPDMRFPSRRNVPMSADPVGHLHNGSSFDAVSVSGSDGSSGRYTPKISASTHNSFLQDSSNALSPFANNRTVRNPLTSSGDWSGSSAPDASTDGSTSNSGEAGLRGEEDDVDKLRSEIATLTRKVDVSDMELQTLRKQIVKESRRGQDLFKEMSSLREERDALRRECERLRGAKNMIHDSNGSEKRLSDGDDPWSQIEELKQDLSHEKNLNSDLRLQLQKMKESNSELLLAVKDLDESLDKKNREISILQEDTQEDQQEAEYEHALSNVHNSGQKLALSETSSYQEKEDELMLDALAKKRDDISTSELEKKVLELSNEIELYKKDREDIEMQMEQLALDYEILKQENHDVSSRLEQAQLREQLRMQYECSAHLAIISDLEANVESLDNELQTQAKKFEADIAEITSAKVEQEQRAIKAEDSLRKIRWNNAATAERLQEEFKVLSSQVSSAFSANERHLVQARKEVAELQLQKSQLEELLQKAQGDLGSVQDQHRAKVQQLITLVDFKSKEIDRLLTELKSKSDEFHDQKRCDEARLNALSEEMDLLNAKIDELSSERNDLSEKNAQKDKELAGISEKDMQLQDKTAEITSLNKELVSLKDQVKTHLDELHDLKCLKDRKEETIGKLQIDIGSLKLQCDNLKTSLSKKESEKDNLASQVLELRRSLETREEGAKANGQNSDAKNNPHTNNKRMKHNTGSTGSIAALPGTNGQGEDDGDCNGHDMRNAAADGAAKELASLKESSKAVEEELKELHERYSAISLRLAEVEGERQQLVMTVRSLKNSSLR

SEQ ID NO: 182734 - protein, 798 aa, Zea Mays
MSPVQDGLLIRKPPDMRFPSRRNVPMSADPVGHLHNGSSFDAVSVSGSDGSSGRYTPKISASTHNSFLQDSSNALSPFANNRTVRNPLTSSGDWSGSSAPDASTDGSTSNSGEAGLRGEEDDVDKLRSEIATLTRKVDVSDMELQTLRKQIVKESRRGQDLFKEMSSLREERDALRRECERLRGAKNMIHDSNGSEKRLSDGDDPWSQIEELKQDLSHEKNLNSDLRLQLQKMKESNSELLLAVKDLDESLDKKNREISILQEDTQEDQQEAEYEHALSNVHNSGQKLALSETSSYQEKEDELMLDALAKKRDDISTSELEKKVLELSNEIELYKKDREDIEMQMEQLALDYEILKQENHDVSSRLEQAQLREQLRMQYECSAHLAIISDLEANVESLDNELQTQAKKFEADIAEITSAKVEQEQRAIKAEDSLRKIRWNNAATAERLQEEFKVLSSQVSSAFSANERHLVQARKEVAELQLQKSQLEELLQKAQGDLGSVQDQHRAKVQQLITLVDFKSKEIDRLLTELKSKSDEFHDQKRCDEARLNALSEEMDLLNAKIDELSSERNDLSEKNAQKDKELAGISEKDMQLQDKTAEITSLNKELVSLKDQVKTHLDELHDLKCLKDRKEETIGKLQIDIGSLKLQCDNLKTSLSKKESEKDNLASQVLELRRSLETREEGAKANGQNSDAKNNPHTNNKRMKHNTGSTGSIAALPGTNGQGEDDGDCNGHDMRNAAADGAAKELASLKESSKAVEEELKELHERYSAISLRLAEVEGERQQLVMTVRSLKNSSLR

SEQ ID NO: 182735 - protein, 641 aa, Zea Mays
MISPAMCRSAPRRAAQVRRLLSSAAPPAHAGAAVPGPCIVHKRGNDILHDPWYNKDTAFPMTERDRLGLRGLLPPRVMSFEQQYERFINSFRSLEHNTRGEPDSIVALAKWRILNRLHDRNETLYYRVLIDNIKDFAPIIYTPTVGLVCENYSGLFRRPRGMYFSAKDKGEMMSMIYNWPAEKVDMIVVTDGSRILGLGDLGVQGIGIPIGKLDVYVAAAGINPQKVLPIMLDVGTNNEKLLEDKLYLGLRQPRLEGEEYLAVVDEFMEAVHARWPKAVVQFEDFQMKWAFETLQRYRNRFCMFNDDVQGTAGVALAGLLGAVRAQGRPLQDFTNQKIVVVGAGSLLYMECSLSKMWFVHSNSSLESSAGIGVLSMAKQAMLRMPGIHRTGEGHNQFWVLDKDGLITKARKDLDSAVARFARGFGPDEVPDLYEGASLVEVVKKVKPHVLLGLSGVGGIFNEEVLKAMKESDSPRPAVFAMSNPTTKAECTPDDVFKHVGDKAIFASGSPFSNVSLGNGKSGYANQANNMYLFPGIGLGALLSGARHVSDGMLQAAAECLASYITDDEIRKGILFPSVSSIRHITARVGAAVVRAAVAEDLAEGCCDVGPRELGSMSESEAVDYVARKMWYPIYSPLVSDK

SEQ ID NO: 182736 - protein, 605 aa, Zea Mays
MISPAMCRSAPRRAAQVRRLLSSAAPPAHAGAAVPGPCIVHKRGNDILHDPWYNKDTAFPMTERDRLGLRGLLPPRVMSFEQQYERFINSFRSLEHNTRGEPDSIVALAKWRILNRLHDRNETLYYRVLIDNIKDFAPIIYTPTVGLVCENYSGLFRRPRGMYFSAKDKGEMMSMIYNWPAEKVDMIVVTDGSRILGLGDLGVQGIGIPIGKLDVYVAAAGINPQKVLPIMLDVGTNNEKLLEDKLCAGFPYYFRSKYCSLSEVIKSQFEDFQMKWAFETLQRYRNRFCMFNDDVQGTAGVALAGLLGAVRAQGRPLQDFTNQKIVVVGAGSAGIGVLSMAKQAMLRMPGIHRTGEGHNQFWVLDKDGLITKARKDLDSAVARFARGFGPDEVPDLYEGASLVEVVKKVKPHVLLGLSGVGGIFNEEVLKAMKESDSPRPAVFAMSNPTTKAECTPDDVFKHVGDKAIFASGSPFSNVSLGNGKSGYANQANNMYLFPGIGLGALLSGARHVSDGMLQAAAECLASYITDDEIRKGILFPSVSSIRHITARVGAAVVRAAVAEDLAEGCCDVGPRELGSMSESEAVDYVARKMWYPIYSPLVSDK

SEQ ID NO: 182737 - protein, 460 aa, Zea Mays
MTAPVSLPNELEAVSHSARVELFRDASCNIENEVLASLGNGQDSTAVGATPGFRVGEIRFANGDIYSGTLLGNTPEGSGQYRWSDGCTYDGEWNKGMRHGQGKTEWPSGATYEGEYSGGYVYGEGTYKGPDKIIYKGRWKLNHKHGLGHQTYPNGDMFEGSWIQGEIVGHGKYTWANGDTYVGNMKSGKMSGKGTLTWKNGDSYEGNWIDGMMHGYGIYTWNECGYYIGTWTRGLKDGKGKFFPKGCRVPVNDEMYINNLRNRGVLPDIRRQNHGSRILHSSSVDMGNMKVGMARQSSDVLFKRNSAEQSSLKNVSLERRWSLEVAIEKFIGHESSESSGLESLENLSDSRLPILEREYMQGVLISEVVLDRSFSDSSKKTKRRQKKTVRDTKKPGETIIKGHRSYDLMLSLQLGIRSLVIRLLELTMRFKKNGTQLERSHQFKNVKFVLQILDQEQVSG

SEQ ID NO: 182738 - protein, 547 aa, Zea Mays
MTAPVSLPNELEAVSHSARVELFRDASCNIENEVLASLGNGQDSTAVGATPGFRVGEIRFANGDIYSGTLLGNTPEGSGQYRWSDGCTYDGEWNKGMRHGQGKTEWPSGATYEGEYSGGYVYGEGTYKGPDKIIYKGRWKLNHKHGLGHQTYPNGDMFEGSWIQGEIVGHGKYTWANGDTYVGNMKSGKMSGKGTLTWKNGDSYEGNWIDGMMHGYGIYTWNECGYYIGTWTRGLKDGKGKFFPKGCRVPVNDEMYINNLRNRGVLPDIRRQNHGSRILHSSSVDMGNMKVGMARQSSDVLFKRNSAEQSSLKNVSLERRWSLEVAIEKFIGHESSESSGLESLENLSDSRLPILEREYMQGVLISEVVLDRSFSDSSKKTKRRQKKTVRDTKKPGETIIKGHRSYDLMLSLQLGIRYTVGKITPIQKREVRASDFGPRASFWMNFPKEGSRLTPSHSAEDFKWKDYCPMVFRNLREMFKIDAADYMISICGNSALRQLSSPGKSGSVFFLSQDDRFMIKTLRKSEVQVHFLYGLQRLYFLAFMIVG

SEQ ID NO: 182739 - protein, 415 aa, Zea Mays
MLSLQLGIRYTVGKITPIQKREVRASDFGPRASFWMNFPKEGSRLTPSHSAEDFKWKDYCPMVFRNLREMFKIDAADYMISICGNSALRQLSSPGKSGSVFFLSQDDRFMIKTLRKSEVQVLLRMLPNYYDHVRTYENTLITKFFGLHRVKPSSGQKFRFVVMGNMFCTELRIHRRFDLKGSSLGRSTDKIEIDENTTLKDLDLNYSFYLEPSWREALLKQIETDSDFLRTQRIMDYSLLLGVHYRAPQHLRTRASYHRSMAADRLTVVSEEDAQEDDALSHPEGLVLVQSSGENSVIVGPHIRGSRLRASAAGFGEVDLLLPGTARLQIQLGVNMPARAEQTPKEDESKPFREVYDVVLYLGIIDILQEYNMTKKIEHAVKSMQYDSVSISAVDPQFYSERFLNFIQTVFPENS

SEQ ID NO: 182740 - protein, 635 aa, Zea Mays
MTAPVSLPNELEAVSHSARVELFRDASCNIENEVLASLGNGQDSTAVGATPGFRVGEIRFANGDIYSGTLLGNTPEGSGQYRWSDGCTYDGEWNKGMRHGQGKTEWPSGATYEGEYSGGYVYGEGTYKGPDKIIYKGRWKLNHKHGLGHQTYPNGDMFEGSWIQGEIVGHGKYTWANGDTYVGNMKSGKMSGKGTLTWKNGDSYEGNWIDGMMHGYGIYTWNECGYYIGTWTRGLKDGKGKFFPKGCRVPVNDEMYINNLRNRGVLPDIRRQNHGSRILHSSSVDMGNMKVGMARQSSDVLFKRNSAEQSSLKNVSLERRWSLEVAIEKFIGHESSESSGLESLENLSDSRLPILEREYMQGVLISEVVLDRSFSDSSKKTKRRQKKTVRDTKKPGETIIKGHRSYDLMLSLQLGIRYTVGKITPIQKREVRASDFGPRASFWMNFPKEGSRLTPSHSAEDFKWKDYCPMVFRNLREMFKIDAADYMISICGNSALRQLSSPGKSGSVFFLSQDDRFMIKTLRKSEVQVLLRMLPNYYDHVRTYENTLITKFFGLHRVKPSSGQKFRFVVMGNMFCTELRIHRRFDLKGSSLGRSTDKIEIDENTTLKDLDLNYSFYLEPSWREALLKLKQTVIF

SEQ ID NO: 182741 - protein, 431 aa, Zea Mays
MIQLCCKENLQICYFSEGKIVDTLEGVNPASLANKVAKVAGPASVAESAVPASLGVAAGPAVLENIQKMAQQNGSSAAESTNSGSTQDALNKRLEQLVNSHPVFLFMKGTPEQPRCGFSRKVVNILKQEGVEFGSFDILTDNDVREGMKKFSNWPTFPQLYCKGELLGGCDIVIAMHDSGELKDVFEEHNIPLKPQGSKNEEAGQPESATEKGAAVAEPMGLTDAQKSRLESLINSSPVMVFIKGTPEEPKCGFSGKLVHILKQENIPFSSFDILSDDEVRQGLKVLSNWPSYPQLYIKGELVGGSDIVMEMHKSGELKKVLSEKGVIPKESLEDRLKSLVSSAPVMLFMKGTPDAPRCGFSSKVVNALKKEGVSFGSFDILSDEEVRQGLKTYSNWPTFPQLYYKSELIGGCDIVLEMEKSGELKSTLSE

SEQ ID NO: 182742 - protein, 315 aa, Zea Mays
MFSRRRGAAREPPEKPRRRQRTPSASLRRPPNRSRRRRAEENPEPQPSSPHSNSSTRSLPHPPPRQLQSSSALHHNQAHLPPPHFFSSNRPVGSQRRGMASGGAVRDVGSPAELEAAVAGARAVAVHFWASWCEASKQMDEVFAHLAVDFPHAAFLRVEAEEQPEISEAYGVTAVPYFVFCKEGKIVDTLEGVNPASLANKVAKVAGPASVAESAVPASLGVAAGPAVLENIQKMAQQNGSSAAESTNSGSTQDALNKRLEQLVNSHPVFLFMKGTPEQPRCGFSRKVVNILKQEGVEFGSFDILTDNDVREVVN

SEQ ID NO: 182743 - protein, 130 aa, Zea Mays
MAYIDHYVSPPEHILRAVKAGLKDKGLDALLALVEDETLSSFSSLSSASSSSDEEAGRAQLRRPSSGSYGRRAADEPVVCSPASSLVAVLVQALAHRVSYVWVLDEDNDCRLAGIVTFADVLRVFREQLL

SEQ ID NO: 182744 - protein, 167 aa, Zea Mays
MDPSGAGRVSIIHGLRPAGRTAGRLVPLVRVPQVNWARWCSCTASRRYGTRGATRCGPWPRRGTAPSRRTAAGTACRSSRRSTRRSLLTTSSPTCWASSTPSASRRRSWWARTSAPCRRTSSRCSTRAAPSAWCAWASPSTRLPCPSTPSCPKDSTSCAGACVAARH

SEQ ID NO: 182745 - protein, 128 aa, Zea Mays
MVVVHPLVLLFDRYRRRAQHYIAKIWATVTISMFYNLEVEGMENLPPNSCPGVYVANHQSFLDIYTLLTLGRCFKFISKTSIFMFPIIGWAMYLLGVIPLRRMDSRSQLEKELLYFSFRRVLEVEMAS

SEQ ID NO: 182746 - protein, 89 aa, Zea Mays
MPEAGLGANSVSILSFAPPAVLILSCASPLVSSPHTPPRKSCSPYYEWNNNSVGYRECSCGASVLRLCFTCCIFVSHGISDHTCLNLTN

SEQ ID NO: 182747 - protein, 566 aa, Zea Mays
MEKACLSAVALEDTSEMVLKLGGNFKETLRQSGGLDNIFNVMVNCHSELEKLVKDASTTDVEGKERAPLQSAALLLKCLKILENATFLSDNNKTHLLSLNRKLSPKCPPLPFVGVILNIIELLSALSLLQKPSTVSRKADPKNTKVCNGACSADSRCLNLLNHHGKCNNSKKKSPLLNHHGKCQDCSSTKFNGASLKLNVRKDRSKANSTRGSSGWISIKARTSDWNSREMAKKRRLSENAQTALSNGGDDPFAFDDTDQEPSNWDPFGPKRKSPQKRAKRSNGELVLDDCDTAVTGSPELCQPEGINQSGATSDSKAADESNLLEDCLLASVKVLMNLANDNPSGCEQIASCGGINTMASLIIKHFPSFDFSMDSNNQMKERVSSGDLSSSQNSKSLQIKTKQLRAYELDFLVAILGLLVNLVEKDNLNRVRLANARVSVNLSQSPDTEEVQRDVIPLLCSIFLASQSTGETAEAISPDDEESLLQGEREAEMMIVEAYAALVLAFLSTESMKVRGAISSCLPDNNLKVLVPVLEKFVSFHLQLNMMTRETHSAVTEVIERCRQS

SEQ ID NO: 182748 - protein, 816 aa, Zea Mays
MILRTYGRRSRSFSDGGGGVSSSQDAFDCDDAADLLVSSASQPLPLPPSQESSSMWDFDEDPPPSPPRPRPEGRRRGARRGGWELAEAPAVAPTATLMEAEEYGEMMESVDEVTFALDGLRPAAQKRTRRASLLALLGICASAERRRVLRSQGLVQQIIDAILVLDIDDPPCAIAAGALLFVLASDVQDNNSLDSETCVHFLLKLLNPPVNVVDAKAPSIGSKLLGISKFQMLNSSNKDADSSSEDILLKVEEILLSCKEIKPLDSDDKKTTRPELCSKWLALLTMEKACLSAVALEELEKLVKDASTTDVEGKERAPLQSAALLLKCLKILENATFLSDNNKTHLLSLNRKLSPKCPPLPFVGVILNIIELLSALSLLQKPSTVSRKADPKNTKVCNGACSADSRCLNLLNHHGKCNNSKKKSPLLNHHGKCQDCSSTKFNGASLKLNVRKDRSKANSTRGSSGWISIKARTSDWNSREMAKKRRLSENAQTALSNGGDDPFAFDDTDQEPSNWDPFGPKRKSPQKRAKRSNGELVLDDCDTAVTGSPELCQPEGINQSGATSDSKAADESNLLEDCLLASVKVLMNLANDNPSGCEQIASCGGINTMASLIIKHFPSFDFSMDSNNQMKERVSSGDLSSSQNSKSLQIKTKQLRAYELDFLVAILGLLVNLVEKDNLNRVRLANARVSVNLSQSPDTEEVQRDVIPLLCSIFLASQSTGETAEAISPDDEESLLQGEREAEMMIVEAYAALVLAFLSTESMKVRGAISSCLPDNNLKVLVPVLEKFVSFHLQLNMMTRETHSAVTEVIERCRQS

SEQ ID NO: 182749 - protein, 773 aa, Zea Mays
MILRTYGRRSRSFSDGGGGVSSSQDAFDCDDAADLLVSSASQPLPLPPSQESSSMWDFDEDPPPSPPRPRPEGRRRGARRGGWELAEAPAVAPTATLMEAEEYGEMMESVDEVTFALDGLRPAAQKRTRRASLLALLGICASAERRRVLRSQGLVQQIIDAILVLDIDDPPCAIAAGALLFVLASDVQDNNSLDSETCVHFLLKLLNPPVNVVDAKAPSIGSKLLGISKFQMLNSSNKDADSSSEDILLKVEEILLSCKEIKPLDSDDKKTTRPELCSKWLALLTMEKACLSAVALEELETHLLSLNRKLSPKCPPLPFVGVILNIIELLSALSLLQKPSTVSRKADPKNTKVCNGACSADSRCLNLLNHHGKCNNSKKKSPLLNHHGKCQDCSSTKFNGASLKLNVRKDRSKANSTRGSSGWISIKARTSDWNSREMAKKRRLSENAQTALSNGGDDPFAFDDTDQEPSNWDPFGPKRKSPQKRAKRSNGELVLDDCDTAVTGSPELCQPEGINQSGATSDSKAADESNLLEDCLLASVKVLMNLANDNPSGCEQIASCGGINTMASLIIKHFPSFDFSMDSNNQMKERVSSGDLSSSQNSKSLQIKTKQLRAYELDFLVAILGLLVNLVEKDNLNRVRLANARVSVNLSQSPDTEEVQRDVIPLLCSIFLASQSTGETAEAISPDDEESLLQGEREAEMMIVEAYAALVLAFLSTESMKVRGAISSCLPDNNLKVLVPVLEKFVSFHLQLNMMTRETHSAVTEVIERCRQS

SEQ ID NO: 182750 - protein, 69 aa, Zea Mays
MALLMPNSQLHISWISKAILNSKRSNYYISSTENIKASVFLPHSVSKYGLILNIITQICVDEYTAESIF

SEQ ID NO: 182751 - protein, 403 aa, Zea Mays
MLWGSRGCPDFKIWVSNKNDSPEVCSADVASQDPLSVSVAILHQFNILPEMYQVGYTKLFFRTGQIGKLEDTRNRTLHGILRVQSCFRGHQARHHARERIRGVLALQTFIRGEKARQIYSSLLRKHRAAVILQSNLRCWLARRYFINVRKASVIIQSGIRGSLVRRCNGNIDLINVLREFESKQEAEGDQILIKASVLAELQRRILKAEATVREKEEENETLHQRLQQYENRWLEYEQKMKAMEEMWQKQMRSLQSSLSVAKKSLALHETPRMSDSSVDQSWESNGNHVSSGSQLVPRTGGREMSAGLSVIGRLAEEFEQRSQVFADDAKFLVEVKSGQADASLNPDMELRRLKHNFDSWKKDFSGRIRETKMILNKLGNGNESSPNSVKRKWWGRLNTSKFS

SEQ ID NO: 182752 - protein, 833 aa, Zea Mays
MPLDYRYSDGPSAANGAGGGPAGNGVGRRAVAVEAGKEEKEGEVVRLEGDDADSPYSSNVVTAEEEAGNTGGGGDEVDSAAAATPRRLSPRAAASPTQVDARWGDTSSYGAKKKHRVFCQLRNGDWALCTVLATSGDESVLKVSEGKVLRLKTESLQPANPEILDGVDDLMQLSYLSEPSVLYNLQYRYSQDMIYTKAGPVLVAVNPFKKVSLYGNEYIDAYRNKSMDSPHVYAIADAALCEMKRDEVNQSIIISGESGAGKTETAKIAMQYLASLGGGSGIEYEILQTNPILEAFGNAKTLRNDNSSRFLIEIHFSTTGRICGAMIQTFLLEKSRVVQCAVGERSYHIFYQLCAGAPASLREKLNLKKVDEYKYLKQSCCYSIAGVDDAQMFRTVTEAMDIVHISKEDQENVFAMVSAVLWLGDVSFTVIDNENHVEIIADEASKMVAELLGCSIEDLNLALTKRHMKVNNENIVQKLTLAQATDTRDALAKSLYASLFEWLVEQINKSLSVGKRRTGRSISILDIYGFESFDKNSFEQFCINYANERLQQHFNRHLFKLEQEEYVEDGIDWAKVDFEDNQDCLSLFEKKPLGLLSLLDEESTFPNATDLTFANKLKQHLNSNSCFRGERDKGFAVRHYAGEVAYDTSGFLEKNRDLLHMDSIQLLAKCKTFLPKMFASKMLVQPDDSMSVPYRSSAADSQKLSVAMKFKGQLFQLMQRLESTTPHFIRCIKPNNLQLPAIYEQGLVLQQLKCCGVLEVVRISRSGYPTRMTHQKFARRMLHLKIHSVFQLQFFISSTFYLRCIKLATQSCSSELDRLANLKILGIVLYTVF

SEQ ID NO: 182753 - protein, 864 aa, Zea Mays
MASVEVRSVRKSTALRARGGPSKLQSARSMPLDYRYSDGPSAANGAGGGPAGNGVGRRAVAVEAGKEEKEGEVVRLEGDDADSPYSSNVVTAEEEAGNTGGGGDEVDSAAAATPRRLSPRAAASPTQVDARWGDTSSYGAKKKHRVFCQLRNGDWALCTVLATSGDESVLKVSEGKVLRLKTESLQPANPEILDGVDDLMQLSYLSEPSVLYNLQYRYSQDMIYTKAGPVLVAVNPFKKVSLYGNEYIDAYRNKSMDSPHVYAIADAALCEMKRDEVNQSIIISGESGAGKTETAKIAMQYLASLGGGSGIEYEILQTNPILEAFGNAKTLRNDNSSRFGKLIEIHFSTTGRICGAMIQTFLLEKSRVVQCAVGERSYHIFYQLCAGAPASLREKLNLKKVDEYKYLKQSCCYSIAGVDDAQMFRTVTEAMDIVHISKEDQENVFAMVSAVLWLGDVSFTVIDNENHVEIIADEASKMVAELLGCSIEDLNLALTKRHMKVNNENIVQKLTLAQATDTRDALAKSLYASLFEWLVEQINKSLSVGKRRTGRSISILDIYGFESFDKNSFEQFCINYANERLQQHFNRHLFKLEQEEYVEDGIDWAKVDFEDNQDCLSLFEKKPLGLLSLLDEESTFPNATDLTFANKLKQHLNSNSCFRGERDKGFAVRHYAGEVAYDTSGFLEKNRDLLHMDSIQLLAKCKTFLPKMFASKMLVQPDDSMSVPYRSSAADSQKLSVAMKFKGQLFQLMQRLESTTPHFIRCIKPNNLQLPAIYEQGLVLQQLKCCGVLEVVRISRSGYPTRMTHQKFARRMLHLKIHSVFQLQFFISSTFYLRCIKLATQSCSSELDRLANLKILGIVLYTVF

SEQ ID NO: 182754 - protein, 615 aa, Zea Mays
MASVEVRSVRKSTALRARGGPSKLQSARSMPLDYRYSDGPSAANGAGGGPAGNGVGRRAVAVEAGKEEKEGEVVRLEGDDADSPYSSNVVTAEEEAGNTGGGGDEVDSAAAATPRRLSPRAAASPTQVDARWGDTSSYGAKKKHRVFCQLRNGDWALCTVLATSGDESVLKVSEGKVLRLKTESLQPANPEILDGVDDLMQLSYLSEPSVLYNLQYRYSQDMIYTKAGPVLVAVNPFKKVSLYGNEYIDAYRNKSMDSPHVYAIADAALCEMKRDEVNQSIIISGESGAGKTETAKIAMQYLASLGGGSGIEYEILQTNPILEAFGNAKTLRNDNSSRFGKLIEIHFSTTGRICGAMIQTFLLEKSRVVQCAVGERSYHIFYQLCAGAPASLREKLNLKKVDEYKYLKQSCCYSIAGVDDAQMFRTVTEAMDIVHISKEDQENVFAMVSAVLWLGDVSFTVIDNENHVEIIADEASKMVAELLGCSIEDLNLALTKRHMKVNNENIVQKLTLAQATDTRDALAKSLYASLFEWLVEQINKSLSVGKRRTGRSISILDIYGFESFERTVLNSSASIMLMKGCNNISIVIYLSLSKRNMWRMASTGQRSTLRIIKIV

SEQ ID NO: 182755 - protein, 647 aa, Zea Mays
MASVEVRSVRKSTALRARGGPSKLQSARSMPLDYRYSDGPSAANGAGGGPAGNGVGRRAVAVEAGKEEKEGEVVRLEGDDADSPYSSNVVTAEEEAGNTGGGGDEVDSAAAATPRRLSPRAAASPTQVDARWGDTSSYGAKKKHRVFCQLRNGDWALCTVLATSGDESVLKVSEGKVLRLKTESLQPANPEILDGVDDLMQLSYLSEPSVLYNLQYRYSQDMIYTKAGPVLVAVNPFKKVSLYGNEYIDAYRNKSMDSPHVYAIADAALCEMKRDEVNQSIIISGESGAGKTETAKIAMQYLASLGGGSGIEYEILQTNPILEAFGNAKTLRNDNSSRFVSFIYSCVFTILQLRMKINLYSQLQGKLIEIHFSTTGRICGAMIQTFLLEKSRVVQCAVGERSYHIFYQLCAGAPASLREKLNLKKVDEYKYLKQSCCYSIAGVDDAQMFRTVTEAMDIVHISKEDQENVFAMVSAVLWLGDVSFTVIDNENHVEIIADEASKMVAELLGCSIEDLNLALTKRHMKVNNENIVQKLTLAQATDTRDALAKSLYASLFEWLVEQINKSLSVGKRRTGRSISILDIYGFESFDKNSFEQFCINYANERLQQHFNRHLFKLEQEEYVEDGIDWAKVDFEDNQDCLSLFEKV

SEQ ID NO: 182756 - protein, 522 aa, Zea Mays
MVWVLDPVDTVRGIQKRYIFAAGTYKVGRKDCDVIVQTDTSISRVHAEIAIEKMVAWDPHSGAPASPSFVRVIDRSKYGTFVNKVHGTQGSRLHKDEDMMLTDGDAVTFGTGAYATRKWSNECTHVLVDGSCSLTPELLDAVMAKKQIMLGDWFEAMAEKNIHTEIPSCTQYIPNLTLDGMVIKMVDINLIQNFLEGYTFILGSSDKYQFGEKLHGLLESTGAKYVHIDDFCANSQDSAAGDTDHQILVVPARYPLEFSKIRVLFTLSKISDIKLFAAILSGRLEATSIEPPAFIVTSSNSTDATIVADSDVEMETATSNPTGAANKSQHHTENISDDEKQTTNITNEVARKGNVIHPKHPESVEDLKPMEEDVKVIEKTATYRSTGRDEDARILSKAPKDEKLDTSRDGASDVIFSQNLVVRRSLPQSAPAAPAEIGGVNFKRFRKREMVSGNSFKDLIPFAREPYRESDHERGSTMTDFMREEKRQKQMEAIAEDLFNNAKSKKRAAAGSSIHTLLTGHR

SEQ ID NO: 182757 - protein, 375 aa, Zea Mays
MQLWQRSRSCWETGLRQWLKRTYTQRSLLVHNGMVIKMVDINLIQNFLEGYTFILGSSDKYQFGEKLHGLLESTGAKYVHIDDFCANSQDSAAGDTDHQILVVPARYPLEFSKIRVLFTLSKISDIKLFAAILSGRLEATSIEPPAFIVTSSNSTDATIVADSDVEMETATSNPTGAANKSQHHTENISDDEKQTTNITNEVARKGNVIHPKHPESVEDLKPMEEDVKVIEKTATYRSTGRDEDARILSKAPKDEKLDTSRDGASDVIFSQNLVVRRSLPQSAPAAPAEIGGVNFKRFRKREMVSGNSFKDLIPFAREPYRESDHERGSTMTDFMREEKRQKQMEAIAEDLFNNAKSKKRAAAGSSIHTLLTGHR

SEQ ID NO: 182758 - protein, 535 aa, Zea Mays
MVWVLDPVDTVRGIQKRYIFAAGTYKVGRKDCDVIVQTDTSISRVHAEIAIEKMVAWDPHSGAPASPSFVRVIDRSKYGTFVNKVHGTQGSRLHKDEDMMLTDGDAVTFGTGNATFRLSFVPIVVFFHGAKSTRIDPSLHAVMKSIGAYATRKWSNECTHVLVDGSCSLTPELLDAVMAKKQIMLGDWFEAMAEKNIHTEIPSCTQYIPNLTLDGMVIKMYQFGEKLHGLLESTGAKYVHIDDFCANSQDSAAGDTDHQILVVPARYPLEFSKIRVLFTLSKISDIKLFAAILSGRLEATSIEPPAFIVTSSNSTDATIVADSDVEMETATSNPTGAANKSQHHTENISDDEKQTTNITNEVARKGNVIHPKHPESVEDLKPMEEDVKVIEKTATYRSTGRDEDARILSKAPKDEKLDTSRDGASDVIFSQNLVVRRSLPQSAPAAPAEIGGVNFKRFRKREMVSGNSFKDLIPFAREPYRESDHERGSTMTDFMREEKRQKQMEAIAEDLFNNAKSKKRAAAGSSIHTLLTGHR

SEQ ID NO: 182759 - protein, 415 aa, Zea Mays
MKSIGAYATRKWSNECTHVLVDGSCSLTPELLDAVMAKKQIMLGDWFEAMAEKNIHTEIPSCTQYIPNLTLDGMVIKMVDINLIQNFLEGYTFILGSSDKYQFGEKLHGLLESTGAKYVHIDDFCANSQDSAAGDTDHQILVVPARYPLEFSKIRVLFTLSKISDIKLFAAILSGRLEATSIEPPAFIVTSSNSTDATIVADSDVEMETATSNPTGAANKSQHHTENISDDEKQTTNITNEVARKGNVIHPKHPESVEDLKPMEEDVKVIEKTATYRSTGRDEDARILSKAPKDEKLDTSRDGASDVIFSQNLVVRRSLPQSAPAAPAEIGGVNFKRFRKREMVSGNSFKDLIPFAREPYRESDHERGSTMTDFMREEKRQKQMEAIAEDLFNNAKSKKRAAAGSSIHTLLTGHR

SEQ ID NO: 182760 - protein, 50 aa, Zea Mays
MFKETRTCEHSMVHSEGVGIESCRVVLHSCISAAGTVGGLRPPKVLKNMI

SEQ ID NO: 182761 - protein, 258 aa, Zea Mays
MFAHKTLRIPLPGRHPPSSYQQNGSYESDDRECTPRRIHDDILESILKTPNSKVSPAMSLLQGYYGLEPPPKRDQTSEGTEMAVHSKGKSAFLDVEPWLEPPNSDPFPLQNRKNRSLMIGSFLDGGTDENGDSERFIRRRQKADGELLPREENGGDFLASVGKGLALRPKSSNRPDMNKSQQNLFAMAEPLFGNGLQTVRKSSSTPEFQEPETNTSSSIWSASKWSINTDAFALPLPIPRFDNIPKPIAAWRNKPARD

SEQ ID NO: 182762 - protein, 565 aa, Zea Mays
MASVYTAPRAPLPTVASSSSSARQVDPNPSGSRFLAGRRLRVVRRLAGAAPSRRAPWVCYSARSPDADAGDEQRRRGWDAMLHDAFQGAVRRWSEYVSNYWPLPPSVKEAGTGKRVGSSYDEEVMNGDEEEMKVGEEEGKWSWERWKRHFALIEESERLVDELQLQLQASVYREDYRSAHKLRLAIATIVKNDTVGRAVSDLNMAIDEERYKDAAYIRDHAGTGLLGWWSGISGNLSDPYGLIIRISAEHGRYVARSYDTRQLTSDSSGLPIFEIYFAEANGGYNLQAVHLKPDDSDSDQVPNMLREKLGMDSINISSSSVGSKHEEFDGSVNMDDKDSDDSNIDAGPGSKDLSSDPTAVPRIKILKVVPMQNVDKDYIINIFDQISEENDDPEVENESSEDAGDEDNSGVAETVSAEENGDESGDESDIEPLVSIDFVIENNDDYASHPSAEAFERMPARLEKRDRFSFSFYTEEYSKKLDAGKAQQTSKKTVRLHTDQQDYDGFVELDRVKLSGSNKKLSILQLGIKRNNKVQKKLHGVTHFSRIQMPISSDPLTGCFPCKSW

SEQ ID NO: 182763 - protein, 656 aa, Zea Mays
MASVYTAPRAPLPTVASSSSSARQVDPNPSGSRFLAGRRLRVVRRLAGAAPSRRAPWVCYSARSPDADAGDEQRRRGWDAMLHDAFQGAVRRWSEYVSNYWPLPPSVKEAGTGKRVGSSYDEEVMNGDEEEMKVGEEEGKWSWERWKRHFALIEESERLVDELQLQLQASVYREDYRSAHKLRLAIATIVKNDTVGRAVSDLNMAIDEERYKDAAYIRDHAGTGLLGWWSGISGNLSDPYGLIIRISAEHGRYVARSYDTRQLTSDSSGLPIFEIYFAEANGGYNLQAVHLKPDDSDSDQVPNMLREKLGMDSINISSSSVGSKHEEFDGSVNMDDKDSDDSNIDAGPGSKDLSSDPTAVPRIKILKVVPMQNVDKDYIINIFDQISEENDDPEVENESSEDAGDEDNSGVAETVSAEENGDESGDESDIEPLVSIDFVIENNDDYASHPSAEAFERMPARLEKRDRFSFSFYTEEYSKKLDAGKAQQTSKKTVRLHTDQQDYDGFVELDRVKLSGSNKKLSILQLGIKRNNKVQKKLHGVTHFSRIQMPISSDPLTGLYLTASGFDSEILSLQRKFGQWREDGPSEEHSDLLFYEYVEAVKLTGDNLMPAGQVVFRAKVGEHYRLPHKGIIPRELGVVQGAKENCRSWFPKPSMG

SEQ ID NO: 182764 - protein, 1154 aa, Zea Mays
MTTQNVTIRSAPDPLLHWIWSAGYGESRSLMADIERLVGSNEELSRLKLMVVYKNSEKLLTDAIGAAEGITVVYYQRSMQFKYQGKLRAHDILSAVRYIMSLDHEESPFEVLHTQEDVETFIESTDKSILLYESCGWFTRLAHGGGNQSYEAASSNNNTENVDISGKIMTREPDGPLELVIENEEQTFGVGGQLTGSPWKVGFALANESVSEQIGNTNDGYRKCTMQKFHQFESFYGKLTAIAREYLLPPEIAKFGLITERSLLPSLDVVNEGNQDTWFVITHHMGCKTCSVIAKDGDDLRSIVQSHHNLGIKEVSADESSREAIFPRNRPSVVLFIDRLSHSSKVRDESKLVLKLLRQYVQNNYPFHVSNGVPSSSTSKARSKAVPSLRNTGISDAYSQTARLSAWASKLMALGDKMSVMVVNDGDSISYKSSSQGSGANPVYDVLTKLLDKARPGHKSKKTRISLVSRDVGLKMLSDHSEIKVVKSLSVEESEYKRTDDASATTANSNDDITEAFVDENTAKETEYINDGQVPSILEKSSATYPDEHDTAREFNDTEIEDKSISEASDMSVDLKEDAPNNADSSSEVGGMLHKHIMEKTVTEAFQILEHDERNLYTDQEESVSSNEQVDGSSFLSKKISKTEDAIYENTFGLSEGLEESDRRCPHHATCSSSCVPVRDDTDFTDQVTSSISDYRFAGAFYFSDGGYRLLRTLTGGSRIPSLVIIDPVEQKHYIFPEESEYSYASLQNYLDSFRNRSLPSYYRGTSSAISSKEFPRPPFVNHDFHEANSIPQLTAFSFCPLVFGPRGCDSKSEVSFSNTENIVSGWNKDVMVLFSNSWCGFCQRAELVVRELHRSFKSFSSYSDSVSRNAQDVHNEEKSEEYVMKGFPAIYMIDCTSNECHHLLKSAGMEELYPALLLFPAENKSAIAYEGGMSVSHLIEFLESHVSNSRYLLEYKGFMWKKRMTPQHDAPQAIQFKVSDKGSGNVGSELPSHPGVVTGSILTATKKLGTAVPFDNAKVLIVSADSHEGFHGLIINKRLSWGVFKDLDSSMEPIKHAPLFYGGPVVVQGYHLVSLSRVSSEGYMQVIPGVYYGNIVATSRVVTRIKLGEQSVNGLWFFLGYSGWGYNQLFDELTEGAWLVSVKPIEHLDWPKS

SEQ ID NO: 182765 - protein, 703 aa, Zea Mays
MQKFHQFESFYGKLTAIAREYLLPPEIAKFGLITERSLLPSLDVVNEGNQDTWFVITHHMGCKTCSVIAKDGDDLRSIVQSHHNLGIKEVSADESSREAIFPRNRPSVVLFIDRLSHSSKVRDESKLVLKLLRQYVQNNYPFHVSNGVPSSSTSKARSKAVPSLRNTGISDAYSQTARLSAWASKLMALGDKMSVMVVNDGDSISYKSSSQGSGANPVYDVLTKLLDKARPGHKSKKTRISLVSRDVGLKMLSDHSEIKVVKSLSVEESEYKRTDDASATTANSNDDITEAFVDENTAKETEYINDGQVPSILEKSSATYPDEHDTAREFNDTEIEDKSISEASDMSVDLKEDAPNNADSSSEVGGMLHKHIMEKTVTEAFQILEHDERNLYTDQEESVSSNEQVDGSSFLSKKISKTEDAIYENTFGLSEGLEESDRRCPHHATCSSSCVPVRDDTDFTDQVTSSISDYRFAGAFYFSDGGYRLLRTLTGGSRIPSLVIIDPVEQKHYIFPEESEYSYASLQNYLDSFRNRSLPSYYRGTSSAISSKEFPRPPFVNHDFHEANSIPQLTAFSFCPLVFGPRGCDSKSEVSFSNTENIVSGWNKDVMVLFSNSWCGFCQRAELVVRELHRSFKSFSSYSDSVSRNAQDVHNEEKSEEYVMKGFPAIYMIDCTSNECHHLLKSAGRTLSGIVTLPCGEQKCNSI

SEQ ID NO: 182766 - protein, 986 aa, Zea Mays
MTREPDGPLELVIENEEQTFGVGGQLTGSPWKVGFALANESVSEQIGNTNDGYRKCTMQKFHQFESFYGKLTAIAREYLLPPEIAKFGLITERSLLPSLDVVNEGNQDTWFVITHHMGCKTCSVIAKDGDDLRSIVQSHHNLGIKEVSADESSREAIFPRNRPSVVLFIDRLSHSSKVRDESKLVLKLLRQYVQNNYPFHVSNGVPSSSTSKARSKAVPSLRNTGISDAYSQTARLSAWASKLMALGDKMSVMVVNDGDSISYKSSSQGSGANPVYDVLTKLLDKARPGHKSKKTRISLVSRDVGLKMLSDHSEIKVVKSLSVEESEYKRTDDASATTANSNDDITEAFVDENTAKETEYINDGQVPSILEKSSATYPDEHDTAREFNDTEIEDKSISEASDMSVDLKEDAPNNADSSSEVGGMLHKHIMEKTVTEAFQILEHDERNLYTDQEESVSSNEQVDGSSFLSKKISKTEDAIYENTFGLSEGLEESDRRCPHHATCSSSCVPVRDDTDFTDQVTSSISDYRFAGAFYFSDGGYRLLRTLTGGSRIPSLVIIDPVEQKHYIFPEESEYSYASLQNYLDSFRNRSLPSYYRGTSSAISSKEFPRPPFVNHDFHEANSIPQLTAFSFCPLVFGPRGCDSKSEVSFSNTENIVSGWNKDVMVLFSNSWCGFCQRAELVVRELHRSFKSFSSYSDSVSRNAQDVHNEEKSEEYVMKGFPAIYMIDCTSNECHHLLKSAGMEELYPALLLFPAENKSAIAYEGGMSVSHLIEFLESHVSNSRYLLEYKGFMWKKRMTPQHDAPQAIQFKVSDKGSGNVGSELPSHPGVVTGSILTATKKLGTAVPFDNAKVLIVSADSHEGFHGLIINKRLSWGVFKDLDSSMEPIKHAPLFYGGPVVVQGYHLVSLSRVSSEGYMQVIPGVYYGNIVATSRVVTRIKLGEQSVNGLWFFLGYSGWGYNQLFDELTEGAWLVSVKPIEHLDWPKS

SEQ ID NO: 182767 - protein, 969 aa, Zea Mays
MRLLLTAAWPCAILLILASALQSATVASSGAAAARLEWQVLTRANFSSQIRLRPHVLLLVTMPWYGESRSLMADIERLVGSNEELSRLKLMVVYKNSEKLLTDAIGAAEGITVVYYQRSMQFKYQGKLRAHDILSAVRYIMSLDHEESPFEVLHTQEDVETFIESTDKSILLYESCGWFTRLAHGGGNQSYEAASSNNNTENVDISGKIMTREPDGPLELVIENEEQTFGVGGQLTGSPWKVGFALANESVSEQIGNTNDGYRKCTMQKFHQFESFYGKLTAIAREYLLPPEIAKFGLITERSLLPSLDVVNEGNQDTWFVITHHMGCKTCSVIAKDGDDLRSIVQSHHNLGIKEVSADESSREAIFPRNRPSVVLFIDRLSHSSKVRDESKLVLKLLRQYVQNNYPFHVSNGVPSSSTSKARSKAVPSLRNTGISDAYSQTARLSAWASKLMALGDKMSVMVVNDGDSISYKSSSQGSGANPVYDVLTKLLDKARPGHKSKKTRISLVSRDVGLKMLSDHSEIKVVKSLSVEESEYKRTDDASATTANSNDDITEAFVDENTAKETEYINDGQVPSILEKSSATYPDEHDTAREFNDTEIEDKSISEASDMSVDLKEDAPNNADSSSEVGGMLHKHIMEKTVTEAFQILEHDERNLYTDQEESVSSNEQVDGSSFLSKKISKTEDAIYENTFGLSEGLEESDRRCPHHATCSSSCVPVRDDTDFTDQVTSSISDYRFAGAFYFSDGGYRLLRTLTGGSRIPSLVIIDPVEQKHYIFPEESEYSYASLQNYLDSFRNRSLPSYYRGTSSAISSKEFPRPPFVNHDFHEANSIPQLTAFSFCPLVFGPRGCDSKSEVSFSNTENIVSGWNKDVMVLFSNSWCGFCQRAELVVRELHRSFKSFSSYSDSVSRNAQDVHNEEKSEEYVMKGFPAIYMIDCTSNECHHLLKSAGRTLSGIVTLPCGEQKCNSI

SEQ ID NO: 182768 - protein, 743 aa, Zea Mays
MALGDKMSVMVVNDGDSISYKSSSQGSGANPVYDVLTKLLDKARPGHKSKKTRISLVSRDVGLKMLSDHSEIKVVKSLSVEESEYKRTDDASATTANSNDDITEAFVDENTAKETEYINDGQVPSILEKSSATYPDEHDTAREFNDTEIEDKSISEASDMSVDLKEDAPNNADSSSEVGGMLHKHIMEKTVTEAFQILEHDERNLYTDQEESVSSNEQVDGSSFLSKKISKTEDAIYENTFGLSEGLEESDRRCPHHATCSSSCVPVRDDTDFTDQVTSSISDYRFAGAFYFSDGGYRLLRTLTGGSRIPSLVIIDPVEQKHYIFPEESEYSYASLQNYLDSFRNRSLPSYYRGTSSAISSKEFPRPPFVNHDFHEANSIPQLTAFSFCPLVFGPRGCDSKSEVSFSNTENIVSGWNKDVMVLFSNSWCGFCQRAELVVRELHRSFKSFSSYSDSVSRNAQDVHNEEKSEEYVMKGFPAIYMIDCTSNECHHLLKSAGMEELYPALLLFPAENKSAIAYEGGMSVSHLIEFLESHVSNSRYLLEYKGFMWKKRMTPQHDAPQAIQFKVSDKGSGNVGSELPSHPGVVTGSILTATKKLGTAVPFDNAKVLIVSADSHEGFHGLIINKRLSWGVFKDLDSSMEPIKHAPLFYGGPVVVQGYHLVSLSRVSSEGYMQVIPGVYYGNIVATSRVVTRIKLGEQSVNGLWFFLGYSGWGYNQLFDELTEGAWLVSVKPIEHLDWPKS

SEQ ID NO: 182769 - protein, 636 aa, Zea Mays
MATLASAVSDVGVEEPSPAKAADPKEPAAAVEEPAAAAAELAGASIPSPVAAADAGDASSGPALATTPPASPATSAAPPPVSPAPLVSPAPPAEPGPPRSQFAGSLSYIAPGTPSPSAAFSYNVLPRAPPAPQVGGAAASLQPCSSPALMVAPIPASALQPPAPGQYFGNRPSFSYNVVSHANARLPTGQQFQPVTGANLAGPISRFVPPGSLQPPTPGHITRPSTAFPGSMAPNPPGSIQLPFSVPRPSNIPFGAIAQQGSSDINNLKSDSPRAPEVTPQAMQLSTGMPSKSPSTIASASGSPSIPIQTLTNSSVPPRPEVFGATRPSVPAQPSATVSNPTGFLGRPIVPPAAPLPQTPPPIATQGGTPQNSQRPFYPSYPSGPGIVPPQPLWPHPHPPQPTGFQQPPFQYYPAGPVGSLGRPITGASAATMAFANVQPPGVSTGGDRKVQASTNAGSEQSTHAAAEPDSTGHGGQVTEQLEDNRNTGVQDSDAWSAHKTETGVVYYYNALTGESTYQKPTGYKGELEKVATEPVPVSWDKLAGTNWSIVTTSDGKKYYYDNKQKVSSWQLPPEVCEILKNAESGSLKEGSTSLQDAATIENKGVISIDASTPAIQTGCWCFQCAFSSGYFICYL

SEQ ID NO: 182770 - protein, 221 aa, Zea Mays
MKHEERETIFNEYIVELKSAEQEAEQAAKAKVDEQAKLKERERETRKRKEREEQEMERVKMKIRRKEAVSSYQALLVEMIKDPKASWTESKPKLEKDPQGRARNPDLGQGDAEKLFRDHVKDLYERCVRDFRALLSEVITPEVAARTTAEGKTAINSWSEAKGHLRSDLRYNKLPSKDKESIWRRYADDLTRKLRQSDTKEKDKSDTDGKQPRSSDPPRRR

SEQ ID NO: 182771 - protein, 57 aa, Zea Mays
MLMLLLRYISVEQACIGLYGLWMRKLHEDSSYDVSSTSYLLVNSKFTTARSRLLGRK

SEQ ID NO: 182772 - protein, 167 aa, Zea Mays
MCHKHERLPVEYRCFIAVFLLVCPNVGKSALFNRIIASLRANQFCERLPSPNGESIVDCHQISKMPNLAFTIANKIFTLTPEQYIVKLEQAGQTICISGFMAFDVPPPRGPLCYAEHICTTLKCAMRASTEGITVPPLAPSTPVHVCVRPLRLPAMDASLPHVYNDN

SEQ ID NO: 182773 - protein, 60 aa, Zea Mays
MVTGMISISIGLVQFPNSYIPYLQAGEIETFFITSYLLKLHVVCSTRGFQCAFFPRSRVI

SEQ ID NO: 182774 - protein, 361 aa, Zea Mays
MFAQAWKLYESDNLMALLDESLDPEEYRPDEVKRIMEIALLCTQSAVAARPMMSEVVVLLLTRDDPEVQPTRPTFIDATSRVRGETSSSSSSSASKATISVSQFSASHRRCPSIPPLASPLPEQSGGDSRALLLGRRRRGVLPSLCLSSRTCDVAAVLGVSAASPWASVVARAARPARASPGGSRRRMERGHLSSDLRFLAGVVSAWALAVRLESGVLWPGGVCQQGCTASRVGSGGALVSFGGLAMRGDADRLTSPLQHRVGLGEAAWPSVVVSADTEILIFAISKKQTTGEQATKLVASRGRSRYMDAAGETPERESFWAGMGRALWIQAATVRGVLVPPPQLWSTPTPVTVRCSRKCA

SEQ ID NO: 182775 - protein, 412 aa, Zea Mays
MHHRMGRFLLLPALTLVVASAWVPITFADPQATLLNQGCSQYNATPASAFIAALNSTFASLRANLSAASSVGFATAAEPRAAAPAFAMAQCRPYVAGRDCVACFDAAAAGLRATCVAGRAANGGRAILDGCMLRYESAAFFDQSTLPGNTQLCNGSAVQAGGFADAARALVADFAAAVPRVPGLAAAAASGGVYAAAQCVETVGEAGCAQCLNVAVGNIDGCPPNSDGRAVDAGCFMRYSDRSFFPANSTTVDLAIYLRGYTAPEYAIHGQLSEKVDTYSFGVVVLEILSGRKSNDTRLEPETQYLLEWAWKLYESDNLMALLDESLDPEEYRPDEVKRIMEIALLCTQSAVAARPMMSEVVVLLLTRDDPEVQPTRPTFIDATSRVRGETSSSSSSSASKATISVSQFSAR

SEQ ID NO: 182776 - protein, 102 aa, Zea Mays
MYGTRRWTRLLGNLLCTLALVDGDPSTMSNMATEEARVEEDSFLKPLMCSYFSVNVLAPVKGRIRLTILHISIENKAFVQKDCKYRLRADQTSLTDGGYSIN

SEQ ID NO: 182777 - protein, 362 aa, Zea Mays
MKEAGEERCLDPQLWHACAGGMVQMPPVRSRVYYFPQGHAEHAHGGGGATDLAGARARPLPPLVLCTVAGVRFLADPETDEVFAKIRLVPAAPGEVEFGEPREFGIDPEDAREKLSSFAKTLTQSDANNGGGFSVPRYCAETIFPKLDYRADPPVQTVLAKDVHGEVWKFRHIFRGTPRRHLLTTGWSAFVNQKKLVAGDSIVFLRTEHGELCVGIRRAKRVSCGGMECISGWNAPVYGALSAFLKDEEGKITKGPGGYMRGRGKVEITDVVEAASLAASGQPFEVVYYPRASTPEFVVKAASVQNAMRNQWCPGMRFKMAFETEDSSRISWFMGTIASAQVADTIRWPNSPWRLLQTCCRM

SEQ ID NO: 182778 - protein, 337 aa, Zea Mays
MRNQWCPGMRFKMAFETEDSSRISWFMGTIASAQVADTIRWPNSPWRLLQVSWDEPDLLQNVKCVNPWLVEIVSSIPPIHLGTFSPPRKKLRVAQHPDFPFEGQLLNPIFHGNPLGPSNSPLRCFSDIAPAGIQGARHAQFGLPLTDYQLNQLHLGFNRLGAMTPTPRISKGFVISSAPASESVSCLLTIGTPQATEKSDDIKRPHIMLFGKPILTEQQMDSGGSREGLSQDRKASELGLEDGHCKVFMESEDVGRTIDLSVFGSYEELYGQLADMFGIEKAEIMRHLCYRDAAGAVRHTGEEPFNDFMKVARRLTIIEGTEGRPQKPLVEYMVERA

SEQ ID NO: 182779 - protein, 371 aa, Zea Mays
MKEAGEERCLDPQLWHACAGGMVQMPPVRSRVYYFPQGHAEHAHGGGGATDLAGARARPLPPLVLCTVAGVRFLADPETDEVFAKIRLVPAAPGEVEFGEPREFGIDPEDAREKLSSFAKTLTQSDANNGGGFSVPRYCAETIFPKLDYRADPPVQTVLAKDVHGEVWKFRHIFRGTPRRHLLTTGWSAFVNQKKLVAGDSIVFLRTEHGELCVGIRRAKRVSCGGMECISGWNAPVYGALSAFLKDEEGKITKGPGGYMRGRGKVEITDVVEAASLAASGQPFEVVYYPRASTPEFVVKAASVQNAMRNQWCPGMRFKMAFETEDSSRISWFMGTIASAQVADTIRWPNSPWRLLQVEFFWFTLEGAPER

SEQ ID NO: 182780 - protein, 188 aa, Zea Mays
MTPPLSSATSWWPGASTWCTAAAASGSWASSPRPSTTAAGTSSDKRRDGRGGAGGGRHAPEEGGDGAAVRRIHRPAWRVWDAGGAAGGHHVGAARHPPQAGRAAERGRLLQLAADLHRQGRGGGLHQPQRPPHHRPRAHRAGAHGQARGVRALPRHGGVHAQLGDGQPAGVLTIDTTTAHARARQRAS

SEQ ID NO: 182781 - protein, 114 aa, Zea Mays
MHQRKAEMARQSDAFIALPGGYGTLEELLEVITWAQLGIHHKPVGLLNVDGYYNSLLTFIDKAVEEGFINPSARRIIVLAPTAQELMDKLEEYEPYHDMVASTLNWEMGNLQGY

SEQ ID NO: 182782 - protein, 191 aa, Zea Mays
MTMRQSRFKRICVFCGSSQGKKRSYHDAAIELGNELGHSQDAHDTRDKRRDGRGGAGGGRHAPEEGGDGAAVRRIHRPAWRVWDAGGAAGGHHVGAARHPPQAGRAAERGRLLQLAADLHRQGRGGGLHQPQRPPHHRPRAHRAGAHGQARGVRALPRHGGVHAQLGDGQPAGVLTIDTTTAHARARQRAS

SEQ ID NO: 182783 - protein, 103 aa, Zea Mays
MFRCSLLAHWTPKGECLDMDVPPFNLQFQIHSRHIYQEPCAVCAWLWLYHAMWQPIARYTTAKVSATRCCMTGASAVDHTRKAASPCVCLLLCTNGRLMSNQH

SEQ ID NO: 182784 - protein, 204 aa, Zea Mays
MIGFVGHAACLGHNEPPSCLALHASPEASRQATFPTSTMGPPCCSCGVRLRALRASDAVLGPSNKVGRVGTTLTMLLSRPMSRQGPPSALVPLGRDRFSIGEHGMGDLDIFSFQMLLKSRKLIQLFSLRLIMVTCVYAKYMSMIYYLVLLIKFYEEFSKAMMQKFEMSMMGELTYFLDFQVNSLNKASSSPKRSIHKASLRSSG

SEQ ID NO: 182785 - protein, 170 aa, Zea Mays
MVSQPGAERAATTGLAAATARLSRPTEGTGFSEATDDSGTTATGNSGTGRCTPHDFAMHSAPSPIVAEVGPAANLLAPEEDQTICVDRRWQLLGFVRDEDVWGRTAWVGRYAQGVMALLLSTTWVEDWIKHFVRLLRWMRAIRREKGAQLRGSHTVACCGQQEKKRRAFF

SEQ ID NO: 182786 - protein, 280 aa, Zea Mays
MTEDGYPVKLHVYDLSQGMARQLPATIVGREAIEAIWHTGVVVYGREYYFGGGIQEGQPGRTPYGTPVRVEDLGVTHVPREVFEEFLREIGPRYYTLATYKLLNHNCNSFSNEAAQFLAGSAIPSYILELPNQGLEASLGAGAVPQPPQFRPVLAPLGAATVALPLTDDVEPGSAAADEPEAAKIAGASDGTPVPLSVQPAAAPAAAAAQASAVPTVSSMLVPPDPHAEAKSRVQEEIKREFADIMAAGTARAGEAAALATRRVMERHGAGSKEQSLTID

SEQ ID NO: 182787 - protein, 184 aa, Zea Mays
MTCMHRCTQDGYPVKLHVYDLSQGMARQLPATIVGREAIEAIWHTGVVVYGREYYFGGGIQEGQPGRTPYGTPVRVEDLGVTHVPREVFEEFLREIGPRYYTLATYKLLNHNCNSFSNEAAQFLAGSAIPSYILELPNQVMNSPVGALIRAGGELGSWGCAAAAAIQAGSCPSWRRHRGSAADG

SEQ ID NO: 182788 - protein, 203 aa, Zea Mays
MAKRRSTFGLARFGCCGSQQAREEKMTEDGYPVKLHVYDLSQGMARQLPATIVGREAIEAIWHTGVVVYGREYYFGGGIQEGQPGRTPYGTPVRVEDLGVTHVPREVFEEFLREIGPRYYTLATYKLLNHNCNSFSNEAAQFLAGSAIPSYILELPNQVMNSPVGALIRAGGELGSWGCAAAAAIQAGSCPSWRRHRGSAADG

SEQ ID NO: 182789 - protein, 160 aa, Zea Mays
MAKRRSTFGLARFGCCGSQQAREEKMTEDGYPVKLHVYDLSQGMARQLPATIVGREAIEAIWHTGVVVYGREYYFGGGIQEGQPGRTPYGTPVRVEDLGVTHVPREVFEEFLREIGPRYYTLATYKLLNHNCNSFSNEAAQFLAGSAIPSYILELPNQCR

SEQ ID NO: 182790 - protein, 305 aa, Zea Mays
MAKRRSTFGLARFGCCGSQQAREEKMTEDGYPVKLHVYDLSQGMARQLPATIVGREAIEAIWHTGVVVYGREYYFGGGIQEGQPGRTPYGTPVRVEDLGVTHVPREVFEEFLREIGPRYYTLATYKLLNHNCNSFSNEAAQFLAGSAIPSYILELPNQGLEASLGAGAVPQPPQFRPVLAPLGAATVALPLTDDVEPGSAAADEPEAAKIAGASDGTPVPLSVQPAAAPAAAAAQASAVPTVSSMLVPPDPHAEAKSRVQEEIKREFADIMAAGTARAGEAAALATRRVMERHGAGSKEQSLTID

SEQ ID NO: 182791 - protein, 320 aa, Zea Mays
MRFVPLPCTPPWFGCCGSQQAREEKMTEDGYPVKLHVYDLSQGMARQLPATIVGREAIEAIWHTGVVVYGREYYFGGGIQEGQPGRTPYGTPVRVEDLGVTHVPREVFEEFLREIGPRYYTLATYKLLNHNCNSFSNEAAQFLAGSAIPSYILELPNQVMNSPVGALILPMIQGLEASLGAGAVPQPPQFRPVLAPLGAATVALPLTDDVEPGSAAADEPEAAKIAGASDGTPVPLSVQPAAAPAAAAAQASAVPTVSSMLVPPDPHAEAKSRVQEEIKREFADIMAAGTARAGEAAALATRRVMERHGAGSKEQSLTID

SEQ ID NO: 182792 - protein, 89 aa, Zea Mays
MSWNTRETTPCSLINSEMISTPGSTTRSSHSSHRRVKAPPVHAIPSSTEMNEYFAAEQRRQQQAFIDKYNFDPVNDCPLPGRFEWVKLD

SEQ ID NO: 182793 - protein, 189 aa, Zea Mays
MGKYMRKVKVSSEVAIMDVAAAPLGVRTRARALALQRLEKQQVQQEEGCGGEYLELRSRRLEKLPPQVASVRRCGGRKVAATAPAAMEEAEASYGENMLESEAMGRETTPCSLINSEMISTPGSTTRSSHSSHRRVKAPPVHAIPSSTEMNEYFAAEQRRQQQAFIDKYNFDPVNDCPLPGRFEWVKLD

SEQ ID NO: 182794 - protein, 152 aa, Zea Mays
MAARGLQEPPSRERGATSESACTARTPGWSAVRGGRRMCRVARCLLRRCGEGVGSAFPIGHWPLDRSMVRVPAINVRHVRTAEAEAPAAEPLPGCCTRECREDRGCGQRRKIKKLMGTDTRHFYIGTRSTWCLGKIMQPVKRQRPQLMVREI

SEQ ID NO: 182795 - protein, 59 aa, Zea Mays
MCIRGLSENSWGRKWSVIKYLAWRRIMNQVYSLRNLSICKSDNVFLFAMWIALVPCLYA

SEQ ID NO: 182796 - protein, 365 aa, Zea Mays
MDLSNNSFSGKIPEAPPSHNCSLASLHLAGNSFTGEFPTVVGGCQELATVDIGNNRFYGDIPRWIGTFVPALKILRLSSNNFSGQIPPELSQLSQLQLLDLAHNGLTGLIPRELGDLASMKHPKINSSTGSLDGSIYQDRIDIIWKGQDFTFQRILELMTGIDLSGNSLSHCIPDELTNLQGLRFLNLSRNRLSCGIPSSIGSLNVLESLDLSMNELSGAIPPGLSNMLSLNNLNLSSNNLSGTIPTGSQLQTLTDPSIYSNNPGLCGPPLNPCQDTSRVHEGDVGGYRDGDPWLYYCVIAGVVSGFWLWYGMLFSVARLRCSVFFFADRVQYRVMQKMRPFNHFVSKEKSDPSSVPMFSTSDTS

SEQ ID NO: 182797 - protein, 153 aa, Zea Mays
MGSLGRRWKDPVTLAPIMYDQIFRPSKLSGNADFHLFKAGVEPKWEDPECANGGKWTVPCNRKATFETMWLETLMALIGEQFDETEDICGIVASVRARGDKLALWTRTASNEAVQVNIGKKWKDVIDYNDKITYTFHDDSKRDKPSRGGRYTV

SEQ ID NO: 182798 - protein, 99 aa, Zea Mays
MAEVEAPATAVEAPAAAVATTTPEVAAPEAGAATEAKGPHKLHRQWTFWYDIQTKTKSGAAWGTSLKKAYTFDTVEEFWRFFVQASCLGMLIFIYSRLE

SEQ ID NO: 182799 - protein, 379 aa, Zea Mays
MFTVPSEDVSTSSVTTPPAPCGGHGDNASSLDAAASAFSPMPFLDSTLSALLEEEDAPVLDTELLAIDDYRFAATAVAGDEPRPEQQRFAQVPMVLPVAEHPSSLQTQMSSTAFELLHAASSSSGYTDNDCFAAAMDEGGGGYVGLDEALCQQQQHQLLQPGALLSAGMMETAAQGCYFVNGGPTAQGVLFGASGSGVVMPMTAGLEEIGEYQRMMESASAALAATHSPDADSVAAAQQMAFSGNGGEMQMGGGSMSPGRLPAATEAASSLEDTDFKSARITVEERREKIHRYIKKRNERNFSKKIKYACRKTLADSRPRVRGRFAKNDDYGEPSSRVAHNHDEYDHMAAMKAQDILDPDALQAAMNSYMYNHTVESWM

SEQ ID NO: 182800 - protein, 239 aa, Zea Mays
MNAMDLRRGISMAVDAVVTNLKGMARMISTSEEIAQVGTISANGEREIGELIAKAMEKVGKEGVITIADGNTLYNELEVVEGMKLDRGYISPYFITNSKTQKCELEDPLILIHDKKVTNMHAVVKVLEMALKKQKPLLIVAEDVESEALGTLIINKLRAGIKVCAVKAPGFGENRKANLQDLAILTGGEVITEELGMNLENFEPHMLGTCKKVTVSKVAPVILDGAGDKKSMKRDESLE

SEQ ID NO: 182801 - protein, 406 aa, Zea Mays
MVPTTTGADGDGERRVTASAVGGGDGGAAKSTSMGADVDDPASTTGTGGDGDAVGSPHSTTGSGTTAVHPWRTQKCMFCTCTRRSGMTCTGGSAASSPTANASNMASSTMCRTSRIWRMRMETITFTKCFVTRTSFTYMSPSDVAGNHHDPRRRRCLPVQERTEQAAGDTYDAMTARSHQADPSRFFPIPIPLYPSPHTQSTDSLGVGHSHRPRRPQPTSPPGDRMAERERKRKRAAEEWERRKRGRKREKERQVGWTSDPVEALGEDVMGRVMEFLDARSVARCTAVSCAWRGVAADNRLWAPMCTELMAGKAHIPRLTSIRTGSKLSTYSMVIMDGKRSRITKEDLCDHAWEYRFTIHLITGGTLIHHGSTLVHLCDATSTPMATTVQTLMTPCGVAMSAPTRS

SEQ ID NO: 182802 - protein, 184 aa, Zea Mays
MNNQHLCNRPITVSYAYKKDTKGERHGTPAERLLAANNPGSQKNRPHTMFASGPPTQGHPNGGPPVPRPYGNGTIPGQIQHIRQPPPPPVGQFPPPMQMHGQPTWPAQHSMPPPMPSQLQYRLPMRPPPPNMMPPPVGMVRPPPPPTGMSAPPMWMPPPPPPHQGGGMPPPPMSMPPPPPPPSS

SEQ ID NO: 182803 - protein, 306 aa, Zea Mays
MNVYVPKDRVTNLHQGYGFVEFRSEEDADYAIKTLNMIKLYGKPIRVNKASQDKKSLDVGANLFIGNLDPDVDEKLLYDTFSAFGVIVTNPKIMRDPETGNSRGFGFVSYESFESSDQAIEAMNNQHLCNRPITVSYAYKKDTKGERHGTPAERLLAANNPGSQKNRPHTMFASGPPTQGHPNGGPPVPRPYGNGTIPGQIQHIRQPPPPPVGQFPPPMQMHGQPTWPAQHSMPPPMPSQLQYRLPMRPPPPNMMPPPVGMVRPPPPPTGMSAPPMWMPPPPPPHQGGGMPPPPMSMPPPPPPPSS

SEQ ID NO: 182804 - protein, 825 aa, Zea Mays
MKNGCWVKTLIGRRSPLNAILFNSEWENASAISILPFIDTAFYGVDITDFRSELRLFGVVVDFKRNYQLVVDNFRFSIDTITPGATILMLNCIRYVEECHDFVERLKDLRWVKTNVGFRAPHETFLIDDDWKCLLEVIDKTPLLDLEFYGDEIKLYKEELCKTGIIAGFKEASKKIVCHVKKLVNTSITKELAFALLKCYSDLTTRHGRLPVALANFMQHERWLHTTFGFRSPKEAILFSSEWESIALVSCLPFVDDSDAQYGLGKEIYCYSNELKALGAKTRLEQGAAFVISGLRIPTDPSAVTPQAVISLLKCIRIWRQNGSDLPKSFMSAINLKWVKTTAGYRHPNGCVLFGSVCSSHVYRDDGPFVDEVFYGQELVSYESELQKIGVNVDPRAGCACALMAQHLKGLSNADAISRIYSYLEVYRWKPRFTSDDWIWIPHAANQGQWVNPASCVLYDTHGLFGSQLYVLVKWYSSKLLRYFNTAFGVKHRPTVSDYCKLWSMWQGSNSTLTQKECVAFWEFFGKNWSTDMGKFIAGCVDKVPVSSGDQILLLEKQDVFIPDDLLLEDLFKKQAQKPLFVWYPSTSLPCLSPARLNDIYSSIGVQKISKSVVSNQYDHLEIESVTLVHKGTVIKLGLLKIVLAFLTDPILDISVEKRYEMVTSLTNVAVYETRGPLNVSYQVGLSSGRSLHVTCARFFRWERESSRLFVTEADEPGSMTYAMKMEYASCFAEEISKGLLSENKEQIPALAELVRTGFLLEFDVPAVQILLNLKNLRLFEQDEQFLLKLSQHCDDGLGGPSPSYINIIVCYLRVLWDFAKRSTY

SEQ ID NO: 182805 - protein, 1398 aa, Zea Mays
MASSSSAARAHVERIRRERFYIGREERNPLAEDIHQAVSYLSEELYSKDVHFLMELIQNAEDNEYPLDVSPALEFVITEKDITGTGADSTLVVFNNERGFSAANIESICRIGRSTKKGNRHLGYIGEKVSSQPHIFSNGYQIKFSEKPSAVCDIGYIVPEWVDGKPNIDDIRTVYGPSRSLPTTVIILPLKTDKILAVKKELSSTHPEILLFLSKIRQLSVKEMNNDPKASKISQISISSEVDYWSSKDIDAESYTLHLAMQENSKGETEECTYYMWRQKFAVQPDCRIQKRMEVDQWVVTLAFPHGQRLSRGAKSPGVYAFLPTEMVTNLPFIIQADFLLASSRESILFDSQWNRGILECVPSAFINAFGALLKSSRDAPHFALPPIFRFLPIQESSISLFDSIRLSIKTKVQAEDIMPCEPCTAQKVFCKPAEVSRLDSAFCRILNLAQKQGIGLQNLSSYGTFVLSSYLDNLEYDDVLEFLGVGYANREWYSKCIDGLNLVKEASEEVYLQILYFVAGNWKVFSGTSMMLISLIKYVDASGQLSCSSVLAAQRSLRFLNENNKTPHVIEQMKNGCWVKTLIGRRSPLNAILFNSEWENASAISILPFIDTAFYGVDITDFRSELRLFGVVVDFKRNYQLVVDNFRFSIDTITPGATILMLNCIRYVEECHDFVERLKDLRWVKTNVGFRAPHETFLIDDDWKCLLEVIDKTPLLDLEFYGDEIKLYKEELCKTGIIAGFKEASKKIVCHVKKLVNTSITKELAFALLKCYSDLTTRHGRLPVALANFMQHERWLHTTFGFRSPKEAILFSSEWESIALVSCLPFVDDSDAQYGLGKEIYCYSNELKALGAKTRLEQGAAFVISGLRIPTDPSAVTPQAVISLLKCIRIWRQNGSDLPKSFMSAINLKWVKTTAGYRHPNGCVLFGSVCSSHVYRDDGPFVDEVFYGQELVSYESELQKIGVNVDPRAGCACALMAQHLKGLSNADAISRIYSYLEVYRWKPRFTSDDWIWIPHAANQGQWVNPASCVLYDTHGLFGSQLYVLVKWYSSKLLRYFNTAFGVKHRPTVSDYCKLWSMWQGSNSTLTQKECVAFWEFFGKNWSTDMGKFIAGCVDKVPVSSGDQILLLEKQDVFIPDDLLLEDLFKKQAQKPLFVWYPSTSLPCLSPARLNDIYSSIGVQKISKSVVSNQYDHLEIESVTLVHKGTVIKLGLLKIVLAFLTDPILDISVEKRYEMVTSLTNVAVYETRGPLNVSYQVGLSSGRSLHVTCARFFRWERESSRLFVTEADEPGSMTYAMKMEYASCFAEEISKGLLSENKEQIPALAELVRTGFLLEFDVPAVQILLNLKNLRLFEQDEQFLLKLSQHCDDGLGGPSPSYINIIVCYLRVLWDFAKRSTY

SEQ ID NO: 182806 - protein, 814 aa, Zea Mays
MKNGCWVKTLIGRRSPLNAILFNSEWENASAISILPFIDTAFYGVDITDFRSELRLFGVVVDFKRNYQLVVDNFRFSIDTITPGATILMLNCIRYVEECHDFVERLKDLRWVKTNVGFRAPHETFLIDDDWKCLLEVIDKTPLLDLEFYGDEIKLYKEELCKTGIIAGFKEASKKIVCHVKKLVNTSITKELAFALLKCYSDLTTRHGRLPVALANFMQHERWLHTTFGFRSPKEAILFSSEWESIALVSCLPFVDDSDAQYGLGKEIYCYSNELKALGAKTRLEQGAAFVISGLRIPTDPSAVTPQAVISLLKCIRIWRQNGSDLPKSFMSAINLKWVKTTAGYRHPNGCVLFGSVCSSHVYRDDGPFVDEVFYGQELVSYESELQKIGVNVDPRAGCACALMAQHLKGLSNADAISRIYSYLEVYRWKPRFTSDDWIWIPHAANQGQWVNPASCVLYDTHGLFGSQLYVLVKWYSSKLLRYFNTAFGVKHRPTVSDYCKLWSMWQGSNSTLTQKECVAFWEFFGKNWSTDMGKFIAGCVDKVPVSSGDQILLLEKQDVFIPDDLLLEDLFKKQAQKPLFVWYPSTSLPCLSPARLNDIYSSIGVQKISKSVVSNQYDHLEIESVTLVHKGTVIKLGLLKIVLAFLTDPILDISVEKRYEMVTSLTNVAVYETRGPLNVSYQVGLSSGRSLHVTCARFFRWERESSRLFVTEADEPGSMTYAMKMEYASCFAEEISKGLLSENKEQIPALAELVRTGFLLEFDVPAVQILLNLKNLRLFEQDEQFLLKLSQHCDDGLGGPSPSYINIIVCYLR

SEQ ID NO: 182807 - protein, 90 aa, Zea Mays
MSSPSKRREMDLMKLMMSDYKVEMVNDGMQEFFVEFKGPAESIYQGGVWKVRVELPDAYPYKSPSIGFINKIYHPNVDEICCCTQILLIH

SEQ ID NO: 182808 - protein, 345 aa, Zea Mays
MISRGKAHLNSTDSDMDLSIFYAKEGTWCFGVKHPSDTANSQTYMSISLQGCHRNCNQKGVCHSSVDESGLTFYSFCTCDRDHGGFDCSDELVSPNGHIWQSVFLIASNGAAILPAFWALRQKAFAEWILYTSSGISSALYHSCDVGTWCILSFRVLQFLDFWLSFMAVVGTFIYMATIDEVSKRAMHTAVFILTALLAATGATRSANIGIVIAIGSVGLLMGWLLEFSTARRFICWPSRINLNMPQSWPSLRTLFQITLEMVNKRFRWIFLLLGFMTLSFAAISWKLESNNNYWIWHSIWHITIYTSSFFFLCSMRVSTRNSSPESNYELTRQDSMPRSEPRET

SEQ ID NO: 182809 - protein, 459 aa, Zea Mays
MISRGKAHLVSTRITVRGCATSAFWGPYCNQTVDMIGCSQPSIDNNSRNLLDLKAERRNSLYTREHNRRINILSRPNGLVEQEVASNATTLVRMENSISCSISNDSICIRQGDMKFYFLDVVNLALQFKITATNFGALGPSLICYLRHNAFPQRDLHDYSGDISHDPLVVKLPNIGRWYIAIETVNKTQTNVTASTPVLDTTCFSLKWQLTGCLNGKTGTNCSWEAYGLHRVPKRSPSVPFESYYVPTDGTASLEDSHFYLEQFLSNSSHEQFAWTYFFLDVPQGSAGALIHVQLKSDKDLNYELYSKYGGLPSNDTWDYYASRTSSSNGSVFFSLQNSTDSDMDLSIFYAKEGTWCFGVKHPSDTANSQTYMSISLQGCHRNCNQKGVCHSSVDESGLTFYSFCTCDRDHGGFDCSDELVSPNGHIWQSVFLIASNGAAILPAFWALRQKVSYLAPTC

SEQ ID NO: 182810 - protein, 628 aa, Zea Mays
MDFAADIDLQRERLKGIPRNKLAIICLMNSNPPIPDISDSYLDNLLSNSLPDGPFGNSNIINQPNLVQCIPFQKNTTLVLTNDQVSPGVWYIGYFHGLGPARTQSKMISRGKAHLVSTRITVRGCATSAFWGPYCNQTVDMIGCSQPSIDNNSRNLLDLKAERRNSLYTREHNRRINILSRPNGLVEQEVASNATTLVRMENSISCSISNDSICIRQGDMKFYFLDVVNLALQFKITATNFGALGPSLICYLRHNAFPQRDLHDYSGDISHDPLVVKLPNIGRWYIAIETVNKTQTNVTASTPVLDTTCFSLKWQLTGCLNGKTGTNCSWEAYGLHRVPKRSPSVPFESYYVPTDGTASLEDSHFYLEQFLSNSSHEQFAWTYFFLDVPQGSAGALIHVQLKSDKDLNYELYSKYGGLPSNDTWDYYASRTSSSNGSVFFSLQNSTDSDMDLSIFYAKEGTWCFGVKHPSDTANSQTYMSISLQGCHRNCNQKGVCHSSVDESGLTFYSFCTCDRDHGGFDCSDELVSPNGHIWQSVFLIASNGAAILPAFWALRQKNGFFTHLVEFPVHYTIHVMLALGAFCLFVYCSFWTSGFPSWLSWVRSYIWLQLMKFQREQCILLYLSSLLF

SEQ ID NO: 182811 - protein, 673 aa, Zea Mays
MISRGKAHLVSTRITVRGCATSAFWGPYCNQTVDMIGCSQPSIDNNSRNLLDLKAERRNSLYTREHNRRINILSRPNGLVEQEVASNATTLVRMENSISCSISNDSICIRQGDMKFYFLDVVNLALQFKITATNFGALGPSLICYLRHNAFPQRDLHDYSGDISHDPLVVKLPNIGRWYIAIETVNKTQTNVTASTPVLDTTCFSLKWQLTGCLNGKTGTNCSWEAYGLHRVPKRSPSVPFESYYVPTDGTASLEDSHFYLEQFLSNSSHEQFAWTYFFLDVPQGSAGALIHVQLKSDKDLNYELYSKYGGLPSNDTWDYYASRTSSSNGSVFFSLQNSTDSDMDLSIFYAKEGTWCFGVKHPSDTANSQTYMSISLQGCHRNCNQKGVCHSSVDESGLTFYSFCTCDRDHGGFDCSDELVSPNGHIWQSVFLIASNGAAILPAFWALRQKAFAEWILYTSSGISSALYHSCDVGTWCILSFRVLQFLDFWLSFMAVVGTFIYMATIDEVSKRAMHTAVFILTALLAATGATRSANIGIVIAIGSVGLLMGWLLEFSTARRFICWPSRINLNMPQSWPSLRTLFQITLEMVNKRFRWIFLLLGFMTLSFAAISWKLESNNNYWIWHSIWHITIYTSSFFFLCSMRVSTRNSSPESNYELTRQDSMPRSEPRET

SEQ ID NO: 182812 - protein, 483 aa, Zea Mays
MISRGKAHLVSTRITVRGCATSAFWGPYCNQTVDMIGCSQPSIDNNSRNLLDLKAERRNSLYTREHNRRINILSRPNGLVEQEVASNATTLVRMENSISCSISNDSICIRQGDMKFYFLDVVNLALQFKITATNFGALGPSLICYLRHNAFPQRDLHDYSGDISHDPLVVKLPNIGRWYIAIETVNKTQTNVTASTPVLDTTCFSLKWQLTGCLNGKTGTNCSWEAYGLHRVPKRSPSVPFESYYVPTDGTASLEDSHFYLEQFLSNSSHEQFAWTYFFLDVPQGSAGALIHVQLKSDKDLNYELYSKYGGLPSNDTWDYYASRTSSSNGSVFFSLQNSTDSDMDLSIFYAKEGTWCFGVKHPSDTANSQTYMSISLQGCHRNCNQKGVCHSSVDESGLTFYSFCTCDRDHGGFDCSDELVSPNGHIWQSVFLIASNGAAILPAFWALRQKNGFFTHLVEFPVHYTIHVMLALGAFCLFVYCR

SEQ ID NO: 182813 - protein, 298 aa, Zea Mays
MISRGKAHLVSTRITVRGCATSAFWGPYCNQTVDMIGCSQPSIDNNSRNLLDLKAERRNSLYTREHNRRINILSRPNGLVEQEVASNATTLVRMENSISCSISNDSICIRQGDMKFYFLDVVNLALQFKITATNFGALGPSLICYLRHNAFPQRDLHDYSGDISHDPLVVKLPNIGRWYIAIETVNKTQTNVTASTPVLDTTCFSLKWQLTGCLNGKTGTNCSWEAYGLHRVPKRSPSVPFESYYVPTDGTASLEDSHFYLEQFLSNSSHEQFAWTYFFLDVPQEFHGFGHGSIDFLC

SEQ ID NO: 182814 - protein, 330 aa, Zea Mays
MISRGKAHLVSTRITVRGCATSAFWGPYCNQTVDMIGCSQPSIDNNSRNLLDLKAERRNSLYTREHNRRINILSRPNGLVEQEVASNATTLVRMENSISCSISNDSICIRQGDMKFYFLDVVNLALQFKITATNFGALGPSLICYLRHNAFPQRDLHDYSGDISHDPLVVKLPNIGRWYIAIETVNKTQTNVTASTPVLDTTCFSLKWQLTGCLNGKTGTNCSWEAYGLHRVPKRSPSVPFESYYVPTDGTASLEDSHFYLEQFLSNSSHEQFAWTYFFLDVPQGSAGALIHVQLKSDKDLNYELYSKYGGLPSNDTWDYYASRTSSRMP

SEQ ID NO: 182815 - protein, 651 aa, Zea Mays
MGAGLAPGPRGCAAQGEAVVVSSYGQGRLSLKPYDWTYLRVELPPSFSSVTMDFAADIDLQRERLKGIPRNKLAIICLMNSNPPIPDISDSYLDNLLSNSLPDGPFGNSNIINQPNLVQCIPFQKNTTLVLTNDQVSPGVWYIGYFHGLGPARTQSKMISRGKAHLVSTRITVRGCATSAFWGPYCNQTVDMIGCSQPSIDNNSRNLLDLKAERRNSLYTREHNRRINILSRPNGLVEQEVASNATTLVRMENSISCSISNDSICIRQGDMKFYFLDVVNLALQFKITATNFGALGPSLICYLRHNAFPQRDLHDYSGDISHDPLVVKLPNIGRWYIAIETVNKTQTNVTASTPVLDTTCFSLKWQLTGCLNGKTGTNCSWEAYGLHRVPKRSPSVPFESYYVPTDGTASLEDSHFYLEQFLSNSSHEQFAWTYFFLDVPQGSAGALIHVQLKSDKDLNYELYSKYGGLPSNDTWDYYASRTSSSNGSVFFSLQNSTDSDMDLSIFYAKEGTWCFGVKHPSDTANSQTYMSISLQGCHRNCNQKGVCHSSVDESGLTFYSFCTCDRDHGGFDCSDELVSPNGHIWQSVFLIASNGAAILPAFWALRQKAFAEWILYTSSGISSALYHSCDVGTWCILSFRVLQVSYLAPTC

SEQ ID NO: 182816 - protein, 658 aa, Zea Mays
MAAARRQAAVLVLVLALVMGAGLAPGPRGCAAQGEAVVVSSYGQGRLSLKPYDWTYLRVELPPSFSSVTMDFAADIDLQRERLKGIPRNKLAIICLMNSNPPIPDISDSYLDNLLSNSLPDGPFGNSNIINQPNLVQCIPFQKNTTLVLTNDQVSPGVWYIGYFHGLGPARTQSKMISRGKAHLVSTRITVRGCATSAFWGPYCNQTVDMIGCSQPSIDNNSRNLLDLKAERRNSLYTREHNRRINILSRPNGLVEQEVASNATTLVRMENSISCSISNDSICIRQGDMKFYFLDVVNLALQFKITATNFGALGPSLICYLRHNAFPQRDLHDYSGDISHDPLVVKLPNIGRWYIAIETVNKTQTNVTASTPVLDTTCFSLKWQLTGCLNGKTGTNCSWEAYGLHRVPKRSPSVPFESYYVPTDGTASLEDSHFYLEQFLSNSSHEQFAWTYFFLDVPQGSAGALIHVQLKSDKDLNYELYSKYGGLPSNDTWDYYASRTSSSNGSVFFSLQNSTDSDMDLSIFYAKEGTWCFGVKHPSDTANSQTYMSISLQGCHRNCNQKGVCHSSVDESGLTFYSFCTCDRDHGGFDCSDELVSPNGHIWQSVFLIASNGAAILPAFWALRQKNGFFTHLVEFPVHYTIHVMLALGAFCLFVYCR

SEQ ID NO: 182817 - protein, 434 aa, Zea Mays
MISRGKAHLVSTRITVRGCATSAFWGPYCNQTVDMIGCSQPSIDNNSRNLLDLKAERRNSLYTREHNRRINILSRPNGLVEQEVASNATTLVRMENSISCSISNDSICIRQGDMKFYFLDVVNLALQFKITATNFGALGPSLICYLRHNAFPQRDLHDYSGDISHDPLVVKLPNIGRWYIAIETVNKTQTNVTASTPVLDTTCFSLKWQLTGCLNGKTGTNCSWEAYGLHRVPKRSPSVPFESYYVPTDGTASLEDSHFYLEQFLSNSSHEQFAWTYFFLDVPQGSAGALIHVQLKSDKDLNYELYSKYGGLPSNDTWDYYASRTSSSNGSVFFSLQNSTDSDMDLSIFYAKEGTWCFGVKHPSDTANSQTYMSISLQGCHRNCNQKGVCHSSVDESGLTFYSFCTCDRDHGGFDCSDELVSPNGICRMDSLHI

SEQ ID NO: 182818 - protein, 404 aa, Zea Mays
MISRGKAHLVSTRITVRGCATSAFWGPYCNQTVDMIGCSQPSIDNNSRNLLDLKAERRNSLYTREHNRRINILSRPNGLVEQEVASNATTLVRMENSISCSISNDSICIRQGDMKFYFLDVVNLALQFKITATNFGALGPSLICYLRHNAFPQRDLHDYSGDISHDPLVVKLPNIGRWYIAIETVNKTQTNVTASTPVLDTTCFSLKWQLTGCLNGKTGTNCSWEAYGLHRVPKRSPSVPFESYYVPTDGTASLEDSHFYLEQFLSNSSHEQFAWTYFFLDVPQGSAGALIHVQLKSDKDLNYELYSKYGGLPSNDTWDYYASRTSSSNGSVFFSLQNSTDSDMDLSIFYAKEGTWCFGVKHPSDTANSQTYMSISLQGCHRNCNQKASAHVIAIMVALIAAMS

SEQ ID NO: 182819 - protein, 254 aa, Zea Mays
MISRGKAHLVSTRITVRGCATSAFWGPYCNQTVDMIGCSQPSIDNNSRNLLDLKAERRNSLYTREHNRRINILSRPNGLVEQEVASNATTLVRMENSISCSISNDSICIRQGDMKFYFLDVVNLALQFKITATNFGALGPSLICYLRHNAFPQRDLHDYSGDISHDPLVVKLPNIGRWYIAIETVNKTQTNVTASTPVLDTTCFSLKWQLTGCLNGKTGTNCSWEAYGLHWKTAVRRQEQDPKAIFQNRRCMSM

SEQ ID NO: 182820 - protein, 308 aa, Zea Mays
MRIRRRTSHVLGSGYSTPATPPPMLVTPPPISEPCLEPLTSHIHDDFLSPTTTRESLCKLSRSPWDLLDDLSLSDPQEVDDLLDGYYVNMDSHAWSLSSATMPVTSVKNEKTTTMAAASSERAQLQILNKNTTLKKATVGEKRVREIQNQKTANVKKKEGKEEAARTWQCKKNDGKGWNCRHNASHPNSLCEYHLMKKRSYLNLQHASPAEEDKAMAAAPTSAASKPSSSSNTQKTKLPNNYDANEGFYYYHGFRPSRGKRRCRNHPKNDEEVKVEPSKSASLPSHAKVELLFLVIMLLTAGILSSFV

SEQ ID NO: 182821 - protein, 214 aa, Zea Mays
MVRPPSMVDMAGSCISAQQLRHGHEIDNRGVRDEHTVMILQLLEGPQDETNLDDWLSGDLHPSPLLETNAHYQPRCRKSGRRGARRRRTSPWDPMFFERPVSREYSTAKGRKNNSRWTSKEVERLARGVSRFGVGQWTLLKQEFFKSSIRTAVNLKDKWRNLLKGYQLLQLKACRYYSPESKKNAVRSFSKIRNGGAKLPTGQGQFGKESSSRM

SEQ ID NO: 182822 - protein, 218 aa, Zea Mays
MEPAPTEQDYGFLGDLQLSTTIDSPHILQIDNRGVRDEHTVMILQLLEGPQDETNLDDWLSGDLHPSPLLETNAHYQPRCRKSGRRGARRRRTSPWDPMFFERPVSREYSTAKGRKNNSRWTSKEVERLARGVSRFGVGQWTLLKQEFFKSSIRTAVNLKDKWRNLLKGYQLLQLKACRYYSPESKKNAVRSFSKIRNGGAKLPTGQGQFGKESSSRM

SEQ ID NO: 182823 - protein, 56 aa, Zea Mays
MLRQPSRCLRRLPGLRHRMLNLRNDFLRKKFDGMKYDLRRVEEVYYDVKIRGLVPA

SEQ ID NO: 182824 - protein, 205 aa, Zea Mays
MRPAAAAATATTAALRLRAASLSPSLAASLSPSLAALLSHRRSSLILPPLRRICSLAPPHSSAAPNSQPPPQLLSPIMDAQFVLFRAQLDESSTLRDRIRAVVAEIESASRVATAALLLVHQPVPLADVLVKAKAQVEVIKGLYARLAEVLKECPGQYYRYHADWRTETHMVVSMLAFMHWLETGGLLMHAEAQEKLGVLWGVWP

SEQ ID NO: 182825 - protein, 530 aa, Zea Mays
MASQGEPSASASDPKEKKDFSTAILERKKSPNRLVVDEATNDDNSVVALHPDTMERLQLFRGDTVLLKGKKRKDTICIVLADETCEEPKVRMNKVVRQNLRVRLGDVVSVHQCQDVKYGKRVHILPIDDTVEGITGNLFDAFLKPYFLEAYRPLRKGDLFLVRGGMRSVEFKVIETDPAEYCIVAPDTEIFCDGEPIKREDEERLDEVGYDDVGGVRKQMAQIRELVELPLRHPQLFKSIGVKPPKGILLYGPPGSGKTLIARAVANETGAFFFLINGPEIMSKLAGESESNLRKAFEEAEKNAPSIIFIDEIDSIAPKREKTNGEVERRIVSQLLTLMDGLKSRSHVIVMGATNRPNSIDPALRRFGRFDREIDIGVPDEVGRLEVLRIHTKNMKLAEDVNLELISKDTHGYVEICQRACKYAIRENIEKDIERERRRKDNPEAMEEDEVDEIAEIRAPHFEESMKYARRSVSDADIRKYQAFAQTLQQSRGFGSEFRFSDQPATAGAAAAADPFASAGAAADDDDLYS

SEQ ID NO: 182826 - protein, 76 aa, Zea Mays
MVWLLYTTGSAFKFMHCWLMLKDEMKWTTQLVGRQLILSPTRQQVRSHALRTINNITHFGSIPCGEVVEHGRDITP

SEQ ID NO: 182827 - protein, 489 aa, Zea Mays
MLEVAQDFRLLSPLEDWLRCGLKKHSLALASFKRTIARSRSRINWLKEGDANTKLFHMHARYRKNFMAKLVFGDNVFTDHADKAMLVDNFYRSLLGTRSDRTVTINLNYLGLPSHNLEDLDLPITEKEVFEAIKELPSDKSPGPDGFTGRFYKACWPTIKENVMQVLAAIWDRKFGHFNKFNSALVTLIPKKEGADQVKDFRPISLVHSMAKLVAKILANRLGNKLQSMVSQRQSAFIKGQFIQDNFMIVQQTARLLLQQRQARILLKLDITKAFDSVSWPFLLEVLQKLGFGQIWTDVLSGLLSTSSTHVMLNGVAGEKIQLKKGLRQGDPLSPMLFILVMDVLGWLISKADLENLLQPLSSRPLQHRVSLYVDDVIMFLHPKESDIQLVLKILEIFGEASGLKTNIQKSSVYPIRCGEEEVATLQEFLPCEISSFPYKYIGLPLSLNKLSRNQTQYIIDKIADQLRGWKADLMTRAGRKVQVQYVMT

SEQ ID NO: 182828 - protein, 91 aa, Zea Mays
MSTCHRVSQDQNGFTRPESTALPRPAVGLVGTRYSRHGARHVSESTAPHLPVSCHGGYKLLSPSLHSQCVRAVLVLVRPRLSLPMTRHVAS

SEQ ID NO: 182829 - protein, 316 aa, Zea Mays
MLGLSAIYKYIEFYDVMSVPMAIALSGQPLLGQAVMVKPSEAEKNLVQSNATSGGAASGGARKLYVGNLHSNITEDQLRQVFEPFGQVELVQLPLDAMTGLCKGYGFIQFARLEDAKAAQSLNGQLDIAGRVIKVSAVTDHVGVQASGGSRAALMLKLDRSGTATSLTGGIGAAGVAVPATSVIGAAGAASLLSPTVSAVGSVPGAPVLPITAQNVIMSTPTEFLLLKNMFDPSLETDPDFDLDIRDDVQDECSKFGAVKHIFVDKNTAGFVYLQFDSVTAAGKAQQALHGRWFAGKMITATFMSDQEYSTKFPNL

SEQ ID NO: 182830 - protein, 334 aa, Zea Mays
MLGLSAIYKYIEFYDVMSVPMAIALSGQPLLGQAVMVKPSEAEKNLVQSNATSGGAASGGARKLYVGNLHSNITEDQLRQVFEPFGQVELVQLPLDAMTGLCKGYGFIQFARLEDAKAAQSLNGQLDIAGRVIKVSAVTDHVGVQASGATTGDLDDDEGGGLALNASSRAALMLKLDRSGTATSLTGGIGAAGVAVPATSVIGAAGAASLLSPTVSAVGSVPGAPVLPITAQNVIMSTPTEFLLLKNMFDPSLETDPDFDLDIRDDVQDECSKFGAVKHIFVDKNTAGFVYLQFDSVTAAGKAQQALHGRWFAGKMITATFMSDQEYSTKFPNL

SEQ ID NO: 182831 - protein, 225 aa, Zea Mays
MSVPMAIALSGQPLLGQAVMVKPSEAEKNLVQSNATSGGAASGGARKLYVGNLHSNITEDQLRQVFEPFGQVELVQLPLDAMTGLCKGYGFIQFARLEDAKAAQSLNGQLDIAGRVIKVSAVTDHVGVQASGATTGDLDDDEGAKCKLQSCSNAQIGQEWYSNQLNWWYWCCWSGCTSYFSYWGSRSCFSSVTNSFCCWISSWGTCASYYRSECDHVHTYRILVA

SEQ ID NO: 182832 - protein, 518 aa, Zea Mays
MEFDEYEYLEKAVEPAPPPANGSGSGEKDRGSRRREGDEGRISKRSRSGEDRERGRHRSVREHRDRDKDDGKEKERSRDSRGKDRDREGREREKERGDRHRPREREVERERRSLSRSERRRIEEEEMVRELEMERERSERHHYRDRDVRRRKDDGAEPEVDPERDQRTVFAFQLSLKADERDVYEFFSRAGKVRDVRLIMDRNSRRSKGVGYIEFYDVMSVPMAIALSGQPLLGQAVMVKPSEAEKNLVQSNATSGGAASGGARKLYVGNLHSNITEDQLRQVFEPFGQVELVQLPLDAMTGLCKGYGFIQFARLEDAKAAQSLNGQLDIAGRVIKVSAVTDHVGVQASGGSRAALMLKLDRSGTATSLTGGIGAAGVAVPATSVIGAAGAASLLSPTVSAVGSVPGAPVLPITAQNVIMSTPTEFLLLKNMFDPSLETDPDFDLDIRDDVQDECSKFGAVKHIFVDKNTAGFVYLQFDSVTAAGKAQQALHGRWFAGKMITATFMSDQEYSTKFPNL

SEQ ID NO: 182833 - protein, 235 aa, Zea Mays
MGSGSGTLKQKKRVKHAKNKYLKPGALAQIRYSRSTSRDIGKKRILLNAKDELELPPQPETPRTPNASVSCGDSGLESLPLDLLIKIMCCLHHDELKVVFHVSKRIRKAVQLAREFHFNYTTPDRSRQELLLNRTPLPTEHWPFLRINGKDVHVSTPRTPRAPKHAARLSRLKLVDVKPITAVLFPESSTPFPSKRLRRWVPPWLPRHACKAASSPRVLRYEEELCEAVAQNKLL

SEQ ID NO: 182834 - protein, 148 aa, Zea Mays
MCCLHHDELKVVFHVSKRIRKAVQLAREFHFNYTTPDRSRQELLLNRTPLPTEHWPFLRINGKDVHVSTPRTPRAPKHAARLSRLKLVDVKPITAVLFPESSTPFPSKRLRRWVPPWLPRHACKAASSPRVLRYEEELCEAVAQNKLL

SEQ ID NO: 182835 - protein, 263 aa, Zea Mays
MGSGSGTLKQKKRVKHAKNKYLKPGALAQIRYSRSTSRDIGKKRILLNAKDELELPPQPEVLLESNTLVLSPARLNFEPFGSNTGQVLPKTPRTPNASVSCGDSGLESLPLDLLIMCCLHHDELKVVFHVSKRIRKAVQLAREFHFNYTTPDRSRQELLLNRTPLPTEHWPFLRINGKDVHVSTPRTPRAPKHAARLSRLKLVDVKPITAVLFPESSTPFPSKRLRRWVPPWLPRHACKAASSPRVLRYEEELCEAVAQNKLL

SEQ ID NO: 182836 - protein, 89 aa, Zea Mays
MGSGSGTLKQKKRVKHAKNKYLKPGALAQIRYSRSTSRDIGKKRILLNAKDELELPPQPEGRYCQRLQGLQMHLCPVVIQGLNHFLLIC

SEQ ID NO: 182837 - protein, 324 aa, Zea Mays
MPAPMAASTFPVAPLHAPPLVRPRVVPPSPTFGCCCRCSAPRGGLTLRPQACAPRRRCNPAIRPVRFCAEVGSVWPVVLTRSIRRGFQKGISVARVDDNAAGQVSLGDDNEDLDHITNETLRTTIRKSKEVLARHKIIMNQISEKKQLISTILDSSIHNEQEPLSGQSDGSLSNLNAIAKGTEIGYDHQTYHNRSLQQYEFDTTYGESIYDQNTYYESSEDDGTDFSENYQYKSFPRATRSVYELEEDNGMKQGYVVQLSQASGHEQSVNEGTNDNASEVDVMNVILVAAECAPWSKTGGLGDVAGALPKALAKRGHRVMVCLL

SEQ ID NO: 182838 - protein, 412 aa, Zea Mays
MVWILFSLTILSSTMFKVKFMDIWKRMVLLCKAAVEVQWYVPCGGFCYGDGNLVFIANDWHTALLPVYLKAYYRDNGFMPYARSVLVIHNIAHQGRGPIDDFRYLDLPGHYMDQFKLYDPFGGDHLNIFAAGIRAADRLLTVSHGYAWELKTPDGGWGLHSIINENDWKFQGIVNGIDTADWNPRHDVHLQSDGYTNYSLETVQTGKAQCKEALQKELGLPVRGDVPVIAFIGRLDHQKGVDLIAEAMPWIAGQDVQLIMLGTGRQDLEDTLRRLESQHYDRVRGWVGFSVRLAHRMTAGADILLMPSRFEPCGLNQLYAMMYGTVPVVHAVGGLRDTVQHYNPYEEVGVGWTFEKAEANRMIDALGHCLNTYRNYWSSWEGIQRRGMMQDLSWDNAAKLYEEVLLAAKYQW

SEQ ID NO: 182839 - protein, 463 aa, Zea Mays
MPAPMAASTFPVAPLHAPPLVRPRVVPPSPTFGCCCRCSAPRGGLTLRPQACAPRRRCNPAIRPVRFCAEVGSVWPVVLTRSIRRGFQKGISVARVDDNAAGQVSLGDDNEDLDHITNETLRTTIRKSKEVLARHKIIMNQISEKKQLISTILDSSIHNEQEPLSGQSDGSLSNLNAIAKGTEIGYDHQTYHNRSLQQYEFDTTYGESIYDQNTYYESSEDDGTDFSENYQYKSFPRATRSVYELEEDNGMKQGYVVQLSQASGHEQSVNEGTNDNASEVDVMNVILVAAECAPWSKTGGLGDVAGALPKALAKRGHRVMVVVPKYGDYEEPQEIGEPRSYHVAGQDMEVKYYHAYIDGVDFVFIDNPVFHYVQSEIYGGDQTDIWKRMVLLCKAAVEVQWYVPCGGFCYGDGNLVFIANDWHTALLPVYLKAYYRDNGFMPYARSVLVIHNIAHQENCASLY

SEQ ID NO: 182840 - protein, 326 aa, Zea Mays
MPAPMAASTFPVAPLHAPPLVRPRVVPPSPTFGCCCRCSAPRGGLTLRPQACAPRRRCNPAIRPVRFCAEVGSVWPVVLTRSIRRGFQKGISVARVDDNAAGQVSLGDDNEDLDHITNETLRTTIRKSKEVLARHKIIMNQISEKKQLISTILDSSIHNEQEPLSGQSDGSLSNLNAIAKGTEIGYDHQTYHNRSLQQYEFDTTYGESIYDQNTYYESSEDDGTDFSENYQYKSFPRATRSVYELEEDNGMKQGYVVQLSQASGHEQSVNEGTNDNASEVDVMNVILVAAECAPWSKTGHLETNGFVVQSSCRGSMVCSMWWLLLR

SEQ ID NO: 182841 - protein, 188 aa, Zea Mays
MGKGGGCVPSKKRQPPAAAPSSSSAAAAVPREAPEEEAAAAVGRKLRLYIVFYSMYGHVESLARRAAAGAGAVDGLEAVLRRVPETLPPEVLEKMQAPVKDPAVPVIASAAELQEADGVLFGFPTRYGAMAAQMKAFFDSTGSLWEAQKLAGKPAGFFVSTGTQGGGQETTACLTEIHIYGDTITLIS

SEQ ID NO: 182842 - protein, 72 aa, Zea Mays
MTSRGGEEQPPTAVCRGNRRHRKSGPRPPSGCGNDPTQDEHRRPPFTEATTQPCRVIASSLKRSLNGVNSMD

SEQ ID NO: 182843 - protein, 102 aa, Zea Mays
MKTELAKMWRLRHTYVDSTFVERTKEVEASNSDDVARSISRETITNTTPFGEMMEDSLACILGSPGCNMESNNPPEKTANVLTRSDLRARRRGRRHHRHADD

SEQ ID NO: 182844 - protein, 652 aa, Zea Mays
MDAMAPEEYASQSKLLQEFTNVPSIDSASILKTNDEDRSRAMFSISQPDLLANTNRKYVLYSHITTRAGTGTTSPDFQWSPFPTETTGVSATVPSPSGSKLLVVRNGERGCPTKLEIVCQSHVEKEIHVAGSVHGPLYTDEWFHGVSWNQEETLVAYVAEAPATPRPAFNRSGYTREEGCSEGDCSAWKGQGVWEEDWGETYSKKGRPSLFVLDIPRGEVVAAKGVPTSLSVGQVVWAPESPGGRHKYLVFVGWSERNGFFQNTARKLGIKYCSNRPCALYAAPCPIQGPEPPGNPPATTDGKSGSGGAVARNLTPGFSSALFPRFSRDGRLLVFLSSKQAVDSGAHNATDSLHVINWPSDWKMDEQLDVTQVVPVVMCPEDDDGGCFPGLYCSSVLPDPWLSDGRTVILTSSWRSAEVILSVDVLSGKVARITPEDSCYSWRALALDGTNVLAVSSSPIDPPSISYGRRLAVTPAEGEARRWTWDEVTSPFMASNSKVKSLLLHHSVSILKIPVPSPSADLSDGGKLPLEAIFVSCSCKGSSRSPTVVVLHGGPHSVSVSSYSKSSAFLASLGFNLLVVNYRGTPGYGEEALQSLPGKVGSQYARSLIERGGDVKIMMFPEDIHEINLPRSDFESFLNIGVWFKKHLNAVA

SEQ ID NO: 182845 - protein, 759 aa, Zea Mays
MDAMAPEEYASQSKLLQEFTNVPSIDSASILKTNDEDRSRAMFSISQPDLLANTNRKYVLYSHITTRAGTGTTSPDFQWSPFPTETTGVSATVPSPSGSKLLVVRNGERGCPTKLEIVCQSHVEKEIHVAGSVHGPLYTDEWFHGVSWNQEETLVAYVAEAPATPRPAFNRSGYTREEGCSEGDCSAWKGQGVWEEDWGETYSKKGRPSLFVLDIPRGEVVAAKGVPTSLSVGQVVWAPESPGGRHKYLVFVGWSERNGFFQNTARKLGIKYCSNRPCALYAAPCPIQGPEPPGNPPATTSDGKSGSGGAVARNLTPGFSSALFPRFSRDGRLLVFLSSKQAVDSGAHNATDSLHVINWPSDWKMDEQLDVTQVVPVVMCPEDDDGGCFPGLYCSSVLPDPWLSDGRTVILTSSWRSAEVILSVDVLSGKVARITPEDSCYSWRALALDGTNVLAVSSSPIDPPSISYGRRLAVTPAEGEARRWTWDEVTSPFMASNSKVKSLLLHHSVSILKIPVPSPSADLSDGGKLPLEAIFVSCSCKGSSRSPTVVVLHGGPHSVSVSSYSKSSAFLASLGFNLLVVNYRGTPGYGEEALQSLPGKVGSQDVEDCLAALDFAVEEELAPDRFAVAAARNPVCNLSLMAGTTDIPDWCYVVACGTQAKRYASEAPSPGHLRLFYQRSPIAHVSKVKAPLLMLLGGADLRVPASNGLQYARSLIERGGDVKIMMFPEDIHEINLPRSDFESFLNIGVWFKKHLNAVA

SEQ ID NO: 182846 - protein, 405 aa, Zea Mays
MCPEDDDGGCFPGLYCSSVLPDPWLSDGRTVILTSSWRSAEVILSVDVLSGKVARITPEDSCYSWRALALDGTNVLAVSSSPIDPPSISYGRRLAVTPAEGEARRWTWDEVTSPFMASNSKVKSLLLHHSVSILKIPVPSPSADLSDGGKLPLEAIFVSCSCKGSSRSPTVVVLHGGPHSVSVSSYSKSSAFLASLGFNLLVVNYRGTPGYGEEALQSLPGKVGSQDVEDCLAALDFAVEEELVDASRVAVVGISHGGFLTTHLIGQAPDRFAVAAARNPVCNLSLMAGTTDIPDWCYVVACGTQAKRYASEAPSPGHLRLFYQRSPIAHVSKVKAPLLMLLGGADLRVPASNGLQYARSLIERGGDVKIMMFPEDIHEINLPRSDFESFLNIGVWFKKHLNAVA

SEQ ID NO: 182847 - protein, 758 aa, Zea Mays
MDAMAPEEYASQSKLLQEFTNVPSIDSASILKTNDEDRSRAMFSISQPDLLANTNRKYVLYSHITTRAGTGTTSPDFQWSPFPTETTGVSATVPSPSGSKLLVVRNGERGCPTKLEIVCQSHVEKEIHVAGSVHGPLYTDEWFHGVSWNQEETLVAYVAEAPATPRPAFNRSGYTREEGCSEGDCSAWKGQGVWEEDWGETYSKKGRPSLFVLDIPRGEVVAAKGVPTSLSVGQVVWAPESPGGRHKYLVFVGWSERNGFFQNTARKLGIKYCSNRPCALYAAPCPIQGPEPPGNPPATTDGKSGSGGAVARNLTPGFSSALFPRFSRDGRLLVFLSSKQAVDSGAHNATDSLHVINWPSDWKMDEQLDVTQVVPVVMCPEDDDGGCFPGLYCSSVLPDPWLSDGRTVILTSSWRSAEVILSVDVLSGKVARITPEDSCYSWRALALDGTNVLAVSSSPIDPPSISYGRRLAVTPAEGEARRWTWDEVTSPFMASNSKVKSLLLHHSVSILKIPVPSPSADLSDGGKLPLEAIFVSCSCKGSSRSPTVVVLHGGPHSVSVSSYSKSSAFLASLGFNLLVVNYRGTPGYGEEALQSLPGKVGSQDVEDCLAALDFAVEEELAPDRFAVAAARNPVCNLSLMAGTTDIPDWCYVVACGTQAKRYASEAPSPGHLRLFYQRSPIAHVSKVKAPLLMLLGGADLRVPASNGLQYARSLIERGGDVKIMMFPEDIHEINLPRSDFESFLNIGVWFKKHLNAVA

SEQ ID NO: 182848 - protein, 392 aa, Zea Mays
MDAMAPEEYASQSKLLQEFTNVPSIDSASILKTNDEDRSRAMFSISQPDLLANTNRKYVLYSHITTRAGTGTTSPDFQWSPFPTETTGVSATVPSPSGSKLLVVRNGERGCPTKLEIVCQSHVEKEIHVAGSVHGPLYTDEWFHGVSWNQEETLVAYVAEAPATPRPAFNRSGYTREEGCSEGDCSAWKGQGVWEEDWGETYSKKGRPSLFVLDIPRGEVVAAKGVPTSLSVGQVVWAPESPGGRHKYLVFVGWSERNGFFQNTARKLGIKYCSNRPCALYAAPCPIQGPEPPGNPPATTSDGKSGSGGAVARNLTPGFSSALFPRFSRDGRLLVFLSSKQAVDSGAHNATDSLHVINWPSDWKMDEQLDVTQVASTVHPCYPILGSPTDVQ

SEQ ID NO: 182849 - protein, 802 aa, Zea Mays
MDAMAPEEYASQSKLLQEFTNVPSIDSASILKTNDEDRSRAMFSISQPDLLANTNRKYVLYSHITTRAGTGTTSPDFQWSPFPTETTGVSATVPSPSGSKLLVVRNGERGCPTKLEIVCQSHVEKEIHVAGSVHGPLYTDEWFHGVSWNQEETLVAYVAEAPATPRPAFNRSGYTREEGCSEGDCSAWKGQGVWEEDWGETYSKKGRPSLFVLDIPRGEVVAAKGVPTSLSVGQVVWAPESPGGRHKYLVFVGWSERNGFFQNTARKLGIKYCSNRPCALYAAPCPIQGPEPPGNPPATTDGKSGSGGAVARNLTPGFSSALFPRFSRDGRLLVFLSSKQAVDSGAHNATDSLHVINWPSDWKMDEQLDVTQVVPVVMCPEDDDGGCFPGLYCSSVLPDPWLSDGRTVILTSSWRSAEVILSVDVLSGKVARITPEDSCYSWRALALDGTNVLAVSSSPIDPPSISYGRRLAVTPAEGEARRWTWDEVTSPFMASNSKVKSLLLHHSVSILKIPVPSPSADLSDGGKLPLEAIFVSCSCKGSSRSPTVVVLHGGPHSVSVSSYSKSSAFLASLGFNLLVVNYRGTPGYGEEALQSLPGKVGSQDVEDCLAALDFAVEEELVDASRVAVVGISHGGFLTTHLIGQAPDRFAVAAARNPVCNLSLMAGTTDIPDWCYVVACGTQAKRYASEAPSPGHLRLFYQRSPIAHVSKVCCFSPACLLLSYQLVDLIVVLVVRTVDGALLSESVQVKAPLLMLLGGADLRVPASNGLQVFTRRVGLWHPLTIRGRALDNPQLGTRLSAMT

SEQ ID NO: 182850 - protein, 742 aa, Zea Mays
MDAMAPEEYASQSKLLQEFTNVPSIDSASILKTNDEDRSRAMFSISQPDLLANTNRKYVLYSHITTRAGTGTTSPDFQWSPFPTETTGVSATVPSPSGSKLLVVRNGERGCPTKLEIVCQSHVEKEIHVAGSVHGPLYTDEWFHGVSWNQEETLVAYVAEAPATPRPAFNRSGYTREEGCSEGDCSAWKGQGVWEEDWGETYSKKGRPSLFVLDIPRGEVVAAKGVPTSLSVGQVVWAPESPGGRHKYLVFVGWSERNGFFQNTARKLGIKYCSNRPCALYAAPCPIQGPEPPGNPPATTSDGKSGSGGAVARNLTPGFSSALFPRFSRDGRLLVFLSSKQAVDSGAHNATDSLHVINWPSDWKMDEQLDVTQVVPVVMCPEDDDGGCFPGLYCSSVLPDPWLSDGRTVILTSSWRSAEVILSVDVLSGKVARITPEDSCYSWRALALDGTNVLAVSSSPIDPPSISYGRRLAVTPAEGEARRWTWDEVTSPFMASNSKVKSLLLHHSVSILKIPVPSPSADLSDGGKLPLEAIFVSCSCKGSSRSPTVVVLHGGPHSVSVSSYSKSSAFLASLGFNLLVVNYRGTPGYGEEALQSLPGKVGSQDVEDCLAALDFAVEEELAPDRFAVAAARNPVCNLSLMAGTTDIPDWCYVVACGTQAKRYASEAPSPGHLRLFYQRSPIAHVSKVKAPLLMLLGGADLRVPASNGLQVFTRRVGLWHPLTIRGRALDNPQLGTRLSAMT

SEQ ID NO: 182851 - protein, 766 aa, Zea Mays
MDAMAPEEYASQSKLLQEFTNVPSIDSASILKTNDEDRSRAMFSISQPDLLANTNRKYVLYSHITTRAGTGTTSPDFQWSPFPTETTGVSATVPSPSGSKLLVVRNGERGCPTKLEIVCQSHVEKEIHVAGSVHGPLYTDEWFHGVSWNQEETLVAYVAEAPATPRPAFNRSGYTREEGCSEGDCSAWKGQGVWEEDWGETYSKKGRPSLFVLDIPRGEVVAAKGVPTSLSVGQVVWAPESPGGRHKYLVFVGWSERNGFFQNTARKLGIKYCSNRPCALYAAPCPIQGPEPPGNPPATTSDGKSGSGGAVARNLTPGFSSALFPRFSRDGRLLVFLSSKQAVDSGAHNATDSLHVINWPSDWKMDEQLDVTQVVPVVMCPEDDDGGCFPGLYCSSVLPDPWLSDGRTVILTSSWRSAEVILSVDVLSGKVARITPEDSCYSWRALALDGTNVLAVSSSPIDPPSISYGRRLAVTPAEGEARRWTWDEVTSPFMASNSKVKSLLLHHSVSILKIPVPSPSADLSDGGKLPLEAIFVSCSCKGSSRSPTVVVLHGGPHSVSVSSYSKSSAFLASLGFNLLVVNYRGTPGYGEEALQSLPGKVGSQDVEDCLAALDFAVEEELVDASRVAVVGISHGGFLTTHLIGQAPDRFAVAAARNPVCNLSLMAGTTDIPDWCYVVACGTQAKRYASEAPSPGHLRLFYQRSPIAHVSKVKAPLLMLLGGADLRVPASNGLQVFTRRVGLWHPLTIRGRALDNPQLGTRLSAMT

SEQ ID NO: 182852 - protein, 349 aa, Zea Mays
MPILHMDMPPCHYIDYPEGPVHPVSPGYHSVSTENLQHERWIGTSYLRGRHPMGNLRHADTFEYRWEAPTPFRRYRSVTPPNHAISAYGPEASSPTEAYLSAPMKSRSHHSLINGWHASPVSSTDSDERICSLISVYGQQAQLQKQTCQSAKLGKNPQFGISLHGSESEAHPTRVSPSDSTEQPPSPCFRIHPPTTVENLLHCRVSACGPEASLPLHLAVTSSTSRSTVVASQVKKKMQVPIFYAEAVIGPTGERIEYIRRTSRSSILISNSEGTMYIEITGSAATDVLTAEQLIKNFMAEAAAASPGHSYDFIPSYLPAPRSAQADIFASPETSEVSSLPERRLQMIY

SEQ ID NO: 182853 - protein, 69 aa, Zea Mays
MSLIPRRPSSTSRFLRKTLSILVWMASRPIFLGFNRTPYERSFYLLLSKNNQVINDWTKPRNNPLCVKL

SEQ ID NO: 182854 - protein, 305 aa, Zea Mays
MNLEVLKYCATVLFLEASLPEVLTVENLVERAMTRSRANGTASPDLPKPEANSPPDSSKRQRTVSPVDCVMPAEGNQGTSDPSTNRESVELVSHIEEMKLNTTTHVDASSSGYPGFLEPDDVSIECIKISVAPLHQFGRRSSIQHRDCPLQLCCAGLKVQFGVSTKFLDNAGRPKMSIVVEIPENLCKVLEFCDVLARKLSQESGSSSEWRPLIKKYGYINRPTIRLNIPPISNSDAVAFSTDICQREPSGNIQKLAFGNVGATELDSLFVKGSKVDAFFSLELYDYQQNAGIRLVAKRLVIHSN

SEQ ID NO: 182855 - protein, 142 aa, Zea Mays
MAEMTVTVAAAKSTLRTCPGARRAAVLGRWMPLAPAAPANLKLFSPAVRVPRATSPAAVEDGSNTDIVPIPKVIIDQDSDPDATIVEITLGDRLGDLLDTMSALKNLGLNVVKASVCLDSTGKHIKFAITRAVVRSSSTDDH

SEQ ID NO: 182856 - protein, 193 aa, Zea Mays
MAEMTVTVAAAKSTLRTCPGARRAAVLGRWMPLAPAAPANLKLFSPAVRVPRATSPAAVEDGSNTDIVPIPKVIIDQDSDPDATIVEITLGDRLGDLLDTMSALKNLGLNVVKASVCLDSTGKHIKFAITRAFTGRKIDDPELLEAVRLTIINNMIQYHPESSSQLAMGATFGPEAPTEEVLPKLCQRHLLNA

SEQ ID NO: 182857 - protein, 149 aa, Zea Mays
MLYRFTGRKIDDPELLEAVRLTIINNMIQYHPESSSQLAMGATFGPEAPTEEVDVDIATHIDIYDDGPERSLLVVETADRPGLLVDLVKIISDISINVQSGEFDTEGLLAKAKFHVSYRGRTLTEALQQVLCNSLRYFLRRPTTEDASF

SEQ ID NO: 182858 - protein, 232 aa, Zea Mays
MADELDELIGFLSDRNPQVRGAAADIVRGLTGGEDGLRALTARADSALPALLRLLASAGGSGSGEAAADSLVNLSQDAALAARLVALGAVDAAMDVVAKRGGEQPALARRLVMLLVNLTHVESGVAALLQIYSEEDRSKMPLELSSALSHEREVVEDSEIRQQALEAIYMIVLQDGGRRSFWSVNGPRILQVGYEDEKDPKVMEAYELIGSLLVGKGEDVQDNKKEQGEKPQ

SEQ ID NO: 182859 - protein, 180 aa, Zea Mays
MRRCKACMLQSLCDHSVGHPVILKQIIRQFDSTNQLRKKGVAGTIRNCCFEADTQLLSLLSLAEYLWPALLLPVAGKKIYSEEDRSKMPLELSSALSHEREVVEDSEIRQQALEAIYMIVLQDGGRRSFWSVNGPRILQVGYEDEKDPKVMEAYELIGSLLVGKGEDVQDNKKEQGEKPQ

SEQ ID NO: 182860 - protein, 234 aa, Zea Mays
MADELDELIGFLSDRNPQVGDEKVQGLYVAKLVRSFCRSSSDSEEEDIFEYVASTLVNISKVEAGRRILLEPKRGLLKQIIRQFDSTNQLRKKGVAGTIRNCCFEADTQLLSLLSLAEYLWPALLLPVAGKKIYSEEDRSKMPLELSSALSHEREVVEDSEIRQQALEAIYMIVLQDGGRRSFWSVNGPRILQVGYEDEKDPKVMEAYELIGSLLVGKGEDVQDNKKEQGEKPQ

SEQ ID NO: 182861 - protein, 118 aa, Zea Mays
MESRKEAAVGWMTVPAFGEWDVKNGAVPDYSMDFSKIREMRKQNRRELSRASLGGGDDDDDDLLQKKQQQQQEEGSKAQPRNKPSAAVADDAHRRALHDDSPTGRKNFLSYFQCCTRA

SEQ ID NO: 182862 - protein, 95 aa, Zea Mays
MSIMELKGCGVLSEASINCPRLTSLDASFCRQLVDDSLTCMTGACPLIEHLILSSCLSIGIDGLSSLHCLHKLTLLDLSYTFLINLKPIFDSCPQ

SEQ ID NO: 182863 - protein, 759 aa, Zea Mays
MANEGRMKGVQGVGGGTGDEEDGNEEVREELELALSLGWRSWHLPPRQEPAPSSHNWTAVLPEWNPDAAGSSHDAKTALGGQSIPSLRFRDMLGGILDASHAGGSVEVGWGNLDEEDEDRDLQNKRLRVQHFGEEGPLHSGLLFCRESPLHSEHELEFGLSLFPNDGSESLRDANNEIVDDAENPGERNSEGVGIRMDLSDDLLHLIFSFLGQKDLCRAGVTCKQWRSASVHDDFWKCLKFENTRISLQNFVNICRRYPSVTELNLNGVINAEMLVLEAIVFLRHLKTLTMGKGQLGGPFFQALSECPLLTALTVNDASLGSGIQEATIKHGGLRELHIFKCRALRISVRCSQLQILSLRRTGMAHVSLNCPQLLELDFQSCHKLSDNAIRQAATACPLLAKLDMSSCSCVTDETLRDIGNSCPSLSALDASNCPNISFESVKLPMLVDLRLLSCEGITSASMVAIAYSRLLELDNCSLLTSVSLDLPHLKNMSLVHLRKFAELNLRSPVLSYIKVSRCSVLHRVSITSTTLQKLVLQKQESLSSLSLQCHNLIDVDLSDCESLTNAICEVFSDGGGCPKLRSLILDNCESLSIVELNSSSLVCLSLAGCRSMTCLRLSCPNLQHVNLDGCDHLKNAAFCPVGLESLNLGICPKLSILCIEAPNMSIMELKGCGVLSEASINCPRLTSLDASFCRQLVDDSLTCMTGACPLIEHLILSSCLSIGIDGLSSLHCLHKLTLLDLSYTFLINLKPIFDSCPQ

SEQ ID NO: 182864 - protein, 566 aa, Zea Mays
MDLSDDLLHLIFSFLGQKDLCRAGVTCKQWRSASVHDDFWKCLKFENTRISLQNFVNICRRYPSVTELNLNGVINAEMLVLEAIVFLRHLKTLTMGKGQLGGPFFQALSECPLLTALTVNDASLGSGIQEATIKHGGLRELHIFKCRALRISVRCSQLQILSLRRTGMAHVSLNCPQLLELDFQSCHKLSDNAIRQAATACPLLAKLDMSSCSCVTDETLRDIGNSCPSLSALDASNCPNISFESVKLPMLVDLRLLSCEGITSASMVAIAYSRLLEALQLDNCSLLTSVSLDLPHLKNMSLVHLRKFAELNLRSPVLSYIKVSRCSVLHRVSITSTTLQKLVLQKQESLSSLSLQCHNLIDVDLSDCESLTNAICEVFSDGGGCPKLRSLILDNCESLSIVELNSSSLVCLSLAGCRSMTCLRLSCPNLQHVNLDGCDHLKNAAFCPVGLESLNLGICPKLSILCIEAPNMSIMELKGCGVLSEASINCPRLTSLDASFCRQLVDDSLTCMTGACPLIEHLILSSCLSIGIDGLSSLHCLHKLTLLDLSYTFLINLKPIFDSCPQ

SEQ ID NO: 182865 - protein, 106 aa, Zea Mays
MTPCQVSHLSDLIWYFSFFCTESKIIQLIHKKWKKGEVRFSRETSIIIVCPQVCQRTSENNKKNPICLLSGAPPDSEQRAMPFLVWRSRLLHPPAPRHTRKSGAVW

SEQ ID NO: 182866 - protein, 93 aa, Zea Mays
MCFYLNVCLVYIVCFCEKYIAKSLSLYIYLHLTLQYIGHRSNCLYAGIGCTNNLKLTLTTRWPPIIVFYHKESHFPVLTEYTNLSEFRLFFCL

SEQ ID NO: 182867 - protein, 127 aa, Zea Mays
MKEQANAPDDLPPQLLFAHQVPIKWPKSRDVVWKANIPHTHLAKEKSDQNWMVEAGEKIKFPGGGTHFHHEADKYISNIANMLNFKDNNINNEGMLRTVLDVGCGVASFGGYLLSSNVIAMSLAPND

SEQ ID NO: 182868 - protein, 56 aa, Zea Mays
MGQHLHNPSAATTDTSCESVVTSGQHHQQQNPAVPCPQRDANNPASLLAIADETLA

SEQ ID NO: 182869 - protein, 91 aa, Zea Mays
MGPGSHSIPRIVRTSLSSTNRAWFADSVAGNLESSWPRLFSHNATGSLPTIGSYCIAPWCGARGDSPSPSIAACASRHIRHYTRRANYCGS

SEQ ID NO: 182870 - protein, 86 aa, Zea Mays
MMVWCRLKHEASLMRDDKVQYQLHVAEMEAVSVAMPPVYVNHGNDGGPAVKDIHMENFSITIDLIQEATLTILFGRHYGLAKMIFS

SEQ ID NO: 182871 - protein, 220 aa, Zea Mays
MRQREEQEKQEAELFTRAPVTKHDKQIEKRIRRQLHGLNMVDIKPIMIRQRLVKIICLKKLARQRLVKIICLKKLAASNLFVKSNARRTGLTEECSAGSRFDLALEDIAEGKCLHVEELPTVASIVAYDLLPRGLKVPWRHQLRQDLRWVVHRHWLMRRSTNTSAEAAEMGLLRDLHKAIKQTELALISVNHTIQSIRKYEKVIQILSKMYRVQTSYSWT

SEQ ID NO: 182872 - protein, 270 aa, Zea Mays
MPCPRSVVCALPEPSCSRLARASAAVGLDRALLVRFGQATLVCPDRPPPFSSRPSTPSHCAHRSRSYRTPKPSGNRRPRPPISSPETLSLPSTSAVLEFSIFIRSDSDVAGADEDEDATSAAGSRPAEAAGCRGCGSRGSVGAADAAIARDREAVAAAGQGISWVDSPAMAADALSTIPGAVLRNLSDKLYEKRKNAALEIEGIVKQLAMAGEHERISAVISLLTNNFTYSPQTNHRKQGGLIGLAAVTVGLTSEAAQHLEFHPYTILLR

SEQ ID NO: 182873 - protein, 359 aa, Zea Mays
MPCPRSVVCALPEPSCSRLARASAAVGLDRALLVRFGQATLVCPDRPPPFSSRPSTPSHCAHRSRSYRTPKPSGNRRPRPPISSPETLSLPSTSAVLEFSIFIRSDSDVAGADEDEDATSAAGSRPAEAAGCRGCGSRGSVGAADAAIARDREAVAAAGQGISWVDSPAMAADALSTIPGAVLRNLSDKLYEKRKNAALEIEGIVKQLAMAGEHERISAVISLLTNNFTYSPQTNHRKGGLIGLAAVTVGLTSEAAQHLEVDSTPLTPLQDTHWTGPLEFFVMAYDRAAIKFRGVDADINFNLSDYEDDMKQSTSYLTFSRHRVHAEENRGLLSASSFDRQQLRKEVVRRVKAAAAGRE

SEQ ID NO: 182874 - protein, 457 aa, Zea Mays
MSKCIQNEIEAEPESHPFREIIDCSLSNPQSMGQRPNKFFREVLALCDYPHLLEQSGTNSLFSSGAIARAREILDLFPGRATGGYSHSQGTEGLRDIIAAGIAARDNFPCNADDIFLTDGAAPPVHMMMHLLIRDKKDGILCPVPSHSLYTSAMLLQGATLVPYFLDESRGWGVSMSDLKKQLDSARSMGVFVRGLVVINPGNPTGHVLVEENQREIVDFCRNEDLVLLADEVYQENIYADEKGFHSFKKIARSMGYGEGDISLVSFHSVSNGYYGECGRRGGYMEVTGFNSDVKKQVYKVVSLSSCSNISGQILMSLVMNPPQVGDESYASYQAERDGVLSSFARCAEAMVRSFNGLEGVTCSEAEGAVFVFPSVRLPKKAVAAAEASNTQPDAFYALRLLETTGIVVVPGSVFGQMHGTWHFRCTVLPHEEKKTMTVIISSFVAFHRAFMEEFRD

SEQ ID NO: 182875 - protein, 331 aa, Zea Mays
MMMHLLIRDKKDGILCPVPSHSLYTSAMLLQGATLVPYFLDESRGWGVSMSDLKKQLDSARSMGVFVRGLVVINPGNPTGHVLVEENQREIVDFCRNEDLVLLADEVYQENIYADEKGFHSFKKIARSMGYGEGDISLVSFHSVSNGYYGECGRRGGYMEVTGFNSDVKKQVYKVVSLSSCSNISGQILMSLVMNPPQVGDESYASYQAERDGVLSSFARCAEAMVRSFNGLEGVTCSEAEGAVFVFPSVRLPKKAVAAAEASNTQPDAFYALRLLETTGIVVVPGSVFGQMHGTWHFRCTVLPHEEKKTMTVIISSFVAFHRAFMEEFRD

SEQ ID NO: 182876 - protein, 520 aa, Zea Mays
MTPCALTVDSLNPKVLALADHLGDNAIARRAQCIQNEIEAEPESHPFREIIDCSLSNPQSMGQRPNKFFREVLALCDYPHLLEQSGTNSLFSSGAIARAREILDLFPGRATGGYSHSQGTEGLRDIIAAGIAARDNFPCNADDIFLTDGAAPPVHMMMHLLIRDKKDGILCPVPSHSLYTSAMLLQGATLVPYFLDESRGWGVSMSDLKKQLDSARSMGVFVRGLVVINPGNPTGHVLVEENQREIVDFCRNEDLVLLADEVYQENIYADEKGFHSFKKIARSMGYGEGDISLVSFHSVSNGYYGECGRRGGYMEVTGFNSDVKKQVYKVVSLSSCSNISGQILMSLVMNPPQVGDESYASYQAERDGVLSSFARCAEAMVRSFNGLEGVTCSEAEGAVFVFPSVRLPKKAVAAAEASNTQPDAFYALRLLETTGIVVVPGSVFGQMHGPATRREEDDDGDHLQLCGVSSSLHGRVSRLTDFSSSSSISVLYHNLMLYFGENLDLSKCMIPAGITGAQGS

SEQ ID NO: 182877 - protein, 464 aa, Zea Mays
MTPCALTVDSLNPKVLALADHLGDNAIARRAQCIQNEIEAEPESHPFREVLALCDYPHLLEQSGTNSLFSSGAIARAREILDLFPGRATGGYSHSQGTEGLRDIIAAGIAARDNFPCNADDIFLTDGAAPPVHMMMHLLIRDKKDGILCPVPSHSLYTSAMLLQGATLVPYFLDESRGWGVSMSDLKKQLDSARSMGVFVRGLVVINPGNPTGHVLVEENQREIVDFCRNEDLVLLADEVYQENIYADEKGFHSFKKIARSMGYGEGDISLVSFHSVSNGYYGECGRRGGYMEVTGFNSDVKKQVYKVVSLSSCSNISGQILMSLVMNPPQVGDESYASYQAERDGVLSSFARCAEAMVRSFNGLEGVTCSEAEGAVFVFPSVRLPKKAVAAAEASNTQPDAFYALRLLETTGIVVVPGSVFGQMHGTWHFRCTVLPHEEKKTMTVIISSFVAFHRAFMEEFRD

SEQ ID NO: 182878 - protein, 353 aa, Zea Mays
MSRDGFPANADDIFITDGASPGVHMMMQLLIRNEKDGILCPIPQYPLYSASIALHGGALVPYYLNEKTGWGLEISDLKMQLENARSKGIDVRALVVINPGNPTGQVLAEDNQYDIVKFCKNEGLVLLADEVYQENIYVDNKKFNSFKKIVRSMGYGEDDLPLVSLQSVSKGYYGECGKRGGYMEITGFSAPVREQIYKIASVNLCSNITGQILASLVMNPPKVGDESYASYKAEKDGILESLARRAKALEDAFNKLEGFSCNKAEGAMYLFPQILLPQKAIEAAKAAKKAPDAFYALRLLESTGIVVVPGSGFGQVPGTWHIRCTILPQEDKIPAVISRFRAFHEAFLAEYRD

SEQ ID NO: 182879 - protein, 295 aa, Zea Mays
MVPYYLNEKTGWGLEISDLKMQLENARSKGIDVRALVVINPGNPTGQVLAEDNQYDIVKFCKNEGLVLLADEVYQENIYVDNKKFNSFKKIVRSMGYGEDDLPLVSLQSVSKGYYGECGKRGGYMEITGFSAPVREQIYKIASVNLCSNITGQILASLVMNPPKVGDESYASYKAEKDGILESLARRAKALEDAFNKLEGFSCNKAEGAMYLFPQILLPQKAIEAAKAAKKAPDAFYALRLLESTGIVVVPGSGFGQVPGTWHIRCTILPQEDKIPAVISRFRAFHEAFLAEYRD

SEQ ID NO: 182880 - protein, 119 aa, Zea Mays
MRALGFEMTPEQIGQMIAEVDKDGSGTIDFDEFVHMMTDKMGERDARDELHKAFRIIDQDANGKISDMDIQRLAIETGEHFTLDEVREMIEAADEDGDGEIDLEEFMKMMKRTDFGSGF

SEQ ID NO: 182881 - protein, 149 aa, Zea Mays
MTGTYEASDRPPPPNSAGYRTDKVRRKRLTAQKRKEIKEAFDLFDIDGSGTIDARELNVAMRALGFEMTPEVRTRDVCQWRRQPNRADDRGGGQGRQRHHRLRRVRAHDDGQDGRAGRPGRAPQGVPHHRPGRQRTLRKPTATNDDDGR

SEQ ID NO: 182882 - protein, 104 aa, Zea Mays
MIAEVDKDGSGTIDFDEFVHMMTDKMGERDARDELHKAFRIIDQDANGKISDMDIQRLAIETGEHFTLDEVREMIEAADEDGDGEIDLEEFMKMMKRTDFGSGF

SEQ ID NO: 182883 - protein, 111 aa, Zea Mays
MSLMPSVLPSQTSPLCQRHLCDQAEAERASILENFRQETTQWNKTAKATNIAESSKLESTGSKISIIVATDACLPQAAMAEAPLMARVLINYELPTKKVSFNYISVHICCF

SEQ ID NO: 182884 - protein, 188 aa, Zea Mays
MKSLTPTAAGSAADFSDSLPSPISPAAVPCHSSPGRHYYLAVDRTQFKMRTLLELLGVVADRRGGLPIATCVSSRDELDAVCAAVANLPFVSASPLYSDQAEAERASILENFRQETTQWNKTAKATNIAESSKLESTGSKISIIVATDACLPQAAMAEAPLMARVLINYELPTKKVSFNYISVHICCF

SEQ ID NO: 182885 - protein, 87 aa, Zea Mays
MYCYVRNALARVRLVSLVRSCYVFILSCYLGGIVTVQPFLQKNVVCSVHKKTSFSKQPSGLASENPKKKSNHLLVLVFSSPCVLRYW

SEQ ID NO: 182886 - protein, 692 aa, Zea Mays
MTTSAADDGSSLAPTITEGETTADAGAGAGVECVEGKEMKVGAAAPVEEPDKEAAREEDPGDDDDYEEEEEEEEEEEEEEEEEEEEVEEETETANGKEAELMEPLAALKPGEEVKPEKLEGEKEELDEEPEASEEDPEEVEELKEEGDGIAEEGLVDGSEANDDKDADQLSSGSDSGGSRSRGMQNSELAGGLEIFVDDLPQDCVKEDIAMAFSQSGEVKSVRIIKNSSTGKNQDIAFVCYTSIEAAKKVKGKMVRVSACQDNNTLYLGNICKGWTRDQVLNTLKSIGIQECEISFPSYKGGSRGFAFLKFTSHYYARAALRRLMKSDAIFGTDRSAKVSFYRTPTKSSKRLIQAKIVYLEHVPLSWDENKVKEYCEEYGEILKADVFQISKNMENETISFVEFSSRKGALACVTGINKANIVDGSFKLCAYLAWPKSASKVNSAAPSNAATATEKDKTHTEKILVDIDLQHKFQKGDKSKLTSQTKEAIMKKKKSSKLPNDNDTKLTSQGAAEVPQTSKSSEGKRKVGKNKHASVYQKPLKKAINNRNVDESQLTHRSAAVLQTSNTSKGKRKASENRSLYLNEKALKKARGNSNLGGSSRSKSYASDLEPHAGFISPAIRDNGSDAYNRQRTARYDIHPIDVHPYARAPPSAYSGYKSHAGYEAANTYEYAGNRAPTPPSGSYIPRRGHY

SEQ ID NO: 182887 - protein, 534 aa, Zea Mays
MTTSAADDGSSLAPTITEGETTADAGAGAGVECVEGKEMKVGAAAPVEEPDKEAAREEDPGDDDDYEEEEEEEEEEEEEEEEEEEEKEELDEEPEASEEDPEEVEELKEEGDGIAEEGLVDGSEANDDKDADQLSSGSDSGGSRSRGMQNSELAGGLEIFVDDLPQDCVKEDIAMAFSQSGEVKSVRIIKNSSTGKNQDIAFVCYTSIEAAKKVLAEFKEGIEVKGKMVRVSACQDNNTLYLGNICKGWTRDQAKIVYLEHVPLSWDENKVKEYCEEYGEILKADVFQISKNMENETISFVEFSSRKGALACVTGINKANIVDGSFKLCAYLAWPKSASKVNSAAPSNAATATEKDKTHTEKILVDIDLQHKFQKGDKSKLTSQTKEAIMKKKKSSKLPNDNDTKLTSQGAAEVPQTSKSSEGKRKVGKNKHASVYQKPLKKAINNRNVDESQLTHRSAAVLQTSNTSKGKRKASNLGGSSRSKSYASDLEPHAGFISPAIRDNGSDAYNRQRTARYDIHPIDVHPYARGCKYI

SEQ ID NO: 182888 - protein, 345 aa, Zea Mays
MTTSAADDGSSLAPTITEGETTADAGAGAGVECVEGKEMKVGAAAPVEEPDKEAAREEDPGDDDDYEEEEEEEEEEEEEEEEEEEEVEEETETANGKEAELMEPLAALKPGEEVKPEKLEGEKEELDEEPEASEEDPEEVEELKEEGDGIAEEGLVDGSEANDDKDADQLSSGSDSGGSRSRGMQNSELAGGLEIFVDDLPQDCVKEDIAMAFSQSGEVKSVRIIKNSSTGKNQDIAFVCYTSIEAAKKVLAEFKEGIEVKGKMVRVSACQDNNTLYLGNICKGWTRDQVLNTLKSIGIQECEISFPSYKGGSRGFAFLKFTSHYYARAALRRLMKSDAIFGRVR

SEQ ID NO: 182889 - protein, 627 aa, Zea Mays
MTTSAADDGSSLAPTITEGETTADAGAGAGVECVEGKEMKVGAAAPVEEPDKEAAREEDPGDDDDYEEEEEEEEEEEEEEEEEEEEVEEETETANGKEAELMEPLAALKPGEEVKPEKLEGEKEELDEEPEASEEDPEEVEELKEEGDGIAEEGLVDGSEANDDKDADQLSSGSDSGGSRSRGMQNSELAGGLEIFVDDLPQDCVKEDIAMAFSQSGEVKSVRIIKNSSTGKNQDIAFVCYTSIEAAKKVLAEFKEGIEVKGKMVRVSACQDNNTLYLGNICKGWTRDQAKIVYLEHVPLSWDENKVKEYCEEYGEILKADVFQISKNMENETISFVEFSSRKGALACVTGINKANIVDGSFKLCAYLAWPKSASKVNSAAPSNAATATEKDKTHTEKILVDIDLQHKFQKGDKSKLTSQTKEAIMKKKKSSKLPNDNDTKLTSQGAAEVPQTSKSSEGKRKVGKNKHASVYQKPLKKAINNRNVDESQLTHRSAAVLQTSNTSKGKRKASENRSLYLNEKALKKARGNSNLGGSSRSKSYASDLEPHAGFISPAIRDNGSDAYNRQRTARYDIHPIDVHPYARAPPSAYSGYKSHAGYEAANTYEYAGNRAPTPPSGSYIPRRGHY

SEQ ID NO: 182890 - protein, 655 aa, Zea Mays
MTTSAADDGSSLAPTITEGETTADAGAGAGVECVEGKEMKVGAAAPVEEPDKEAAREEDPGDDDDYEEEEEEEEEEEEEEEEEEEEVEEETETANGKEAELMEPLAALKPGEEVKPEKLEGEKEELDEEPEASEEDPEEVEELKEEGDGIAEEGLVDGSEANDDKDADQLSSGSDSGGSRSRGMQNSELAGGLEIFVDDLPQDCVKEDIAMAFSQSGEVKSVRIIKNSSTGKNQDIAFVCYTSIEAAKKVLAEFKEGIEVKGKMVRVSACQDNNTLYLGNICKGWTRDQVLNTLKSIGIQECEISFPSYKGGSRGFAFLKFTSHYYARAALRRLMKSDAIFGTDRSAKVSFYRTPTKSSKRLIQAKIVYLEHVPLSWDENKVKEYCEEYGEILKADVFQISKNMENETISFVEFSSRKGALACVTGINKANIVDGSFKLCAYLAWPKSASKVNSAAPSNAATATEKDKTHTEKILVDIDLQHKFQKGDKSKLTSQTKEAIMKKKKSSKLPNDNDTKLTSQGAAEVPQTSKSSEGKRKVGKNKHASVYQKPLKKAINNRNLGGSSRSKSYASDLEPHAGFISPAIRDNGSDAYNRQRTARYDIHPIDVHPYARAPPSAYSGYKSHAGYEAANTYEYAGNRAPTPPSGSYIPRRGHY

SEQ ID NO: 182891 - protein, 791 aa, Zea Mays
MTTSAADDGSSLAPTITEGETTADAGAGAGVECVEGKEMKVGAAAPVEEPDKEAAREEDPGDDDDYEEEEEEEEEEEEEEEEEEEEVEEETETANGKEAELMEPLAALKPGEEVKPEKLEGEKEELDEEPEASEEDPEEVEELKEEGDGIAEEGLVDGSEANDDKDADQLSSGSDSGGSRSRGMQNSELAGGLEIFVDDLPQDCVKEDIAMAFSQSGEVKSVRIIKNSSTGKNQDIAFVCYTSIEAAKKVLAEFKEGIEVKGKMVRVSACQDNNTLYLGNICKGWTRDQVLNTLKSIGIQECEISFPSYKGGSRGFAFLKFTSHYYARAALRRLMKSDAIFGTDRSAKVSFYRTPTKSSKRLIQSGPRPCHLDEKIHPGRVRSPSRSHGIILIEGHDKLTMVSTEQPPNPVLPSSMGRFKLSTLQMPIQGGAQPSRNPRVDEKHEEMSMIYAQAKIVYLEHVPLSWDENKVKEYCEEYGEILKADVFQISKNMENETISFVEFSSRKGALACVTGINKANIVDGSFKLCAYLAWPKSASKVNSAAPSNAATATEKDKTHTEKILVDIDLQHKFQKGDKSKLTSQTKEAIMKKKKSSKLPNDNDTKLTSQGAAEVPQTSKSSEGKRKVGKNKHASVYQKPLKKAINNRNVDESQLTHRSAAVLQTSNTSKGKRKASENRSLYLNEKALKKARGNSNLGGSSRSKSYASDLEPHAGFISPAIRDNGSDAYNRQRTARYDIHPIDVHPYARAPPSAYSGYKSHAGYEAANTYEYAGNRAPTPPSGSYIPRRGHY

SEQ ID NO: 182892 - protein, 668 aa, Zea Mays
MTTSAADDGSSLAPTITEGETTADAGAGAGVECVEGKEMKVGAAAPVEEPDKEAAREEDPGDDDDYEEEEEEEEEEEEEEEEEEEEVEEETETANGKEAELMEPLAALKPGEEVKPEKLEGEKEELDEEPEASEEDPEEVEELKEEGDGIAEEGLVDGSEANDDKDADQLSSGSDSGGSRSRGEVKSVRIIKNSSTGKNQDIAFVCYTSIEAAKKVLAEFKEGIEVKGKMVRVSACQDNNTLYLGNICKGWTRDQVLNTLKSIGIQECEISFPSYKGGSRGFAFLKFTSHYYARAALRRLMKSDAIFGTDRSAKVSFYRTPTKSSKRLIQAKIVYLEHVPLSWDENKVKEYCEEYGEILKADVFQISKNMENETISFVEFSSRKGALACVTGINKANIVDGSFKLCAYLAWPKSASKVNSAAPSNAATATEKDKTHTEKILVDIDLQHKFQKGDKSKLTSQTKEAIMKKKKSSKLPNDNDTKLTSQGAAEVPQTSKSSEGKRKVGKNKHASVYQKPLKKAINNRNVDESQLTHRSAAVLQTSNTSKGKRKASENRSLYLNEKALKKARGNSNLGGSSRSKSYASDLEPHAGFISPAIRDNGSDAYNRQRTARYDIHPIDVHPYARAPPSAYSGYKSHAGYEAANTYEYAGNRAPTPPSGSYIPRRGHY

SEQ ID NO: 182893 - protein, 616 aa, Zea Mays
MTTSAADDGSSLAPTITEGETTADAGAGAGVECVEGKEMKVGAAAPVEEPDKEEEKEELDEEPEASEEDPEEVEELKEEGDGIAEEGLVDGSEANDDKDADQLSSGSDSGGSRSRGMQNSELAGGLEIFVDDLPQDCVKEDIAMAFSQSGEVKSVRIIKNSSTGKNQDIAFVCYTSIEAAKKVLAEFKEGIEVKGKMVRVSACQDNNTLYLGNICKGWTRDQVLNTLKSIGIQECEISFPSYKGGSRGFAFLKFTSHYYARAALRRLMKSDAIFGTDRSAKVSFYRTPTKSSKRLIQAKIVYLEHVPLSWDENKVKEYCEEYGEILKADVFQISKNMENETISFVEFSSRKGALACVTGINKANIVDGSFKLCAYLAWPKSASKVNSAAPSNAATATEKDKTHTEKILVDIDLQHKFQKGDKSKLTSQTKEAIMKKKKSSKLPNDNDTKLTSQGAAEVPQTSKSSEGKRKVGKNKHASVYQKPLKKAINNRNVDESQLTHRSAAVLQTSNTSKGKRKASNLGGSSRSKSYASDLEPHAGFISPAIRDNGSDAYNRQRTARYDIHPIDVHPYARAPPSAYSGYKSHAGYEAANTYEYAGNRAPTPPSGSYIPRRGHY

SEQ ID NO: 182894 - protein, 659 aa, Zea Mays
MTTSAADDGSSLAPTITEGETTADAGAGAGVECVEGKEMKVGAAAPVEEPDKEAAREEDPGDDDDYEEEEEEEEEEEEEEEEEEEEVEEETETANGKEAELMEPLAALKPGEEVKPEKLEGEKEELDEEPEASEEDPEEVEELKEEGDGIAEEGLVDGSEANDDKDADQLSSGSDSGGSRSRGMQNSELAGGLEIFVDDLPQDCVKEDIAMAFSQSGEVKSVRIIKNSSTGKNQDIAFVCYTSIEAAKKVLAEFKEGIEVKGKMVRVSACQDNNTLYLGNICKGWTRDQVLNTLKSIGIQECEISFPSYKGGSRGFAFLKFTSHYYARAALRRLMKSDAIFGTDRSAKVSFYRTPTKSSKRLIQAKIVYLEHVPLSWDENKVKEYCEEYGEILKADVFQISKNMENETISFVEFSSRKGALACVTGINKANIVDGSFKLCAYLAWPKSASKVNSAAPSNAATATEKDKTHTEKILVDIDLQHKFQKGDKSKLTSQTKEAIMKKKKSSKLPNDNDTKLTSQGAAEVPQTSKSSEGKRKVGKNKHASVYQKPLKKAINNRNVDESQLTHRSAAVLQTSNTSKGKRKASNLGGSSRSKSYASDLEPHAGFISPAIRDNGSDAYNRQRTARYDIHPIDVHPYARVVLEIMSGKVGNQPVNCRP

SEQ ID NO: 182895 - protein, 171 aa, Zea Mays
MTTSAADDGSSLAPTITEGETTADAGAGAGVECVEGKEMKVGAAAPVEEPDKEAAREEDPGDDDDYEEEEEEEEEEEEEEEEEEEEVEEETETANGKEAELMEPLAALKPGEEVKPEKLEGEKEELDEEPEASEEDPEEVEELKEEGDGIAEEGLVDGSEANGIKTAPWYN

SEQ ID NO: 182896 - protein, 199 aa, Zea Mays
MRASRSPLTTVHTLTFGGHKKGLPSPPFPLPSGSRRLSPCTSQPRSPTVCRRGEKESNAAALYLCAGGQGNYRLHVERTWAPSFSRIVQTQTVFMRWAPWCAVHARCVIARSGSDWSSGARRHGSPPPGTSRYSVAGAQSGVLGVVPPLDGVFRSLGSGAEASRSGKLLIEVDICSGVELFRGRVSLLQNRRRARDRGS

SEQ ID NO: 182897 - protein, 96 aa, Zea Mays
MGKKRGARQHSATEMKTRARRPLAIGNKGKEHHQPAMGKRRKVANHGEEAGRCIKGGTSEVEAPWAAHRGRLGGLSGLGVCWDSSSELLTFQKTTL

SEQ ID NO: 182898 - protein, 952 aa, Zea Mays
MFLRTIVRQPSATNSFLTGNIDNEVGHTQASSSFTSNSILRSLMGALEEIELHAHSETVRSGHSHMYLCLLREQQLHELIPFSRMTGKIDKDEGTVCTLLKHMVLNLYEHVGVRMHRLSVCQWEVKLWLVCDGQASGAWRVVVTNVTGHTCTIDIYREVEDPTTHQLLYHSATTSAGPLHGVALNEPYKPLDAIDLKRYAARKNETTYCYDFPLAFETALKRSWKSSSYGVSEANEHNRFYAEVKELIFADSVGAWGTPLVSVERPPGINDIGIVAWNMKLSTPEFPRGREIIVVANDVTFKAGSFGPREDAFFDAVTNLACERKLPLIYLAATAGARLGVAEEIKSCFHVGWSDYESPERGFQYIYLTTQDYSRLSSSVIAHELQLKNGETRWVVDTIVGKEDGLGCENLHGSGAIASAYSKAYKETFTLTFVTGRAVGIGAYLARLGMRCIQRLDQPIILTGFSALNKLLGREVYSSHMQLGGPKIMATNGVVHQTVSDDLEGVSAILKWLSYVPPYVGGPLPIMKPLDPPERPVTYLPENACDALAAICGIQDGEGRWLGGMFDRESFVETLEGWAKTVITGRAKLGGIPVGVIAVETQTVMQVIPADPGQLDSAERVVPQAGQVWFPDSATKTAQALLDFNREELPLFILANWRGFSGGQRDLFEGILQAGSTIVENLRTYKQPAFVYIPMGGELRGGAWVVVDSKINPDHIEMYAERTAKGNVLEPEGLVEIKFRPKELEDCMLRLDPELIGLNTRLKEMKKQNASISEMETIRRSMTIRMKQLMPIYTQVATRFAELHDTSARMAAKGVIGKVVDWKESRAFFYRRLRRRVAEDALAKEVKEAAGEQLSHRSALDCIKKWYLASKGTEGDGEMWNDDESFFAWKDDPKNYENYLEELKAERVSNWFSHLAESSDVKALPNGLSLLLNKMNPLKREQVIDGLRQLLG

SEQ ID NO: 182899 - protein, 2253 aa, Zea Mays
MAEPYQLNGILNGMPNLSHPSSPSEVDEFCKALGGNSPIHSVLVANNGMAAVKFMRSIRIWALETFGTEKAILLVAMATPEDLKINAEHIRIADQFIEVPGGTNNNNYANVQLIVEIAERTRVSAVWPGWGHASENPELPDALDEKGIIFLGPPSAAMAALGDKIGSSLIAQAAGVPTLPWSGSHVKVPPESCHSIPEELYRNACVSTTEEAVASCQVVGYPAMIKASWGGGGKGIRKVHNDDEVRALFKQVQGEVPGSPIFIMKVASQSRHLEVQLLCDKHGNVAALHSRDCSVQRRHQKIIEEGPITIAAPDTVKELEQAARQLAKCVQYVGAATVEYLYSMETGEYYFLELNPRLQVEHPVTEWIAEINLPAAQVAVGMGIPLYNIPEIRRFYGMDHGGGYHNWRTISAVATKFDLDKAQSVRPKGHCVAVRVTSEDPDDGFKPTSGRVESGGAIHEFSDSQFGHVFAFGESRSLAIANMVLGLKEIQIRGEIRTNVDYTVDLLNATEYRENKIHTGWLDSRIAMRVRAERPPWYLSVVGGALYEASSRSSSVITDYVGYLSKGQIPPKHISLVNLTVTLNIEGSKYTIETVRGGPRSYKLRMNGSEIETEIHSLRDGGLLMQLDGNSHVIYAETEAAGTRLLINGRTCLLQKEHDPSKLLADTPCKLLRFLVADGSHVDADTPYAEVEVMKMCMPLLLPASGVIHFVMPEGQAMKANDLIARLDLDDPSSVRRAEPFHGSFPKLGPPTAISGKVHQKFAASVNSAHMILAGYEHNINEVVQDLLNCLDNPELPFLQWQELMSVLATRLPKDLRNEFGCIQLDGKYKEYELNPDFCKSKDFPARLLRGVIEANLAYCSEKDRVTNERLVEPLMSLVKSYEGGRESHARVVVKSLFEEYLSVEELFNDNLQSDVIERLRLQHAKDLEKVVYIVFSHQGVRSKNKLILRLMEALVYPNPSAYRDQLIRFSALNHTSYSELALKASQLLEHTKLSELRTSIARSLSELEMFTEEGERLSTPRRKMAINERMEDLVCAPLAAEDALVALFDHSDPTLQRRVVETYIRRLYQPYLVSGSIRMQWHRAGLIALWEFSEEHLKQRSGQDVPLQQVENPIEKSWGVMVVIKSLQFVATAIDVALKETSQYGIGVRSVSNSNHVHSNQSNMLHIALVGINNQMSTLQDSGDEDQTQERVNKLFKILKDNTITSHLNGASVKVVSCIIQRDEGRPPMRHSFQWSVDKLYYEEDPMLRHVEPPLSTFLELEKVNLEGYNEVKYTPSRDRQWHIYTLIKNKKDQRLNDQRMFLRTIVRQPSATNSFLTGNIDNEVGHTQASSSFTSNSILRSLMGALEEIELHAHSETVRSGHSHMYLCLLREQQLHELIPFSRMTGKIDKDEGTVCTLLKHMVLNLYEHVGVRMHRLSVCQWEVKLWLVCDGQASGAWRVVVTNVTGHTCTIDIYREVEDPTTHQLLYHSATTSAGPLHGVALNEPYKPLDAIDLKRYAARKNETTYCYDFPLAFETALKRSWKSSSYGVSEANEHNRFYAEVKELIFADSVGAWGTPLVSVERPPGINDIGIVAWNMKLSTPEFPRGREIIVVANDVTFKAGSFGPREDAFFDAVTNLACERKLPLIYLAATAGARLGVAEEIKSCFHVGWSDYESPERGFQYIYLTTQDYSRLSSSVIAHELQLKNGETRWVVDTIVGKEDGLGCENLHGSGAIASAYSKAYKETFTLTFVTGRAVGIGAYLARLGMRCIQRLDQPIILTGFSALNKLLGREVYSSHMQLGGPKIMATNGVVHQTVSDDLEGVSAILKWLSYVPPYVGGPLPIMKPLDPPERPVTYLPENACDALAAICGIQDGEGRWLGGMFDRESFVETLEGWAKTVITGRAKLGGIPVGVIAVETQTVMQVIPADPGQLDSAERVVPQAGQVWFPDSATKTAQALLDFNREELPLFILANWRGFSGGQRDLFEGILQAGSTIVENLRTYKQPAFVYIPMGGELRGGAWVVVDSKINPDHIEMYAERTAKGNVLEPEGLVEIKFRPKELEDCMLRLDPELIGLNTRLKEMKKQNASISEMETIRRSMTIRMKQLMPIYTQVATRFAELHDTSARMAAKGVIGKVVDWKESRAFFYRRLRRRVAEDALAKEVKEAAGEQLSHRSALDCIKKWYLASKGTEGDGEMWNDDESFFAWKDDPKNYENYLEELKAERVSNWFSHLAESSDVKALPNGLSLLLNKMNPLKREQVIDGLRQLLG

SEQ ID NO: 182900 - protein, 2154 aa, Zea Mays
MAEPYQLNGILNGMPNLSHPSSPSEVDEFCKALGGNSPIHSVLVANNGMAAVKFMRSIRIWALETFGTEKAILLVAMATPEDLKINAEHIRIADQFIEVPGGTNNNNYANVQLIVEIAERTRVSAVWPGWGHASENPELPDALDEKGIIFLGPPSAAMAALGDKIGSSLIAQAAGVPTLPWSGSHVKVPPESCHSIPEELYRNACVSTTEEAVASCQVVGYPAMIKASWGGGGKGIRKVHNDDEVRALFKQVQGEVPGSPIFIMKVASQSRHLEVQLLCDKHGNVAALHSRDCSVQRRHQKIIEEGPITIAAPDTVKELEQAARQLAKCVQYVGAATVEYLYSMETGEYYFLELNPRLQVEHPVTEWIAEINLPAAQVAVGMGIPLYNIPEIRRFYGMDHGGGYHNWRTISAVATKFDLDKAQSVRPKGHCVAVRVTSEDPDDGFKPTSGRVEELNFKSKPNVWAYFSVKSGGAIHEFSDSQFGHVFAFGESRSLAIANMVLGLKEIQIRGEIRTNVDYTVDLLNATEYRENKIHTGWLDSRIAMRVRAERPPWYLSVVGGALYEASSRSSSVITDYVGYLSKGQIPPKHISLVNLTVTLNIEGSKYTIETVRGGPRSYKLRMNGSEIETEIHSLRDGGLLMQLDGNSHVIYAETEAAGTRLLINGRTCLLQKEHDPSKLLADTPCKLLRFLVADGSHVDADTPYAEVEVMKMCMPLLLPASGVIHFVMPEGQAMKANDLIARLDLDDPSSVRRAEPFHGSFPKLGPPTAISGKVHQKFAASVNSAHMILAGYEHNINEVVQDLLNCLDNPELPFLQWQELMSVLATRLPKDLRNELDGKYKEYELNPDFCKSKDFPARLLRGVIEANLAYCSEKDRVTNERLVEPLMSLVKSYEGGRESHARVVVKSLFEEYLSVEELFNDNLQSDVIERLRLQHAKDLEKVVYIVFSHQGVRSKNKLILRLMEALVYPNPSAYRDQLIRFSALNHTSYSELALKASQLLEHTKLSELRTSIARSLSELEMFTEEGERLSTPRRKMAINERMEDLVCAPLAAEDALVALFDHSDPTLQRRVVETYIRRLYQPYLVSGSIRMQWHRAGLIALWEFSEEHLKQRSGQDVPLQQVENPIEKSWGVMVVIKSLQFVATAIDVALKETSQYGIGVRSVSNSNHVHSNQSNMLHIALVGINNQMSTLQDSGDEDQTQERVNKLFKILKDNTITSHLNGASVKVVSCIIQRDEGRPPMRHSFQWSVDKLYYEEDPMLRHVEPPLSTFLELEKVNLEGYNEVKYTPSRDRQWHIYTLIKNKKDQRLNDQRMFLRTIVRQPSATNSFLTGNIDNEVGHTQASSSFTSNSILRSLMGALEEIELHAHSETVRSGHSHMYLCLLREQQLHELIPFSRMTGKIDKDEGTVCTLLKHMAFETALKRSWKSSSYGVSEANEHNRFYAEVKELIFADSVGAWGTPLVSVERPPGINDIGIVAWNMKLSTPEFPRGREIIVVANDVTFKAGSFGPREDAFFDAVTNLACERKLPLIYLAATAGARLGVAEEIKSCFHVGWSDYESPERGFQYIYLTTQDYSRLSSSVIAHELQLKNGETRWVVDTIVGKEDGLGCENLHGSGAIASAYSKAYKETFTLTFVTGRAVGIGAYLARLGMRCIQRLDQPIILTGFSALNKLLGREVYSSHMQLGGPKIMATNGVVHQTVSDDLEGVSAILKWLSYVPPYVGGPLPIMKPLDPPERPVTYLPENACDALAAICGIQDGEGRWLGGMFDRESFVETLEGWAKTVITGRAKLGGIPVGVIAVETQTVMQVIPADPGQLDSAERVVPQAGQVWFPDSATKTAQALLDFNREELPLFILANWRGFSGGQRDLFEGILQAGSTIVENLRTYKQPAFVYIPMGGELRGGAWVVVDSKINPDHIEMYAERTAKGNVLEPEGLVEIKFRPKELEDCMLRLDPELIGLNTRLKEMKKQNASISEMETIRRSMTIRMKQLMPIYTQVATRFAELHDTSARMAAKGVIGKVVDWKESRAFFYRRLRRRVAEDALAKEVKEAAGEQLSHRSALDCIKKWYLASKGTEGDGEMWNDDESFFAWKDDPKNYENYLEELKAERVSNWFSHLAESSDVKALPNGLSLLLNKMNPLKREQVIDGLRQLLG

SEQ ID NO: 182901 - protein, 1696 aa, Zea Mays
MKHQAGAQALLLIMLVISAKHISLVNLTVTLNIEGSKYTIETVRGGPRSYKLRMNGSEIETEIHSLRDGGLLMQLDGNSHVIYAETEAAGTRLLINGRTCLLQKEHDPSKLLADTPCKLLRFLVADGSHVDADTPYAEVEVMKMCMPLLLPASGVIHFVMPEGQAMKANDLIARLDLDDPSSVRRAEPFHGSFPKLGPPTAISGKVHQKFAASVNSAHMILAGYEHNINEVVQDLLNCLDNPELPFLQWQELMSVLATRLPKDLRNELDGKYKEYELNPDFCKSKDFPARLLRGVIEANLAYCSEKDRVTNERLVEPLMSLVKSYEGGRESHARVVVKSLFEEYLSVEELFNDNLQSDVIERLRLQHAKDLEKVVYIVFSHQGVRSKNKLILRLMEALVYPNPSAYRDQLIRFSALNHTSYSELALKASQLLEHTKLSELRTSIARSLSELEMFTEEGERLSTPRRKMAINERMEDLVCAPLAAEDALVALFDHSDPTLQRRVVETYIRRLYQPYLVSGSIRMQWHRAGLIALWEFSEEHLKQRSGQDVPLQQVENPIEKSWGVMVVIKSLQFVATAIDVALKETSQYGIGVRSVSNSNHVHSNQSNMLHIALVGINNQMSTLQDSGDEDQTQERVNKLFKILKDNTITSHLNGASVKVVSCIIQRDEGRPPMRHSFQWSVDKLYYEEDPMLRHVEPPLSTFLELEKVNLEGYNEVKYTPSRDRQWHIYTLIKNKKDQRLNDQRMFLRTIVRQPSATNSFLTGNIDNEVGHTQASSSFTSNSILRSLMGALEEIELHAHSETVRSGHSHMYLCLLREQQLHELIPFSRMTGKIDKDEGTVCTLLKHMVLNLYEHVGVRMHRLSVCQWEVKLWLVCDGQASGAWRVVVTNVTGHTCTIDIYREVEDPTTHQLLYHSATTSAGPLHGVALNEPYKPLDAIDLKRYAARKNETTYCYDFPLAFETALKRSWKSSSYGVSEANEHNRFYAEVKELIFADSVGAWGTPLVSVERPPGINDIGIVAWNMKLSTPEFPRGREIIVVANDVTFKAGSFGPREDAFFDAVTNLACERKLPLIYLAATAGARLGVAEEIKSCFHVGWSDYESPERGFQYIYLTTQDYSRLSSSVIAHELQLKNGETRWVVDTIVGKEDGLGCENLHGSGAIASAYSKAYKETFTLTFVTGRAVGIGAYLARLGMRCIQRLDQPIILTGFSALNKLLGREVYSSHMQLGGPKIMATNGVVHQTVSDDLEGVSAILKWLSYVPPYVGGPLPIMKPLDPPERPVTYLPENACDALAAICGIQDGEGRWLGGMFDRESFVETLEGWAKTVITGRAKLGGIPVGVIAVETQTVMQVIPADPGQLDSAERVVPQAGQVWFPDSATKTAQALLDFNREELPLFILANWRGFSGGQRDLFEGILQAGSTIVENLRTYKQPAFVYIPMGGELRGGAWVVVDSKINPDHIEMYAERTAKGNVLEPEGLVEIKFRPKELEDCMLRLDPELIGLNTRLKEMKKQNASISEMETIRRSMTIRMKQLMPIYTQVATRFAELHDTSARMAAKGVIGKVVDWKESRAFFYRRLRRRVAEDALAKEVKEAAGEQLSHRSALDCIKKWYLASKGTEGDGEMWNDDESFFAWKDDPKNYENYLEELKAERVSNWFSHLAESSDVKALPNGLSLLLNKMNPLKREQVIDGLRQLLG

SEQ ID NO: 182902 - protein, 142 aa, Zea Mays
MRASRPAVHPVEAAPPPPAAAAEGPEAQVEGAAHPRGVRMKDPPGAPGTPAGLGLRLAQAFFAAAALAVMASTNDFPSVSAFSHFAVLVEPFASLCRHLCTSCQAIVEKCPSCMYIYYRRWDHRYNNLGRGMCFSRNHCSHR

SEQ ID NO: 182903 - protein, 151 aa, Zea Mays
MKDPPGAPGTPAGLGLRLAQAFFAAAALAVMASTNDFPSVSAFSYLVAAAILQCLWSLLLAFVDIYALLVKRSLRNARAVCIFTIGDGITGTITLGAACASAGITVLIGNDLNICAENHCASFETATALAFISWFALAPSCILNFWSMASR

SEQ ID NO: 182904 - protein, 255 aa, Zea Mays
MELPRPMGVLLLVFFVLCRVGDAATFMFVNRCTDTVWPGVLSNAGSPRLEPTGFELPPGAARAVPAPAGWSGRMWARTGCSQDGATGRLVCATGDCGSGSAECAGAGAAPPATLAEFTLDGSGGLDFYDVSLVDGYNLPVLVETSGGAGSSGPASCAAAGCAADLNAMCPAELRAGGGAACRSACDAFARPEYCCSGAFATPAACRPTAYSQVFKSACPRSYSYAFDDPTSTFTCGGGPDYTVTFCPGATPRSGL

SEQ ID NO: 182905 - protein, 639 aa, Zea Mays
MGEGVKEMLAPPIQLADEVAKQCAAARSFRAECAELKARADKLAALLRQAARAPELYDRPAARILAGATQALSRASALAARCARGHPRLRSLFTLSPAAGFPRAVAALDTALEDVAWLLRISSPGATGEGDDDSLLGLPNIAQNEPILFLIWDHVARLHTGSPAARADSAANLASLARDNQHFAKLIIEEDGVPPLLKLLKDGTDESQEAAARALGFLGCDAENVDKLVQAAVAEAIASLADRSSTCQDLFAQNNAVRYLVAHLASGTIQEHSRYSVGSSSSKNSAAAAATAQQHMKSLHSVVLAKTLSMRHSGDCDTSIRGADGLPRMSNGTPGCDQDTKRNPQMQSVVHSAMSAKTNTNGSLVPPFRPQLGTSGSSGRGAREVEDPETKAQLKAMAAKALWKLAHNHLGVCKSITESRALLCFAVLLEKGDGDMGTDVQYFSAMAIMEIARVAEHSLVLRQSAFKPSSPAAKAVVDQLLGVVCRGEYDTLLLPCITGLGCLARTFTASETRIVAPLVQLLDEREPPVIKEAVVALTKFACTENHLHVNHCKAIVDDGGARHLVQLVYLGDEVQIEALILLCYIALYVPESEELAQAGVLAVLLWASKQAQMVQDTRVEALLPDAKGRLELFQSRASR

SEQ ID NO: 182906 - protein, 270 aa, Zea Mays
MSKVDIILKLADIFQAGNLQNIQPLTRARVPIVKLMDPKTGLSCDICVNNLLAVVNTKLLRDYGQIDKRLQQLAFIVKHWAKTRRVNETYQGTLSSYAYVIMCIHLLQLRRILPCLQEMEATYYVKVEEINCAYFDQVDKLNNYGAHNRDTVSRLLWSFFHYWAYEHDYTRDVISIRTGRIISKERKDWTRRVGNDRHLICIEDPFEISHDLGRVVDKFTIKILREEFERAANILQFDPNPSVTLFEPYVPPPSPSLLQEETANAAEIEL

SEQ ID NO: 182907 - protein, 633 aa, Zea Mays
MADSSGRSGGRPTSASPSTATHTSPASFDGGLLLRLLQNPPSAHPREEILAPSPVAPGAHHFFSDPAVAAVGPLFAASAQTQGGDFGWSSTSTTHVQQQPRFSDPRFAPGDPFAALGGRGFGSGDAVRAERPRSGAPPPGFGKPSHPLPAARDARSASGVVLRKEQYNPRPVDFVPALADVRDPVGRMPHGHGEQFYREQQQDRFLSRTPPEINANGQFGRMPIGEQHTLPILGGRRLHVDQYMPPVQEGRAPHGGHGKHESRLTNPLQREQRWQGLREDKGYASRKLPNVNAHYTSGKALVKEVHHLTIPAGSSVPVEITENQASGLEGGRIGKVVLEDGIDEEGVVEASKFEVSYEKSKIRFAGHDEQDDGGDREDAIIEQMAQNLLIDGNGDAKGVVLEKPILRSKDFRSDFSRGHHVSSQRIRFQRRNRPCRYDIDRFTPNFLSIFESLVPSEEEIANQKQLLTSLSRLINTEWPNSKLYLYGSCANSFGFSNSDIDLCLSIDNKEMSKVDIILKLADIFQAGNLQNIQPLTRARVPIVKLMDPKTGLSCDICVNNLLAVVNTKLLRDYGQIDKRLQQLAFIVKHWAKTRRVNETYQGTLSSYAYVIMCIHLLQLRRILPCLQVHNLRV

SEQ ID NO: 182908 - protein, 753 aa, Zea Mays
MADSSGRSGGRPTSASPSTATHTSPASFDGGLLLRLLQNPPSAHPREEILAPSPVAPGAHHFFSDPAVAAVGPLFAASAQTQGGDFGWSSTSTTHVQQQPRFSDPRFAPGDPFAALGGRGFGSGDAVRAERPRSGAPPPGFGKPSHPLPAARDARSASGVVLRKEQYNPRPVDFVPALADVRDPVGRMPHGHGEQFYREQQQDRFLSRTPPEINANGQFGRMPIGEQHTLPILGGRRLHVDQYMPPVQEGRAPHGGHGKHESRLTNPLQREQRWQGLREDKGYASRKLPNVNAHYTSGKALVKEVHHLTIPAGSSVPVEITENQASGLEGGRIGKVVLEDGIDEEGVVEANAIIEQMAQNLLIDGNGDAKGVVLEKPILRSKDFRSDFSRGHHVSSQRIRFQRRNRPCRYDIDRFTPNFLSIFESLVPSEEEIANQKQLLTSLSRLINTEWPNSKLYLYGSCANSFGFSNSDIDLCLSIDNKEMSKVDIILKLADIFQAGNLQNIQPLTRARVPIVKLMDPKTGLSCDICVNNLLAVVNTKLLRDYGQIDKRLQQLAFIVKHWAKTRRVNETYQGTLSSYAYVIMCIHLLQLRRILPCLQEMEATYYVKVEEINCAYFDQVDKLNNYGAHNRDTVSRLLWSFFHYWAYEHDYTRDVISIRTGRIISKERKDWTRRVGNDRHLICIEDPFEISHDLGRVVDKFTIKILREEFERAANILQFDPNPSVTLFEPYVPPPSPSLLQEETANAAEIEL

SEQ ID NO: 182909 - protein, 354 aa, Zea Mays
MADSSGRSGGRPTSASPSTATHTSPASFDGGLLLRLLQNPPSAHPREEILAPSPVAPGAHHFFSDPAVAAVGPLFAASAQTQGGDFGWSSTSTTHVQQQPRFSDPRFAPGDPFAALGGRGFGSGDAVRAERPRSGAPPPGFGKPSHPLPAARDARSASGVVLRKEQYNPRPVDFVPALADVRDPVGRMPHGHGEQFYREQQQDRFLSRTPPEINANGQFGRMPIGEQHTLPILGGRRLHVDQYMPPVQEGRAPHGGHGKHESRLTNPLQREQRWQGLREDKGYASRKLPNVNAHYTSGKALVKEVHHLTIPAGSSVPVEITENQASGLEGGRIGKVVLEDGIDEEGVVEARKML

SEQ ID NO: 182910 - protein, 686 aa, Zea Mays
MADSSGRSGGRPTSASPSTATHTSPASFDGGLLLRLLQNPPSAHPREEILAPSPVAPGAHHFFSDPAVAAVGPLFAASAQTQGGDFGWSSTSTTHVQQQPRFSDPRFAPGDPFAALGGRGFGSGDAVRAERPRSGAPPPGFGKPSHPLPAARDARSASGVVLRKEQYNPRPVDFVPALADVRDPVGRMPHGHGEQFYREQQQDRFLSRTPPEINANGQFGRMPIGEQHTLPILGGRRLHVDQYMPPVQEGRAPHGGHGKHESRLTNPLQREQRWQGLREDKGYASRKLPNVNAHYTSGKALVKEVHHLTIPAGSSVPVEITENQASGLEGGRIGKVVLEDGIDEEGVVEASKFEVSYEKSKIRFAGHDEQDDGGDREDAIIEQMAQNLLIDGNGDAKGVVLEKPILRSKDFRSDFSRGHHVSSQRIRFQRRNRPCRYDIDRFTPNFLSIFESLVPSEEEIANQKQLLTSLSRLINTEWPNSKLYLYGSCANSFGFSNSDIDLCLSIDNKEMSKVDIILKLADIFQAGNLQNIQEMEATYYVKVEEINCAYFDQVDKLNNYGAHNRDTVSRLLWSFFHYWAYEHDYTRDVISIRTGRIISKERKDWTRRVGNDRHLICIEDPFEISHDLGRVVDKFTIKILREEFERAANILQFDPNPSVTLFEPYVPPPSPSLLQEETANAAEIEL

SEQ ID NO: 182911 - protein, 129 aa, Zea Mays
MYQYYVSTTPSSSSVAPSSTSAVDMIKSSIEEELDSYIFDGQGHDDSIDTSDLEKYLADPILKVGKSNQHTFDILAWWKAHKEDSLHQRLDSWSKKKVPRLRVLLFLIWFMKWMNLRLLQEIFHLRMKT

SEQ ID NO: 182912 - protein, 105 aa, Zea Mays
MIKSSIEEELDSYIFDGQGHDDSIDTSDLEKYLADPILKVGKSNQHTFDILAWWKAHKEDSLHQRLDSWSKKKVPRLRVLLFLIWFMKWMNLRLLQEIFHLRMKT

SEQ ID NO: 182913 - protein, 194 aa, Zea Mays
MWRRVSKEVPAGASAEHAMAGGSALGGSATTDGGKRHTRRGQRKRRIKAGDGLGDHGVAGSVPLLLSLKNSSPTALDDARPLRIIGRSGKIDRADIELHCALIVSVIGQKGSGRASEVRDALALRFDLDADALHLRNVASGSFLFFPSEDLAIRVFNGGAPLHVPPLRMHVKRWSRQAFASGSSVMPSLIDIEL

SEQ ID NO: 182914 - protein, 107 aa, Zea Mays
MLIRRRYFSNELPAPSPWSLTPREDTILPVETVNDDDMFQRKSYGGQSYKYNGVTPLPAQRNLTPPPTLYPQQPMSSSSENYRYHRFSSSSIPDSSGGSKSRANLNI

SEQ ID NO: 182915 - protein, 115 aa, Zea Mays
MSSPTSPKTIRIGVVTVGVYIQLSFELVFSFPLPGTDQSTVISVDIALSIAPIVLCGLYGSRNPLCSRGLFCVLLLVVACQFNLLSSGSCWSLRCLGDPFESKHTHSGAMTFGIS

SEQ ID NO: 182916 - protein, 446 aa, Zea Mays
MPRKTVAEKPRLQYRRCYPPDSFAVSNGGRVGGTPNKNPGPKQVWEPMDARKKTGNGNSATGAADGSDQVECSNNISECEKLEAVCDSLVEICSEISAETCKSDTDQPWRQGEKNQSACSDESKCVDKPNCSKDTGRTTNLTTSDSSSCLSEGDRDSSMTSLSVQNVESSSASDSEESSDRNNSSPGDIPAKNVSRTLLEMCAGNGFREYQPKGLNPPNGNQFGFMVAPSQEQMLYQQKVHAPPYSSPFMGFHNHPLAVPTNGYLPYTQPGHFYPASMTPVGYGVAGDQCVDFSMQYRNNIHPYSGPEFGFLPSQPVHKTSVNFHAVPVTPLTPLCSRGMPVATNQERQQSPALFPKLKQAVLVPETVCAGDNTFKQKGDDVDSTPFSLFQFNLPIAPPTLATSKERSGELAPAQIARVQPCSREETNVKEYNIFSGCDGVMFQLN

SEQ ID NO: 182917 - protein, 300 aa, Zea Mays
MKNAYKQADGRKVDNRRVLVDVERGRTVPNWRPRRLGGGLGSSRMGGTDTDKKDSTREQQQGGRPRSEEPRRDDRRADRDREKSRERVRERDREERTRERSHDRTRDRDLRDEKHHHRDRERTRDRERGKDRERDHGRDRERDRRDRDKDRGRDYDRERDRGRSHDRHRERGRDRGERDYERTSHERDRGHMHERDADYGNGGTKHDKNLSSYGQDYGYGQYEQHKGHDAYGYSQDVRGHETEHSKRHEHEYYRVDSYGKMEANYQMPPNNAEPEGPEEGEAYEEGDYQYHRSGEHMKEA

SEQ ID NO: 182918 - protein, 1354 aa, Zea Mays
MGSRGRMLFDLNELPAEVEEAAAAVVPKESAAVVPKESAAVVPQEAVVVALQEAAVVVSQPQKSLRVPTTYAPTLFQRGEGSQSQGILNNNAFKHASIGSGFQPFVRNSKDSNNTKEPMKVEDNHNSSIASLSMVNNQITDSAASKVETCNKVSQAIEREEGEWSDADGISENAGSSNKDEFTGTASTNLKKESQESEPHLIKSGDVTKDDTAAECSDAEKVDASEDRVHGSTGSDNMQNSECKGNQPGDDLDLCNRSRDVKGVEANYALRFASNPAKRPKLNEHKEAMLGKKRARQTVFINVEDAKQAGTMKTSTPRRQSSFPAPIVTRTVKEASRGAGEKAAEKQSQQAIRDQRQPEMMGSERSNSADPSDQYTESNGDAELGTQGRSKKMNAEDPASDGYQQPVQRQASFKQSMDLKQPKSRSFSSQRTFLTGTNNADQKPASKRSIISKKQTFVNNVQDSSVERLIREVTNDKFWHNPEEAELECVPGSFESAEEYIRVFEPLLFEECRAQLYSSYEESLEAVGRDAHVAVRVKTVDRRERGWYDVVVLPIHEQKWNFKEGDVAILSFPRPGSAAQSGRSSRRAMGSNEDAVSECGRLVGTVRRHMPIDTRDPIGAIIHFYLGDSFDSNSEANVLNKLQPRSTWYLTGLGSLATTQREYVALHAFRRLSVQMQNAILQPSPEHFPKYQEQPPVMPDCFTPNFADHLHRSFNGPQLSAIHWAATHTAAGTNNGVLKKQEPWPFTLVQGPPGTGKTHTVWGMLNVIHLVQYQHYYAALLKKLAPESYKQVSGSTSTSSETVAAGSIDELLQSMDQNLFRTLPKLCPKPRMLVCAPSNAATDELLARVLDRGFIDGEMKVYRPDVARVGVDSQSRAAQAVSVERRTDQLLMKGREEVIGWLHQLKAREQQLSQEIAYLQRELNIVAAAGRSQGSVGVDPDVLAQRDRNRDILLQKLAASVESRDKVLVEMSRLLILESRFGLGSNFNMEDASEVGVLPPLALGAARCVLVGDPQQLPATVISKAAGTLLYSRSLFERFQQAGCPTILLSVQYRMHPQIREFPSKYFYQGRLTDSESVVKLPDEAYYRDALMAPYIFYDLSHGRESHRGGSSSYQNIHEAQFALRLYEHLQKFLKANGAKKVSVGIITPYKLQLKCLQREFKDVMNTEEGKDIYINTVDAFQGQERDIIIMSCVRASNHGVGFVADIRRMNVALTRARRALWVVGNANALMQSEDWASLIADAKARKCFMDLDCIPKDFLPMKVPSNTPGRNSSNNIRNMRTGGGPRPRHLDMFSEPRTGMNMRPDEDERLNSVPRNGSYRNLDDFVRPGDRPRDNLQFGVPRRPNSSNGRREV

SEQ ID NO: 182919 - protein, 634 aa, Zea Mays
MGSRGRMLFDLNELPAEVEEAAAAVVPKESAAVVPKESAAVVPQEAVVVALQEAAVVVSQPQKSLRVPTTYAPTLFQRGEGSQSQGILNNNAFKHASIGSGFQPFVRNSKDSNNTKEPMKVEDNHNSSIASLSMVNNQITDSAASKVETCNKVSQAIEREEGEWSDADGISENAGSSNKDEFTGTASTNLKKESQESEPHLIKSGDVTKDDTAAECSDAEKVDASEDRVHGSTGSDNMQNSECKGNQPGDDLDLCNRSRDVKGVEANYALRFASNPAKRPKLNEHKEAMLGKKRARQTVFINVEDAKQAGTMKTSTPRRQSSFPAPIVTRTVKEASRGAGEKAAEKQSQQAIRDQRQPEMMGSERSNSADPSDQYTESNGDAELGTQGRSKKMNAEDPASDGYQQPVQRQASFKQSMDLKQPKSRSFSSQRTFLTGTNNADQKPASKRSIISKKQTFVNNVQDSSVERLIREVTNDKFWHNPEEAELECVPGSFESAEEYIRVFEPLLFEECRAQLYSSYEESLEAVGRDAHVAVRVKTVDRRERGWYDVVVLPIHEQKWNFKEGDVAILSFPRPGSAAQSGRSSRRAMGSNEDAVSECGRLVGTVRRHMPIDTRDPIGAIIHFYLGDSFDSNR

SEQ ID NO: 182920 - protein, 159 aa, Zea Mays
MACVVTVRYEAELTLMQNSCDQLAIGKETTRRLGMGTKCKDESLASLPIDELTEKADGFARVFPEHMYEKHLCGMTWDGVNDAPTLKKADIGIAIADSTDAARGASDIVLNEPGLSIYVESITICIVLGFMLLALIWKFDFPTFTVQIIAILNDVQAAY

SEQ ID NO: 182921 - protein, 76 aa, Zea Mays
MACVVTVRYEAELTLMQNSCDQLAIGKETTRRLGMGTKCKDESLASLPIDELTEKADGFARVFPAWFYASCADMEV

SEQ ID NO: 182922 - protein, 162 aa, Zea Mays
MALLESFQIYVESITICIVLGFMLLALIWKFDFPTFTVQIIAILNDALRKFPRVIFIRFPLPCTFKSAQSIRALNLHGLARSQLLLSHPTLVPYLTVVCGLSASPYILWCLQNATLIVVYANWAFAAIKGIGWGWAGVKWLYIIVFYFLLRIINFLILLYAE

SEQ ID NO: 182923 - protein, 151 aa, Zea Mays
MALLESFQLGFMLLALIWKFDFPTFTVQIIAILNDALRKFPRVIFIRFPLPCTFKSAQSIRALNLHGLARSQLLLSHPTLVPYLTVVCGLSASPYILWCLQNATLIVVYANWAFAAIKGIGWGWAGVKWLYIIVFYFLLRIINFLILLYAE

SEQ ID NO: 182924 - protein, 795 aa, Zea Mays
MSVVGFDVGNDTLVAAAARQRGIDVLLNAESKRESPAAIAFSRNARLIGCHAASASSAHAPFSSVKRLLMGATGRHPDSSLLRDLSRLPFPAAVGGGAVVHADHIGRRIALSPTHLLSMLLAYLKQLAEADLGGAPVADCVISVPCYFTQAQRRAYLDAAAIAGLRPLRLMHDLAATALGYGLYRSDLGGSGGPTCVAFVDVGQCDTQVAVVSFDMSGMKVLSHGFDADLGGRDFDEVLFEHFAEEFKDRYMIDVTGNVKASMRLRAACEKAKKVLSANAEAVVNIECLIEEKDVRGVIRREDFEKLCARLLERVVEPCNRAVTDSRIGLERLHSVELVGSGSRVPAIAKVLKEFFRKEPSRTLNSSECVARGCALQCAMLSPTFRVREYEVHDAIPASIGFYTSDGPVSTLSSDALFRRGLPFPSVKIITLQKNDSFSFDAYYVDANELPPGTSTDIGSFQNQYVLAEKGALGCAIKNKRHDYMKCDLICHGRLDNVFLVDSNVLKHNCSGNHALLSDGKCWGYDQLAKIGPFQAHMEASKVKVKIRLNLHGLVSVESAALIDDYQRNATSADHMEVDTSGDDMGHKSRSERSIQRQELPITEYICCAMSKQELLEAQEQEHQLAYQDKLMERTKDRKNALESYVYDTRNKTEDWLYEEGDDETEVVYSSKLEELKKLVDPIENRCNDDEVRAEIARELLKCIVDHRMAAKSLSAPERDAVDNECNKAEQWLSEGSKLQESLPKNVDPVLWSCEIKGKEEELDMFCRNITRHKGSPARTDGSRGSDHMPTPDRD

SEQ ID NO: 182925 - protein, 782 aa, Zea Mays
MSVVGFDVGNDTLVAAAARQRGIDVLLNAESKRESPAAIAFSRNARLIGCHAASASSAHAPFSSVKRLLMGATGRHPDSSLLRDLSRLPFPAAVGGGAVVHADHIGRRIALSPTHLLSMLLAYLKQLAEADLGGAPVADCVISVPCYFTQAQRRAYLDAAAIAGLRPLRLMHDLAATALGYGLYRSDLGGSGGPTCVAFVDVGQCDTQVAVVSFDMSGMKVLSHGFDADLGGRDFDEVLFEHFAEEFKDRYMIDVTGNVKASMRLRAACEKAKKVLSANAEAVVNIECLIEEKDVRGVIRREDFEKLCARLLERVVEPCNRAVTDSRIGLERLHSVELVGSGSRVPAIAKVLKEFFRKEPSRTLNSSECVARGCALQCAMLSPTFRVREYEVHDAIPASIGFYTSDGPVSTLSSDALFRRGLPFPSVKIITLQKNDSFSFDAYYVDANELPPGTSTDIGSFQIGPFQAHMEASKVKVKIRLNLHGLVSVESAALIDDYQRNATSADHMEVDTSGDDMGHKSRSERSIQRQELPITEYICCAMSKQELLEAQEQEHQLAYQDKLMERTKDRKNALESYVYDTRNKTEDWLYEEGDDETEVVYSSKLEELKKAHCCCRWFRGQGWLVSDSSWPWVVVDIWMRSVGPGVTLATRLAWLCSPGSGYAARAGDPIENRCNDDEVRAEIARELLKCIVDHRMAAKSLSAPERDAVDNECNKAEQWLSEGSKLQESLPKNVDPVLWSCEIKGKEEELDMFCRNITRHKGSPARTDGSRGSDHMPTPDRD

SEQ ID NO: 182926 - protein, 805 aa, Zea Mays
MSVVGFDVGNDTLVAAAARQRGIDVLLNAESKRESPAAIAFSRNARLIGCHAASASSAHAPFSSVKRLLMGATGRHPDSSLLRDLSRLPFPAAVGGGAVVHADHIGRRIALSPTHLLSMLLAYLKQLAEADLGGAPVADCVISVPCYFTQAQRRAYLDAAAIAGLRPLRLMHDLAATALGYGLYRSDLGGSGGPTCVAFVDVGQCDTQVAVVSFDMSGMKVLSHGFDADLGGRDFDEVLFEHFAEEFKDRYMIDVTGNVKASMRLRAACEKAKKVLSANAEAVVNIECLIEEKDVRGVIRREDFEKLCARLLERVVEPCNRAVTDSRIGLERLHSVELVGSGSRVPAIAKVLKEFFRKEPSRTLNSSECVARGCALQCAMLSPTFRVREYEVHDAIPASIGFYTSDGPVSTLSSDALFRRGLPFPSVKIITLQKNDSFSFDAYYVDANELPPGTSTDIGSFQIGPFQAHMEASKVKVKIRLNLHGLVSVESAALIDDYQRNATSADHMEVDTSGDDMGHKSRSERSIQRQELPITEYICCAMSKQELLEAQEQEHQLAYQDKLMERTKDRKNALESYVYDTRNKLSERYRSFATDSEREQISFNLQQTEDWLYEEGDDETEVVYSSKLEELKKAHCCCRWFRGQGWLVSDSSWPWVVVDIWMRSVGPGVTLATRLAWLCSPGSGYAARAGDPIENRCNDDEVRAEIARELLKCIVDHRMAAKSLSAPERDAVDNECNKAEQWLSEGSKLQESLPKNVDPVLWSCEIKGKEEELDMFCRNITRHKGSPARTDGSRGSDHMPTPDRD

SEQ ID NO: 182927 - protein, 411 aa, Zea Mays
MGAAAMRRELLPRPALHRQPFVAQLPVASIERLWRSLRLQTCSRMWSLPEADEVAVLPNLRREEEAERKTGDCNVGKVQGKHDYNDMLRVSDAHHNSQTLDKAIANLETELSAARTLQDSFLNGSPVQEDYKASESTGRRKYLMVIGINTAFSSRKRRDSIRNTWMPTGEIRKKLEEERGIIVRFVIGHSAISGGIVDRAIQAEDKKHGDFMRLDHVEGYLELSGKTRTYFATAVALWDANFYVKVDDDVHVNIATLGNILSKHISKPRVYIGCMKSGPVLSDKDVRYYEPEHWKFGEVGNKYFRHATGQLYAISKDLAAYISLNKHVLHKYINEDVSLGAWLIGLDVEHIDDRRLCCGTPPDCEWKAQAGNTCAASFDWKCSGICNSVQNIWGVHKKCSEDEKALLTVSF

SEQ ID NO: 182928 - protein, 261 aa, Zea Mays
MGWRRGGGADGVARRWVLLLCVGSFCLGLLFTDRMWSLPEADEVAVLPNLRREEEAERKTGDCNVGKVQGKHDYNDMLRVSDAHHNSQTLDKAIANLETELSAARTLQDSFLNGSPVQEDYKASESTGRRKYLMVIGINTAFSSRKRRDSIRNTWMPTGEIRKKLEEERGIIVRFVIGHSAISGGIVDRAIQAEDKKHGDFMRLDHVEGYLELSGKTRTYFATAVALWDANFYVKVDDDVHVNIGMFCTNISTRTCLWELG

SEQ ID NO: 182929 - protein, 255 aa, Zea Mays
MGWRRGGGADGVARRWVLLLCVGSFCLGLLFTDRMWSLPEADEVAVLPNLRREEEAERKTGDCNVGKVQGKHDYNDMLRVSDAHHNSQTLDKAIANLETELSAARTLQDSFLNGSPVQEDYKASESTGRRKYLMVIGINTAFSSRKRRDSIRNTWMPTGEIRKKLEEERGIIVRFVIGHSAISGGIVDRAIQAEDKKHGDFMRLDHVEGYLELSGKTRTYFATAVALWDANFYVKQHLEISYPNIFQSPGYTLDA

SEQ ID NO: 182930 - protein, 209 aa, Zea Mays
MGWRRGGGADGVARRWVLLLCVGSFCLGLLFTDRMWSLPEADEVAVLPNLRREEEAERKTGDCNVGKVQGKHDYNDMLRVSDAHHNSQTLDKAIANLETELSAARTLQDSFLNGSPVQEDYKASESTGRRKYLMVIGINTAFSSRKRRDSIRNTWMPTGEIRKKLEEERGIIVRFVIGHRIMLKDTLSCQGKPGHTLQQLLLYGMLTSM

SEQ ID NO: 182931 - protein, 54 aa, Zea Mays
MPFSVAGPDESCDWSVSKKWIQMFIASAKSLHSISLFYGFFVGGSDLTLPALLI

SEQ ID NO: 182932 - protein, 52 aa, Zea Mays
MLITLFQVFTGLGSLKYDALCFLYIIKGQSVETVGLAYTYSTISCLVLFHIF

SEQ ID NO: 182933 - protein, 506 aa, Zea Mays
MHGRPRRPAKLEDEEAASAKAAKLRDLQAQVLHNHHGRTYTKEAIGLSFKLLEINPEAYTAWNYRKLAFQHNVKELSDPEAIKSAVDDELRVVEVALRQNPKSYGAWYHRKWLLCQKLAPVDFKREFGLLDKLLKVDARNFHGWNYRRFLARFMGVSDEEELKYTMDKISDNFSNYSAWHNRSILLSNLLIQQSKGFESKQKIFSEEFELVTQALFTDPSDQSGWFYHLWLLAQTSCPDNPQLIASWPSNAAKLSSSLIKEKAEQHRQSSILSRTVPIVLYFNEPVKGLNQSSVNLKSDLEFSKDIIWRPLTMADSGYSNCWATDLQIINECSSLQEYSVEVSIPCSNGIVSRSGSNYNCPVHFTFGIELISNDPVQGLDMFDKPVAWNCSESFQPHGNRDPIPFDLLKITSALIEHDSNWHFERLSEEIDLFRELPDDNSKFGKLTLARLLLACSAIKSRGRSLIERKGYCEEALGLFTDLIHLDPSHKQYYEDERSLVLMDKVT

SEQ ID NO: 182934 - protein, 648 aa, Zea Mays
MHGRPRRPAKLEDEEAASAKAAKLRDLQAQVLHNHHGRTYTKEAIGLSFKLLEINPEAYTAWNYRKLAFQHNVKELSDPEAIKSAVDDELRVVEVALRQNPKSYGAWYHRKWLLCQKLAPVDFKREFGLLDKLLKVDARNFHGWNYRRFLARFMGVSDEEELKYTMDKISDNFSNYSAWHNRSILLSNLLIQQSKGFESKQKIFSEEFELVTQALFTDPSDQSGWFYHLWLLAQTSCPDNPQLIASWPSNAAKLSSSLIKEKAEQHRQSSILSRTVPIVLYFNEPVKGLNQSSVNLKSDLEFSKDIIWRPLTMADSGYSNCWATDLQIINECSSLQEYSVEVSIPCSNGIVSRSGSNYNCPVHFTFGIELISNDPVQGLDMFDKPVAWNCSESFQPHGNRDPIPFDLLKITSALIEHDSNWHFERLSEEIDLFRELPDDNSKFGKLTLARLLLACSAIKSRGRSLIERKGYCEEALGLFTDLIHLDPSHKQYYEDERSLVLMDKLTCDMETFMKHCSVQVQPNSAPLNHVQLCRLSLTCIGFAERLLWVQMLDLSHNSLRSVEGLEALQHLVFLNISNNQISGFTALESLTKIISLKVLDLSFNKIGAHSIDTTRYICSSPFSHKMEASEAFEAYQKLQARRTSELLS

SEQ ID NO: 182935 - protein, 194 aa, Zea Mays
MADSGYSNCWATDLQIINECSSLQEYSVEVSIPCSNGIVSRSGSNYNCPVHFTFGIELISNDPVQGLDMFDKPVAWNCSESFQPHGNRDPIPFDLLKITSALIEHDSNWHFERLSEEIDLFRELPDDNSKFGKLTLARLLLACSAIKSRGRSLIERKGYCEEALGLFTDLIHLDPSHKQYYEDERSLVLMDKVT

SEQ ID NO: 182936 - protein, 282 aa, Zea Mays
MESRLKGAEMGPELPPGFLFCCSSVSAGGDYPYPRNENSMKKFSEDGIPTKQSPLEVSESSDVIITMLPSSTHVLEVYNGPNGLLCRGERLGPWLYIDSSTVDPQTSRKISTAISRCLLKEKKGYAESPKILDAPVSGGVPAAEAGKLTFMAAKICNNMAMAISMLGVSEAFALGQNLGIKATTLTDIFNCSSARCWSSDTYNPVPGVMEGVPSSRNYSGGFTSKLMAKDLDLAMASASGVGFKCPMGSNALEIYRKLCEDGCELKDFSCAFRHYYSGKNEE

SEQ ID NO: 182937 - protein, 314 aa, Zea Mays
MESRLKGAEMGPELPPGFLFCCSSVSAGGDYPYPRNENSMKKFSEDGIPTKQSPLEVSESSDVIITMLPSSTHVLEVYNGPNGLLCRGERLGPWLYIDSSTVDPQTSRKISTAISRCLLKEKKGYAESPKILDAPVSGGVPAAEAGKLTFMVGGLEEAYLAAKPLLQAMGEKTIYCGGAGNGSAAKICNNMAMAISMLGVSEAFALGQNLGIKATTLTDIFNCSSARCWSSDTYNPVPGVMEGVPSSRNYSGGFTSKLMAKDLDLAMASASGVGFKCPMGSNALEIYRKLCEDGCELKDFSCAFRHYYSGKNEE

SEQ ID NO: 182938 - protein, 76 aa, Zea Mays
MSASNINVTDSQIPLTVPNSHIGRDVVVHAAPGDLRKELLVFISVQLKISDYILVLGHRICFKFQQWSSEAHIHED

SEQ ID NO: 182939 - protein, 203 aa, Zea Mays
MQWARGCHQGGRGRRAGTDAEAVNGEEGAGWGKLRRQVKPPGPGGDIHVAVGVGAGRLPPTSRTSARGSASRRQRSRPSPHTLPRRYPTRWRPPRLPPPIKSSPSVRSLMTSILSPVSSRTYKIVDYVDVKMNSTVHKGMPHQSRQEHQHHQVCHRRRNKQAVLAEVALYQASEWHHILHEGGYCCGSLQQVTRHMRLPADRQ

SEQ ID NO: 182940 - protein, 183 aa, Zea Mays
MQWARGCHQGGRGRRAGTDAEAVNGEEGAGWGKLRRQVKPPGPGGDIHVAVGVGAGRLPPTSRTSARGSASRRQRSRPSPHTLPRRYPTRWRPPRLPPPIKSSPSVRSLMTSILSPVSSRTYKIVDYVDVKMNSTVHKGMPHQSRQEHQHHQVCHRRRNKQAGYCCGSLQQVTRHMRLPADRQ

SEQ ID NO: 182941 - protein, 219 aa, Zea Mays
MQWARGCHQGGRGRRAGTDAEAVNGEEGAGWGKLRRQVKPPGPGGDIHVAVGVGAGRLPPTSRTSARGSASRRQRSRPSPHTLPRRYPTRWRPPRLPPPIKSSPSVRSLMTSILSPVSSRTYKIVDYVDVKMNSTVHKGMPHQSRQEHQHHQVCHRRRNKQAGYCCGSLQQVTRHMRLPAETIMQTDNEALLARSSTTKETEKTARKRHVSLTETILLA

SEQ ID NO: 182942 - protein, 253 aa, Zea Mays
MVDVDLNKCEPWDLPDIACIGGKEWYFYSLRDRKYATGQRTNRATDSGYWKATGKDRPISRKGLLVGMRKTLVFYQGRAPKGKKTEWVMHEFRMEGRDDPMKLPFKEDWVLCRVFYKSRATVAKPPTESSSFNIDAATTSLPPLIDNNFNISFDQPGSSSVQNLEGYEQVPCFSSNPSQQPSSSMNAARLPPSAAMADPEQQMGKSIIKDVLMSQFSRFEGSVKREAPPSNFSQDGFEYLAESGFTQMWNSFN

SEQ ID NO: 182943 - protein, 206 aa, Zea Mays
MPPSPRRLRRPRLSRRRTSTCRPPTRRSCRMRTPPLCRTSGGCRSSSGSRGAGQWARPCRTVVGPSRRTSRSKCARTRHCCGSFDAVVNRLQAALDVKAAALWLDLEALDDANARLVGCLDRTLAPPSDGSAIRITHATSAAPRRESAPNQRPKWWIPLKKDPLWCGTRCGRAVRGRAVAAGFAGVRSGQGGHASASRRACRAVKA

SEQ ID NO: 182944 - protein, 268 aa, Zea Mays
MLYIEFPAEEDEDEDADRLARSQAPGADGVIAWQRVVVLKPDPPNPNPSADGEGIGRRRPGRMPPSPRRLRRPRLSRRRTSTCRPPTRRSCRMRTPPLCRTSGGCRSSSGSRGAGQWARPCRTVVGPSRRTSRSKCARTRHCCGSFDAVVNRLQAALDVKAAALWLDLEALDDANARLVGCLDRTLAPPSDGSAIRITHATSAAPRRESAPNQRPKWWIPLKKDPLWCGTRCGRAVRGRAVAAGFAGVRSGQGGHASASRRACRAVKA

SEQ ID NO: 182945 - protein, 331 aa, Zea Mays
MTLEYWEDLFCKLNEMRRYRRIVGSLAGSCLSAAIPLLSSNKETACLVALDIVESAAISIANVEEAYKCECQSKGVIEEAIQFCSFDELLDGTDATEDVDENRLLPAMNKLWPYLVICLRNKISVPVVRKCTEMLRRAICISGGDFYVRRFHKDGPIVWRLLALSPFRRLSKMDEKAIILPYRDTSLNSEEPMAEISSQKIQIAVLDMIAAISSNKRSAVALESVLKKVCGLVVGIAYSSLTGLQEAAIRALAGLACMDADLVWLLLADVYYSLNQRESLLPNQDLALVSDLLPPPVSSREYLFVQYGGEGVRCDVDPSSVHYVFRRMQGV

SEQ ID NO: 182946 - protein, 505 aa, Zea Mays
MDIHTNDRPGARRVAAIDMTTPPQVWPWRTPTASMVWTTLFMEDLNIGASIVTRILDSAEQIHQPGGASLNQYNPPSQVHRSSPGGSPFRMQSISSELEVLGRHDHPRLTVPFLKAVSEISKACRHESTCLPDEAQSFYEKVSSEGQEVKIMIEKRMESSAISERKNVDARSYFMTLEYWEDLFCKLNEMRRYRRIVGSLAGSCLSAAIPLLSSNKETACLVALDIVESAAISIANVEEAYKCECQSKGVIEEAIQFCSFDELLDGTDATEDVDENRLLPAMNKLWPYLVICLRNKISVPVVRKCTEMLRRAICISGGDFYVRRFHKDGPIVWRLLALSPFRRLSKMDEKAIILPYRDTSLNSEEPMAEISSQKIQIAVLDMIAAISSNKRSAVALESVLKKVCGLVVGIAYSSLTGLQEAAIRALAGLACMDADLVWLLLADVYYSLNQRESLLPNQDLALVSDLLPPPVSSREYLFVQYGGEGVRCDVDPSSVHYVFRRMQGV

SEQ ID NO: 182947 - protein, 912 aa, Zea Mays
MAMEASAASDETLAAVFAQLKLHTVALLDLLRTRRPISSSGSSLREMAAFLRAAPAPALQLCFDYTVFPLLLLLDAAVQCRKQGNAPGQVAGGIDIGDAVAEAGLTCLEVLLTKCHLTSVNQMVAMLKKLTSGAMLSPSEASEEFRGAIIRCFRALVLQLQPCLDHFCSCKHGIVLPTIPTSTCLEVRSVVRPNHSAQPEECLLAFLQSQNASAAVGHWLSLLLQASELEASRGHRGSADVRKESLHTLRILIGKVGSADALAFFLPGIVSRLGKVLYTAKTMISGAAGSSLSIEQAILGLTEALMIVLNDKENLSALGKHKNENHSGGSESTEHILQMLRQLPTKNISDKISHDEITDDSVSNVNNSFADRKALHVKRTKKWLEETTSNVDKLLSATFPHLAIHSSEKVRKAVVSGVKGLLSSCSSTLKRTKMLLLECLCVLACDDAAAVSEAAQDALDHLFNQGHNLVTEKEISDTFTRLVERLPQVVLGSEETTALSHARMLLALTFYAGPQFLINHLHRSPVIAARFFDCLGLCIGHSSQFSGSMDKLIVSKPLSIGYLYSVAELKSGAYSKDTTNISLHATSTSAASKISVIHDNALPNALLGTVEYELPHVPPWFFHAGSQKLYGVLAGIIRLVGLSTVSGEGTAATLSLFVDILLDQFRRLSTELRDKDVYNDGLQRWYMKGEAGQALRQASSAVCMLNELMYGLSGRSLGMFLQLFSNGSAQMPRTVCQKNQLLACVKHNAVTNKREVWGFSEQKGTKDNILHCISSILHEYVSPEVWDLPTEKDTELHLIELNLPLHFYRDTTALHTVVLEGIGVLGVLLGQDFALSGFMHSSLYLLLRELISSSAQIRTACDAVLRALATAGGHCSVGQFVVANADYIIDSLCRCNQFLLSLRYLAGMITHV

SEQ ID NO: 182948 - protein, 986 aa, Zea Mays
MAMEASAASDETLAAVFAQLKLHTVALLDLLRTRRPISSSGSSLREMAAFLRAAPAPALQLCFDYTVFPLLLLLDAAVQCRKQGNAPGQVAGGIDIGDAVAEAGLTCLEVLLTKCHLTSVNQMVAMLKKLTSGAMLSPSEASEEFRGAIIRCFRALVLQLQPCLDHFCSCKHGIVLPTIPTSTCLEVRSVVRPNHSAQPEECLLAFLQSQNASAAVGHWLSLLLQASELEASRGHRGSADVRKESLHTLRILIGKVGSADALAFFLPGIVSRLGKVLYTAKTMISGAAGSSLSIEQAILGLTEALMIVLNDKENLSALGKHKNENHSGGSESTEHILQMLRQLPTKNISDKISHDEITDDSVSNVNNSFADRKALHVKRTKKWLEETTSNVDKLLSATFPHLAIHSSEKVRKAVVSGVKGLLSSCSSTLKRTKMLLLECLCVLACDDAAAVSEAAQDALDHLFNQGHNLVTEKEISDTFTRLVERLPQVVLGSEETTALSHARMLLALTFYAGPQFLINHLHRSPVIAARFFDCLGLCIGHSSQFSGSMDKLIVSKPLSIGYLYSVAELKSGAYSKDTTNISLHATSTSAASKISVIHDNALPNALLGTVEYELPHVPPWFFHAGSQKLYGVLAGIIRLVGLSTVSGEGTAATLSLFVDILLDQFRRLSTELRDKDVYNDGLQRWYMKGEAGQALRQASSAVCMLNELMYGLSGRSLGMFLQLFSNGSAQMPRTVCQKNQLLACVKHNAVTNKREVWGFSEQKGTKDNILHCISSILHEYVSPEVWDLPTEKDTELHLIELNLPLHFYRDTTALHTVVLEGIGVLGVLLGQDFALSGFMHSSLYLLLRELISSSAQIRTACDAVLRALATAGGHCSVGQFVVANADYIIDSLCRQLRHLDLNPHVPDVLASMLCYIGASRDILPFLEEPMQSISSELEVLGRHDHPRLTVPFLKFLRFPRHVDMNPLVCQMRHNHFMRRSVLRVKK

SEQ ID NO: 182949 - protein, 1222 aa, Zea Mays
MVAMLKKLTSGAMLSPSEASEEFRGAIIRCFRALVLQLQPCLDHFCSCKHGIVLPTIPTSTCLEVRSVVRPNHSAQPEECLLAFLQSQNASAAVGHWLSLLLQASELEASRGHRGSADVRKESLHTLRILIGKVGSADALAFFLPGIVSRLGKVLYTAKTMISGAAGSSLSIEQAILGLTEALMIVLNDKENLSALGKHKNENHSGGSESTEHILQMLRQLPTKNISDKISHDEITDDSVSNVNNSFADRKALHVKRTKKWLEETTSNVDKLLSATFPHLAIHSSEKVRKAVVSGVKGLLSSCSSTLKRTKMLLLECLCVLACDDAAAVSEAAQDALDHLFNQGHNLVTEKEISDTFTRLVERLPQVVLGSEETTALSHARMLLALTFYAGPQFLINHLHRSPVIAARFFDCLGLCIGHSSQFSGSMDKLIVSKPLSIGYLYSVAELKSGAYSKDTTNISLHATSTSAASKISVIHDNALPNALLGTVEYELPHVPPWFFHAGSQKLYGVLAGIIRLVGLSTVSGEGTAATLSLFVDILLDQFRRLSTELRDKDVYNDGLQRWYMKGEAGQALRQASSAVCMLNELMYGLSGRSLGMFLQLFSNGSAQMPRTVCQKNQLLACVKHNAVTNKREVWGFSEQKGTKDNILHCISSILHEYVSPEVWDLPTEKDTELHLIELNLPLHFYRDTTALHTVVLEGIGVLGVLLGQDFALSGFMHSSLYLLLRELISSSAQIRTACDAVLRALATAGGHCSVGQFVVANADYIIDSLCRQLRHLDLNPHVPDVLASMLCYIGASRDILPFLEEPMQSISSELEVLGRHDHPRLTVPFLKAVSEISKACRHESTCLPDEAQSFYEKVSSEGQEVKIMIEKRMESSAISERKNVDARSYFMTLEYWEDLFCKLNEMRRYRRIVGSLAGSCLSAAIPLLSSNKETACLVALDIVESAAISIANVEEAYKCECQSKGVIEEAIQFCSFDELLDGTDATEDVDENRLLPAMNKLWPYLVICLRNKISVPVVRKCTEMLRRAICISGGDFYVRRFHKDGPIVWRLLALSPFRRLSKMDEKAIILPYRDTSLNSEEPMAEISSQKIQIAVLDMIAAISSNKRSAVALESVLKKVCGLVVGIAYSSLTGLQEAAIRALAGLACMDADLVWLLLADVYYSLNQRESLLPNQDLALVSDLLPPPVSSREYLFVQYGGEGVRCDVDPSSVHYVFRRMQGV

SEQ ID NO: 182950 - protein, 1062 aa, Zea Mays
MISGAAGSSLSIEQAILGLTEALMIVLNDKENLSALGKHKNENHSGGSESTEHILQMLRQLPTKNISDKISHDEITDDSVSNVNNSFADRKALHVKRTKKWLEETTSNVDKLLSATFPHLAIHSSEKVRKAVVSGVKGLLSSCSSTLKRTKMLLLECLCVLACDDAAAVSEAAQDALDHLFNQGHNLVTEKEISDTFTRLVERLPQVVLGSEETTALSHARMLLALTFYAGPQFLINHLHRSPVIAARFFDCLGLCIGHSSQFSGSMDKLIVSKPLSIGYLYSVAELKSGAYSKDTTNISLHATSTSAASKISVIHDNALPNALLGTVEYELPHVPPWFFHAGSQKLYGVLAGIIRLVGLSTVSGEGTAATLSLFVDILLDQFRRLSTELRDKDVYNDGLQRWYMKGEAGQALRQASSAVCMLNELMYGLSGRSLGMFLQLFSNGSAQMPRTVCQKNQLLACVKHNAVTNKREVWGFSEQKGTKDNILHCISSILHEYVSPEVWDLPTEKDTELHLIELNLPLHFYRDTTALHTVVLEGIGVLGVLLGQDFALSGFMHSSLYLLLRELISSSAQIRTACDAVLRALATAGGHCSVGQFVVANADYIIDSLCRQLRHLDLNPHVPDVLASMLCYIGASRDILPFLEEPMQSISSELEVLGRHDHPRLTVPFLKAVSEISKACRHESTCLPDEAQSFYEKVSSEGQEVKIMIEKRMESSAISERKNVDARSYFMTLEYWEDLFCKLNEMRRYRRIVGSLAGSCLSAAIPLLSSNKETACLVALDIVESAAISIANVEEAYKCECQSKGVIEEAIQFCSFDELLDGTDATEDVDENRLLPAMNKLWPYLVICLRNKISVPVVRKCTEMLRRAICISGGDFYVRRFHKDGPIVWRLLALSPFRRLSKMDEKAIILPYRDTSLNSEEPMAEISSQKIQIAVLDMIAAISSNKRSAVALESVLKKVCGLVVGIAYSSLTGLQEAAIRALAGLACMDADLVWLLLADVYYSLNQRESLLPNQDLALVSDLLPPPVSSREYLFVQYGGEGVRCDVDPSSVHYVFRRMQGV

SEQ ID NO: 182951 - protein, 1312 aa, Zea Mays
MAMEASAASDETLAAVFAQLKLHTVALLDLLRTRRPISSSGSSLREMAAFLRAAPAPALQLCFDYTVFPLLLLLDAAVQCRKQGNAPGQVAGGIDIGDAVAEAGLTCLEVLLTKCHLTSVNQMVAMLKKLTSGAMLSPSEASEEFRGAIIRCFRALVLQLQPCLDHFCSCKHGIVLPTIPTSTCLEVRSVVRPNHSAQPEECLLAFLQSQNASAAVGHWLSLLLQASELEASRGHRGSADVRKESLHTLRILIGKVGSADALAFFLPGIVSRLGKVLYTAKTMISGAAGSSLSIEQAILGLTEALMIVLNDKENLSALGKHKNENHSGGSESTEHILQMLRQLPTKNISDKISHDEITDDSVSNVNNSFADRKALHVKRTKKWLEETTSNVDKLLSATFPHLAIHSSEKVRKAVVSGVKGLLSSCSSTLKRTKMLLLECLCVLACDDAAAVSEAAQDALDHLFNQGHNLVTEKEISDTFTRLVERLPQVVLGSEETTALSHARMLLALTFYAGPQFLINHLHRSPVIAARFFDCLGLCIGHSSQFSGSMDKLIVSKPLSIGYLYSVAELKSGAYSKDTTNISLHATSTSAASKISVIHDNALPNALLGTVEYELPHVPPWFFHAGSQKLYGVLAGIIRLVGLSTVSGEGTAATLSLFVDILLDQFRRLSTELRDKDVYNDGLQRWYMKGEAGQALRQASSAVCMLNELMYGLSGRSLVTNKREVWGFSEQKGTKDNILHCISSILHEYVSPEVWDLPTEKDTELHLIELNLPLHFYRDTTALHTVVLEGIGVLGVLLGQDFALSGFMHSSLYLLLRELISSSAQIRTACDAVLRALATAGGHCSVGQFVVANADYIIDSLCRQLRHLDLNPHVPDVLASMLCYIGASRDILPFLEEPMQSISSELEVLGRHDHPRLTVPFLKAVSEISKACRHESTCLPDEAQSFYEKVSSEGQEVKIMIEKRMESSAISERKNVDARSYFMTLEYWEDLFCKLNEMRRYRRIVGSLAGSCLSAAIPLLSSNKETACLVALDIVESAAISIANVEEAYKCECQSKGVIEEAIQFCSFDELLDGTDATEDVDENRLLPAMNKLWPYLVICLRNKISVPVVRKCTEMLRRAICISGGDFYVRRFHKDGPIVWRLLALSPFRRLSKMDEKAIILPYRDTSLNSEEPMAEISSQKIQIAVLDMIAAISSNKRSAVALESVLKKVCGLVVGIAYSSLTGLQEAAIRALAGLACMDADLVWLLLADVYYSLNQRESLLPNQDLALVSDLLPPPVSSREYLFVQYGGEGVRCDVDPSSVHYVFRRMQGV

SEQ ID NO: 182952 - protein, 1344 aa, Zea Mays
MAMEASAASDETLAAVFAQLKLHTVALLDLLRTRRPISSSGSSLREMAAFLRAAPAPALQLCFDYTVFPLLLLLDAAVQCRKQGNAPGQVAGGIDIGDAVAEAGLTCLEVLLTKCHLTSVNQMVAMLKKLTSGAMLSPSEASEEFRGAIIRCFRALVLQLQPCLDHFCSCKHGIVLPTIPTSTCLEVRSVVRPNHSAQPEECLLAFLQSQNASAAVGHWLSLLLQASELEASRGHRGSADVRKESLHTLRILIGKVGSADALAFFLPGIVSRLGKVLYTAKTMISGAAGSSLSIEQAILGLTEALMIVLNDKENLSALGKHKNENHSGGSESTEHILQMLRQLPTKNISDKISHDEITDDSVSNVNNSFADRKALHVKRTKKWLEETTSNVDKLLSATFPHLAIHSSEKVRKAVVSGVKGLLSSCSSTLKRTKMLLLECLCVLACDDAAAVSEAAQDALDHLFNQGHNLVTEKEISDTFTRLVERLPQVVLGSEETTALSHARMLLALTFYAGPQFLINHLHRSPVIAARFFDCLGLCIGHSSQFSGSMDKLIVSKPLSIGYLYSVAELKSGAYSKDTTNISLHATSTSAASKISVIHDNALPNALLGTVEYELPHVPPWFFHAGSQKLYGVLAGIIRLVGLSTVSGEGTAATLSLFVDILLDQFRRLSTELRDKDVYNDGLQRWYMKGEAGQALRQASSAVCMLNELMYGLSGRSLGMFLQLFSNGSAQMPRTVCQKNQLLACVKHNAVTNKREVWGFSEQKGTKDNILHCISSILHEYVSPEVWDLPTEKDTELHLIELNLPLHFYRDTTALHTVVLEGIGVLGVLLGQDFALSGFMHSSLYLLLRELISSSAQIRTACDAVLRALATAGGHCSVGQFVVANADYIIDSLCRQLRHLDLNPHVPDVLASMLCYIGASRDILPFLEEPMQSISSELEVLGRHDHPRLTVPFLKAVSEISKACRHESTCLPDEAQSFYEKVSSEGQEVKIMIEKRMESSAISERKNVDARSYFMTLEYWEDLFCKLNEMRRYRRIVGSLAGSCLSAAIPLLSSNKETACLVALDIVESAAISIANVEEAYKCECQSKGVIEEAIQFCSFDELLDGTDATEDVDENRLLPAMNKLWPYLVICLRNKISVPVVRKCTEMLRRAICISGGDFYVRRFHKDGPIVWRLLALSPFRRLSKMDEKAIILPYRDTSLNSEEPMAEISSQKIQIAVLDMIAAISSNKRSAVALESVLKKVCGLVVGIAYSSLTGLQEAAIRALAGLACMDADLVWLLLADVYYSLNQRESLLPNQDLALVSDLLPPPVSSREYLFVQYGGEGVRCDVDPSSVHYVFRRMQGS

SEQ ID NO: 182953 - protein, 167 aa, Zea Mays
MQQKTGAAAGIGLRRSTSTAPTSRRWIPPSPAVAPLPAAAPSAVAPSGPYATTSAAQAGSPSASPDDALLSRGARMGFRVGTPPDPSSCPGGARLYNAPTAAMFPSTTGPSFFDLLQSFEGIMSCMMIQPHNQPKNAHFIGHLGHTLNNPINIQVKMLMKKMRWRWS

SEQ ID NO: 182954 - protein, 229 aa, Zea Mays
MKSNYGAGKSAKKRAKKKTPNEASGLAGLLDTTRSAIEEKKRKPTGGTRARANKNKRERERERERERERERERKGPGAGRAKVIHLDLEDGSIVDVWWCEAGAREECPADWRSGEWGCRWEAEGEGRGSSRRHKKPAKPKGGRKGCGRRGVRCAGRQTPRPEEAASVRRLPSPTAKRIPRSRTTPTCYTAPSPAARTKKVRAVVGWLARRELRYTVALCLYSASSSLLV

SEQ ID NO: 182955 - protein, 413 aa, Zea Mays
MAAMNGEVLGECGRNINSLKRKRESPAAYAAGVFCTSELHQHTVNDSAVRFHLDKDRKAKIVCHFNKQVLQSYKKFMSSAPPKRILLRQGAVWKDFPEKIVKLAQADFRAKKMITETGYQNQLFLLDFAHMTFIDTKTGFQRPIAWIDENEKCYFPESFIQDQKLFMKKDFGNGNHEYISEERNGTRETNHQFGASESSAESSNFESSIGDVSSPKRARAEKNFIVKKYCDMGEAIGENESCTLLPTACNLLPHQANLGEVSRAQRTIEAVEKLLLQGMGSVIESKDIIGIYRTPLLDDHGQVRYHIHQKQVQVTGCHRGNANVRYAWLPCSKSTVHVMMLNGVLQVDKPPNKCAAYGEGTLLTPANRSDAWYVLDISIITYMSGFFSPPFLKCCWHLTLVSSYLCFVAIHIF

SEQ ID NO: 182956 - protein, 93 aa, Zea Mays
MQLTAKEHKSPSTAMSNLTTNSPPHAKRVLTYLSSQTSTSEKDDLSKQKGPQMPENTLEDSNPTKATFESPPKRRKELDSSCTFNDSDATKTP

SEQ ID NO: 182957 - protein, 524 aa, Zea Mays
MTYKALSNLSPQDKDAALQVQVNRKWEFRGIKDDGPILHIDMVLTDAMGNSIYAEIPSDIVDEQNPLINVNKVYIIRRFRVIYAKSSYKVVDAPFMICFTKFTIIELCREPPTTFPQYVYRLTPYNEIDPFGPKAKTFHDVIGLIKEVTKINPIYSGPTQSTSKIRNVFITDLSDNIMKITLWGNRAEQFSYNSVYDPQRKNPIVVLFVGCLPKEYQGDIVLNGGAACHTMTGFQHKKWYYNCRCLQKTTLFHLTSQNVNTKTIKELLEFDPYTIPKEGCECTVTIVRISEKNKWWYPACTKCPKKPAMNRKTMQCRECGSIDYCFRYRLSFIASDGTAEANMFCFENVATKIVGKSSASLLASAADPEITPPDIAAIVSLKFTFVVTYDNESYGGHSKIFLIRSILATYGRDSLLPQIQENVDITYPNTPMQLTAKEHKSPSTAMSNLTTNSPPHAKRVLTYLSSQTSTSEKDDLSKQKGPQMPENTLEDSNPTKATFESPPKRRKELDSSCTFNDSDATKTP

SEQ ID NO: 182958 - protein, 54 aa, Zea Mays
MLGCSSSCAQCNTDYEKTSERAVSNSVVRYRHDASGSTRHQLQTTISNHLTMND

SEQ ID NO: 182959 - protein, 353 aa, Zea Mays
MGDGRTGGANRPAWLQQYELIGKIGEGTYGLVFLARLKPPHPAPGRRGPPIAIKKFKQSKEGDGVSPTAIREIMLLREINHENVVKLVNVHINHADMSLYLAFDYAEHDLYEIIRHHREKLSSSINPYTVKSLLWQLLNGLNYLHSNWIIHRDLKPSNILVMGEGDEHGIIKIADFGLARIYQAPLKPLCDNGVVVTIWYRAPELLLGGKHYTSAVDMWAVGCIFAELLTLKPLFQGVEAKNPPNPFQLDQLDKIFKVLGHPTVEKWPTLANLPWWQNDHQHIQGHKYENPGFHNIVHLPPKSPAFDLLSKMLEYDPRKRITAAQALEHEYFRMDPLPGRNQGRKLYSILFVQ

SEQ ID NO: 182960 - protein, 455 aa, Zea Mays
MGDGRTGGANRPAWLQQYELIGKIGEGTYGLVFLARLKPPHPAPGRRGPPIAIKKFKQSKEGDGVSPTAIREIMLLREINHENVVKLVNVHINHADMSLYLAFDYAEHDLYEIIRHHREKLSSSINPYTVKSLLWQLLNGLNYLHSNWIIHRDLKPSNILVMGEGDEHGIIKIADFGLARIYQAPLKPLCDNGVVVTIWYRAPELLLGGKHYTSAVDMWAVGCIFAELLTLKPLFQGVEAKNPPNPFQLDQLDKIFKVLGHPTVEKWPTLANLPWWQNDHQHIQGHKYENPGFHNIVHLPPKSPAFDLLSKMLEYFRMDPLPGRNALLPSQPGEKIVQYPIRPVDTTTDFEGTTSLQPTQPPSGNAPPGGQSVARPMPRQMPQQPMVGGIPRVAGGVTMAAFNAASQAGMAGLNPGNMPMQRGAGGQSHPHQLRRKADQGMGMQNPGYPQQKRRF

SEQ ID NO: 182961 - protein, 467 aa, Zea Mays
MGDGRTGGANRPAWLQQYELIGKIGEGTYGLVFLARLKPPHPAPGRRGPPIAIKKFKQSKEGDGVSPTAIREIMLLREINHENVVKLVNVHINHADMSLYLAFDYAEHDLYEIIRHHREKLSSSINPYTVKSLLWQLLNGLNYLHSNWIIHRDLKPSNILVMGEGDEHGIIKIADFGLARIYQAPLKPLCDNGVVVTIWYRAPELLLGGKHYTSAVVGCIFAELLTLKPLFQGVEAKNPPNPFQLDQLDKIFKVLGHPTVEKWPTLANLPWWQNDHQHIQGHKYENPGFHNIVHLPPKSPAFDLLSKMLEYDPRKRITAAQALEHEYFRMDPLPGRNALLPSQPGEKIVQYPIRPVDTTTDFEGTTSLQPTQPPSGNAPPGGQSVARPMPRQMPQQPMVGGIPRVAGGVTMAAFNAASQAGMAGLNPGNMPMQRGAGGQSHPHQLRRKADQGMGMQNPGYPQQKRRF

SEQ ID NO: 182962 - protein, 280 aa, Zea Mays
MAITPRLAAIFFSLLCCRSASSLRPPNLISNSSGGVITHLPGFQGPLPFHLQTGYVEVDEDNGVHLFYYFVRSEREDSPGDDPVVLWLTGGPGCSVLTGLAYEIGPLSFDLNGYVGGLPKLVYKQDSWTKVSNVIFLDSPVGAGFSYSHTEEGYKSSDTRAVNQILVFLKKWFDKYPQFFSSPLYIAGDSYSGMIVPTVTSEIARGKEEGSQPNLNLKGYLVGNPVTDFNFDGPSRIPFAHGMGLISDEIYEAYEKSCSVGDSRRQSIECINSLGAIDEA

SEQ ID NO: 182963 - protein, 230 aa, Zea Mays
MAITPRLAAIFFSLLCCRSASSLRPPNLISNSSGGVITHLPGFQGPLPFHLQTGYVEVDEDNGVHLFYYFVRSEREDSPGDDPVVLWLTGGPGCSVLTGLAYEIGPLSFDLNGYVGGLPKLVYKQDSWTKWFDKYPQFFSSPLYIAGDSYSGMIVPTVTSEIARGKEEGSQPNLNLKGYLVGNPVTDFNFDGPSRIPFAHGMGLISDEIYERHTRRAAVWVTVDAKALSA

SEQ ID NO: 182964 - protein, 290 aa, Zea Mays
MAITPRLAAIFFSLLCCRSASSLRPPNLISNSSGGVITHLPGFQGPLPFHLQTGYVEVDEDNGVHLFYYFVRSEREDSPGDDPVVLWLTGGPGCSVLTGLAYEIGPLSFDLNGYVGGLPKLVYKQDSWTKVSNVIFLDSPVGAGFSYSHTEEGYKSSDTRAVNQILVFLKKWFDKYPQFFSSPLYIAGDSYSGMIVPTVTSEIARGKEEGSQPNLNLKGYLVGNPVTDFNFDGPSRIPFAHGMGLISDEIYEAYEKSCSVGDSRRQSIECINSLGAIDEAHIQFLFNCFQ

SEQ ID NO: 182965 - protein, 454 aa, Zea Mays
MAITPRLAAIFFSLLCCRSASSLRPPNLISNSSGGVITHLPGFQGPLPFHLQTGYVEVDEDNGVHLFYYFVRSEREDSPGDDPVVLWLTGGPGCSVLTGLAYEIGPLSFDLNGYVGGLPKLVYKQDSWTKVSNVIFLDSPVGAGFSYSHTEEGYKSSDTRAVNQILVFLKKWFDKYPQFFSSPLYIAGDSYSGMIVPTVTSEIARGKEEGSQPNLNLKGYLVGNPVTDFNFDGPSRIPFAHGMGLISDEIYECIKGISPNHVLEPLCAFASPKPKLISSGAREMLQLPVPVHTEEEEEELRLSEISLQCRTAGYMMSSMWANDASVRQALGIHKGTVPSWSRCNYDIPYTNDIPSAVKYHLDVTTKGYRSLVYNGDHDMVVPFIGTQAWIRSLNFSTVDEWRPWFVDGQVAGFTRSYSNNLTFATVKGGGHTAPEYMPRQCFAMFVRWVSGDPL

SEQ ID NO: 182966 - protein, 491 aa, Zea Mays
MAITPRLAAIFFSLLCCRSASSLRPPNLISNSSGGVITHLPGFQGPLPFHLQTGYVEVDEDNGVHLFYYFVRSEREDSPGDDPVVLWLTGGPGCSVLTGLAYEIGPLSFDLNGYVGGLPKLVYKQDSWTKVSNVIFLDSPVGAGFSYSHTEEGYKSSDTRAVNQILVFLKKWFDKYPQFFSSPLYIAGDSYSGMIVPTVTSEIARGKEEGSQPNLNLKGYLVGNPVTDFNFDGPSRIPFAHGMGLISDEIYEAYEKSCSVGDSRRQSIECINSLGAIDECIKGISPNHVLEPLCAFASPKPKLISSGAREMLQLPVPVHTEEEEEELRLSEISLQCRTAGYMMSSMWANDASVRQALGIHKGTVPSWSRCNYDIPYTNDIPSAVKYHLDVTTKGYRSLVYNGDHDMVVPFIGTQAWIRSLNFSTVDEWRPWFVDGQVAGYIIQPGYLCRFTRSYSNNLTFATVKGGGHTAPEYMPRQCFAMFVRWVSGDPL

SEQ ID NO: 182967 - protein, 440 aa, Zea Mays
MAITPRLAAIFFSLLCCRSASSLRPPNLISNSSGGVITHLPGFQGPLPFHLQTGYVEVDEDNGVHLFYYFVRSEREDSPGDDPVVLWLTGGPGCSVLTGLAYEIGPLSFDLNGYVGGLPKLVYKQDSWTKWFDKYPQFFSSPLYIAGDSYSGMIVPTVTSEIARGKEEGSQPNLNLKGYLVGNPVTDFNFDGPSRIPFAHGMGLISDEIYEAYEKSCSVGDSRRQSIECINSLGAIDECIKGISPNHVLEPLCAFASPKPKLISSGAREMLQLPVPVHTEEEEEELRLSEISLQCRTAGYMMSSMWANDASVRQALGIHKGTVPSWSRCNYDIPYTNDIPSAVKYHLDVTTKGYRSLVYNGDHDMVVPFIGTQAWIRSLNFSTVDEWRPWFVDGQVAGFTRSYSNNLTFATVKGGGHTAPEYMPRQCFAMFVRWVSGDPL

SEQ ID NO: 182968 - protein, 339 aa, Zea Mays
MAITPRLAAIFFSLLCCRSASSLRPPNLISNSSGGVITHLPGFQGPLPFHLQTGYVEVDEDNGVHLFYYFVRSEREDSPGDDPVVLWLTGGPGCSVLTGLAYEIGPLSFDLNGYVGGLPKLVYKQDSWTKVSNVIFLDSPVGAGFSYSHTEEGYKSSDTRAVNQILVFLKKWFDKYPQFFSSPLYIAGDSYSGMIVPTVTSEIARGKEEGSQPNLNLKGYLVGNPVTDFNFDGPSRIPFAHGMGLISDEIYEAYEKSCSVGDSRRQSIECINSLGAIDECIKGISPNHVLEPLCAFASPKPKLISSGAREMLQLPVPVHTEEEEEELRLSEISLQCRDT

SEQ ID NO: 182969 - protein, 481 aa, Zea Mays
MAITPRLAAIFFSLLCCRSASSLRPPNLISNSSGGVITHLPGFQGPLPFHLQTGYVEVDEDNGVHLFYYFVRSEREDSPGDDPVVLWLTGGPGCSVLTGLAYEIGPLSFDLNGYVGGLPKLVYKQDSWTKVSNVIFLDSPVGAGFSYSHTEEGYKSSDTRAVNQILVFLKKWFDKYPQFFSSPLYIAGDSYSGMIVPTVTSEIARGKEEGSQPNLNLKGYLVGNPVTDFNFDGPSRIPFAHGMGLISDEIYEAYEKSCSVGDSRRQSIECINSLGAIDECIKGISPNHVLEPLCAFASPKPKLISSGAREMLQLPVPVHTEEEEEELRLSEISLQCRTAGYMMSSMWANDASVRQALGIHKGTVPSWSRCNYDIPYTNDIPSAVKYHLDVTTKGYRSLVYNGDHDMVVPFIGTQAWIRSLNFSTVDEWRPWFVDGQVAGFTRSYSNNLTFATVKGGGHTAPEYMPRQCFAMFVRWVSGDPL

SEQ ID NO: 182970 - protein, 332 aa, Zea Mays
MKLKRRRRRRKLWSRRSWLRATSRSRPSAAAASARASSSTSSSESANTWEPLENLKACSDIVDAFNKRSRSPRSCGKRKRKTPTTPTSDPNPSRGKRGRPPRSEARSMHSIHASEVKKLPCRTSSRRANNNSNKTSPGGLGAAVNLLGQRIVQEGSSGVVSVGFPSQEAPLSVSLTDQQDAQHPANGSLKMDNEIRAITPQGGQVTGAKKRKSGCVRRFKQDEVTHEQGDIRDRTSDKPGNETVDSTEGDPGDKNKGEDSGNQIHMPKIIKIIKPVRYFATVMDGVQQVAITFKALRSDGEMVFVDDKQLKAKEPLVLIDYYEQHLRYNPTS

SEQ ID NO: 182971 - protein, 351 aa, Zea Mays
MRRNRKDSGYPTAAPGEEDEAEELTEEGDEEEEEQTEEGCGEEDEVEAETPAQEAVEPPKLAEGYFEIEAIRRRRLRKGQLQYLVKWSRSPRSCGKRKRKTPTTPTSDPNPSRGKRGRPPRSEARSMHSIHASEVKKLPCRTSSRRANNNSNKTSPGGLGAAVNLLGQRIVQEGSSGVVSVGFPSQEAPLSVSLTDQQDAQHPANGSLKMDNEIRAITPQGGQVTGAKKRKSGCVRRFKQDEVTHEQGDIRDRTSDKPGNETVDSTEGDPGDKNKGEDSGNQIHMPKIIKIIKPVRYFATVMDGVQQVAITFKALRSDGEMVFVDDKQLKAKEPLVLIDYYEQHLRYNPTS

SEQ ID NO: 182972 - protein, 332 aa, Zea Mays
MRRNRKDSGYPTLAEGYFEIEAIRRRRLRKGQLQYLVKWRGWPESANTWEPLENLKACSDIVDAFNKRSRSPRSCGKRKRKTPTTPTSDPNPSRGKRGRPPRSEARSMHSIHASEVKKLPCRTSSRRANNNSNKTSPGGLGAAVNLLGQRIVQEGSSGVVSVGFPSQEAPLSVSLTDQQDAQHPANGSLKMDNEIRAITPQGGQVTGAKKRKSGCVRRFKQDEVTHEQGDIRDRTSDKPGNETVDSTEGDPGDKNKGEDSGNQIHMPKIIKIIKPVRYFATVMDGVQQVAITFKALRSDGEMVFVDDKQLKAKEPLVLIDYYEQHLRYNPTS

SEQ ID NO: 182973 - protein, 337 aa, Zea Mays
MHRVSFSGVRQGGETVPLPSQRRTSSRRASDAAEEYDAAYAATVAAVAYAIAAREERLSASQESTPYAAADRLARGNKQSSKSARTTKRGESLEKPNFEGRRSSSSRWFTGKEPIDDDYQDEQVKRPLRPAQKKPAPAEGAASDERLPALADPALRVRKDFSFTRKPSEKRGSRRFEQDQGNQTTAPPPPPPTARPSDKASSSYSAAGSRDSGAATTSGGPMAFSSENEAMADAWEKEKLARIKRKYNETMQTIAAWEAEKKANARRQKQLKDESESERKRAKALEEYTEEMSRINKVAAASRLTAEEKKRSAERKARDKAHTIRSTGKLPGACGCF

SEQ ID NO: 182974 - protein, 72 aa, Zea Mays
MAALSVRPRSPLLGLRPLESCPTAALALLNVSVEFGILLTVAAAVKSSDLLNLPIASWPVVDFLFAIIQHRC

SEQ ID NO: 182975 - protein, 85 aa, Zea Mays
MYGFSSTIAATPPFFGPRLRASAYSWIEFSGTSRERGTLKFSVRYLLVNFPAWYPIGKELETKLSIPVIPVESCWTVRIDVKLAV

SEQ ID NO: 182976 - protein, 57 aa, Zea Mays
MAEDNKTNRMARFKWIVGIQINLFYRDRHVIWSVELEYFQVVTATFIYIYTQTFKNN

SEQ ID NO: 182977 - protein, 328 aa, Zea Mays
MAQGCGRRDYRDHEFRLRPDRRHSPHGRYSPERDIRRRSFHDKRPSSEDRGSSHSRSPIRKSERKHSKSPDGGETDSSVSVRSPDNEDRGKDERYLSSDEKNGHEDQLKQMHLDMEALREDKSKLEMILEKKTDEEHKLCSRVEDLELQLNKEKEDCQRMSSKTKKLIKAHGRYIKAQEDLKRSQARFERLADLLASDILKPCTKEQGSIGITANEDPYNANEMSPSDQRQNHVSASRKRLISLPTSEEAKTGKRQRENGDDMIPTSENYRPEDALEHLQDSKGTDLPESFTVKKLREGDNDDVGNIVSSSNIFADRYTGDDEEVDVD

SEQ ID NO: 182978 - protein, 369 aa, Zea Mays
MREGMRERDRGGSPDASGPPPFRGPAYKTKLCALWRGRGGCPRPNCGFAHGEAELRRPPPRASFQPRPRPGRRDYRDHEFRLRPDRRHSPHGRYSPERDIRRRSFHDKRPSSEDRGSSHSRSPIRKSERKHSKSPDGGETDSSVSVRSPDNEDRGKDERYLSSDEKNGHEDQLKQMHLDMEALREDKSKLEMILEKKTDEEHKLCSRVEDLELQLNKEKEDCQRSQARFERLADLLASDILKPCTKEQGSIGITANEDPYNANEMSPSDQRQNHVSASRKRLISLPTSEEAKTGKRQRENGDDMIPTSENYRPEDALEHLQDSKGTDLPESFTVKKLREGDNDDVGNIVSSSNIFADRYTGDDEEVDVD

SEQ ID NO: 182979 - protein, 378 aa, Zea Mays
MDRFVEIDCFQRMAHLISILAFVSVGNRSFMILECLTCLRRTEHGRYYTFYLLDGIHAMGEGITEIMSLDSGLIEDTHPMGGSSHSRSPIRKSLWLACEIAYLYVYVLWLLSERKHSKSPDGGETDSSVSVRSPDNEDRGKDERYLSSDEKNGHEDQLKQMHLDMEALREDKSKLEMILEKKTDEEHKLCSRVEDLELQLNKEKEDCQRMSSKTKKLIKAHGRYIKAQEDLKRSQARFERLADLLASDILKPCTKEQGSIGITANEDPYNANEMSPSDQRQNHVSASRKRLISLPTSEEAKTGKRQRENGDDMIPTSENYRPEDALEHLQDSKGTDLPESFTVKKLREGDNDDVGNIVSSSNIFADRYTGDDEEVDVD

SEQ ID NO: 182980 - protein, 516 aa, Zea Mays
MREGMRERDRGGSPDASGPPPFRGPAYKTKLCALWRGRGGCPRPNCGFAHGEAELRRPPPRASFQPRPRPGRRDYRDHEFRLRPDRRHSPHGRYSPERDIRRRSFHDKRPSSEDRGSSHSRSPIRKSERKHSKSPDGGETDSSVSVRSPDNEDRGKDERYLSSDEKNGHEDQLKQMHLDMEALREDKSKLEMILEKKTDEEHKLCSRVEDLELQLNKEKEDCQRMSSKTKKLIKAHGRYIKAQEDLKRSQARFERLADLLASDILKPCTKEQGSIGITANEDPYNANEMSPSDQRQNHVSASRKRLISLPTSEEAKTGKRQRENGDDMIPTSENYRPEDALEHLQDSKGTDLPESFTVKKLREGDNDDVGNIVSSSNIFADRGLDVGVDEDVAVVNSFISSRMIDKRPIPSSNSLKELSNSLKELPPAGHATPKQQLASLGGASGRVIFNRGPTVAQFRSTLRGAVLRRVRCKGGTDGGGRTSRNGSTRDETNRRATHLCVGPLTLERCLVAWASL

SEQ ID NO: 182981 - protein, 56 aa, Zea Mays
MKWIPVKEKLVVLKKNAEPYVQKVSTRSVKFYERREDFLSPLFSLESKEAEGDEDE

SEQ ID NO: 182982 - protein, 358 aa, Zea Mays
MVKLPNRDDFVHYASTCFKEFGDRVKHWITFNEPHNFAIEGYDLGIQAPGRCSILSHIFCREGKSSTEPYVVAHNILLAHAGAFHTYKQHFKKEQGGIIGIALDSKWYEPLSDVDEDTEAAARAMDFELGWFLDPLMFGHYPPSMQKLVGDRLPQFSARASMLVSGSLDFVGINHYTTLYVRNDRMRIRKLVMNDASTDAAVIPTAYRHGKKIGETAASGWLHIVPWGMFKLMKHIKEKYGNPPVIITENGMDDANNRFSKLEDDLQDDKRIQYHKDYMSNLLDAIRKEGCNVHGYFVWSLLDNWEWNSGYTVRFGLYYIDYNNNLTRIPKASVEWFRQVLAQKTAGLEYSGSTVASS

SEQ ID NO: 182983 - protein, 234 aa, Zea Mays
MDFELGWFLDPLMFGHYPPSMQKLVGDRLPQFSARASMLVSGSLDFVGINHYTTLYVRNDRMRIRKLVMNDASTDAAVIPTAYRHGKKIGETAASGWLHIVPWGMFKLMKHIKEKYGNPPVIITENGMDDANNRFSKLEDDLQDDKRIQYHKDYMSNLLDAIRKEGCNVHGYFVWSLLDNWEWNSGYTVRFGLYYIDYNNNLTRIPKASVEWFRQVLAQKTAGLEYSGSTVASS

SEQ ID NO: 182984 - protein, 654 aa, Zea Mays
MESQLAREEESLRRCSDRLKEMESKNSKLLQALRSAGADKIIEAYHWVQANKKNLRQEVYGPVLLEVNVQDKLHATYLEDHVPNYLWKSFITLDASDRDYIAREMKQYGIPVLNYLVREGTRRRPLNITPEMEQLGIYSRLDQVFQAPDTVKDVLISQAGLDDSYIGTDETHRRADEVSKLGIYDFWTPDNHYRWSKSRYSGYMSAFVDAIHPSRLFKSNLDVSGIEDLRLQKEDHVTNIEGMREAIKTLHRKQRQLEDEEANIHRQKEEIINAMRYHKKTREEIQRRVDIKKRILKDISREDDVESSTRKLVNQVAKINDERFHAMIKLKDLLTEAVALKWSHTEKNMTLIELDTKIWEMEKGVKKLEKDANQAARNYEDCRRITQEHRRRLSIAKQNAESIAMITKDLEKEFCAMPTTLEELETAIQDTESEANSMLFLNQNVLQEYQNRQHEIESISNKLKDDKGEHEICCSEIETVKGKWLPTLRILVSKINDTFSRNFQEMAVAGEVSLDEHGIDFDHYGILIKVKFRQTSQLQVLSSHHQSGGERSVSTILYLVSLQDLTNCPFRVVDEINQGMDPINERKMFQQLVRAASQINTPQCFLLTPKLLPDLEYSDACSILNIMNGPWIEEPAKAWSSGDCWRTVVSAAGH

SEQ ID NO: 182985 - protein, 719 aa, Zea Mays
MDDLKKQEKSRQRRILKTKEDLAAAEKELEDLQPYELPKAEMAQLTDQIARISVEIKNLKAERNAMESQLAREEESLRRCSDRLKEMESKNSKLLQALRSAGADKIIEAYHWVQANKKNLRQEVYGPVLLEVNVQDKLHATYLEDHVPNYLWKSFITLDASDRDYIAREMKQYGIPVLNYLVREGTRRRPLNITPEMEQLGIYSRLDQVFQAPDTVKDVLISQAGLDDSYIGTDETHRRADEVSKLGIYDFWTPDNHYRWSKSRYSGYMSAFVDAIHPSRLFKSNLDVSGIEDLRLQKEDHVTNIEGMREAIKTLHRKQRQLEDEEANIHRQKEEIINAMRYHKKTREEIQRRVDIKKRILKDISREDDVESSTRKLVNQVAKINDERFHAMIKLKDLLTEAVALKWSHTEKNMTLIELDTKIWEMEKGVKKLEKDANQAARNYEDCRRITQEHRRRLSIAKQNAESIAMITKDLEKEFCAMPTTLEELETAIQDTESEANSMLFLNQNVLQEYQNRQHEIESISNKLKDDKGEHEICCSEIETVKGKWLPTLRILVSKINDTFSRNFQEMAVAGEVSLDEHGIDFDHYGILIKVKFRQTSQLQVLSSHHQSGGERSVSTILYLVSLQDLTNCPFRVVDEINQGMDPINERKMFQQLVRAASQINTPQCFLLTPKLLPDLEYSDACSILNIMNGPWIEEPAKAWSSGDCWRTVVSAAGH

SEQ ID NO: 182986 - protein, 676 aa, Zea Mays
MAAPRATKRPKFASGAAPPQRGEDDYVPGNIVEIELFNFMTYDRLVCCPGPRLNLVVGPNGSGKSSLVCAIALGLAGDPSILGRASSVGAFVKRGEVAGHVKISLRGDTADDKICVTRKIDTKNKSEWLLNGATVTKKEVIDVIKKFNIQVNNLTQFLPQDRVSEFAKLSPIQLLEETEKAVGDPDLPIQHRQLVERSKELKAFEVAIRQNEQTLNNLKALNAEQERDVERVRLRDNLLRKAESMKKKVPWLKYDMMKKEFIEVIQEKEKIAKQEMEEAARVWEDSKGPIDKLKKHKATHTSNIKKISGQVNQNMDNRHKVMDHDLKLNAELKATFDEMDDLKKQEKSRQRRILKTKEDLAAAEKELEDLQPYELPKAEMAQLTDQIARISVEIKNLKAERNAMESQLAREEESLRRCSDRLKEMESKNSKLLQALRSAGADKIIEAYHWVQANKKNLRQEVYGPVLLEVNVQDKLHATYLEDHVPNYLWKSFITLDASDRDYIAREMKQYGIPVLNYLVREGTRRRPLNITPEMEQLGIYSRLDQVFQAPDTVKDVLISQAGLDDSYIGTDETHRRADEVSKLGIYDFWTPDNHYRWSKSRYSGYMSAFVDAIHPSRLFKSNLDVSGIEDLRLQKEDHVTNIEGMREAIKTLHRKQRQLEDEEANIHRQKKLLMR

SEQ ID NO: 182987 - protein, 530 aa, Zea Mays
MNFLKLKWLKEMESKNSKLLQALRSAGADKIIEAYHWVQANKKNLRQEVYGPVLLEVNVQDKLHATYLEDHVPNYLWKSFITLDASDRDYIAREMKQYGIPVLNYLVREGTRRRPLNITPEMEQLGIYSRLDQVFQAPDTVKDVLISQAGLDDSYIGTDETHRRADEVSKLGIYDFWTPDNHYRWSKSRYSGYMSAFVDAIHPSRLFKSNLDVSGIEDLRLQKEDHVTNIEGMREAIKTLHRKQRQLEDEEANIHRQKEEIINAMRYHKKTREEIQRRVDIKKRILKDISREDDVESSTRKLVNQVAKINDERFHAMIKLKDLLTEAVALKWSHTEKNMTLIELDTKIWEMEKGVKKLEKDANQAARNYEDCKRITQEHRRRLSIAKQNAESIAMITKDLEKEFCAMPTTLEELETAIQDTESEANSMLFLNQNVLQEYQNRQHEIESISNKLKDDKGEHEICCSEIETVKGKWLPTLRILVSKINDTFSRNFQEMAVAGEVSLDEHGIDFDHYGILIKVKFSKGFDIFY

SEQ ID NO: 182988 - protein, 68 aa, Zea Mays
MACCSRRSGLPPPLHSVRAATIRVRAHPRRYMDRPATRIHVFSVVCVTAFPSRGGTDRQTTDKTIKLA

SEQ ID NO: 182989 - protein, 59 aa, Zea Mays
MFTFTVMRYIHYYDCIDGSVKAYIQPDNTRDLRSLALYYITFHRKNKTILLLADIFSRM

SEQ ID NO: 182990 - protein, 193 aa, Zea Mays
MLEQEEVVINTLLNLHGRSVNEFVDACKKAIGVYIKIEYLNRRPGDYAEVYSDPTKISKELNWTTQYTDLKESLSVAWRSGGGLRSENSKGEVPPEEANGGAWHGEGCAWSRMGGAGASRGVPNPRTGLPSMETADATTRTRTLMPGGGDDLGQRGTQSTREIGLSRTRIEGRRGDPGQRTHVPWIAESRGGV

SEQ ID NO: 182991 - protein, 193 aa, Zea Mays
MRGDEAKRVCPGINLVQVPVARGKANLNLYRSAGAEVVAILASKGKCERASIDEVYLDLTDAAKEMLLQAPPDSPEGIFMEAAKSNILGLPADASEKEKNVRAWLCQSEADYQDKLLACGAIIVAQLRVRVLEETQFTCSAGIAHNKMLAKLVSGMYKPAQQTVVPSSSVQDLLASLPVKKMMILGLRQLVIS

SEQ ID NO: 182992 - protein, 313 aa, Zea Mays
MGGGGPHSAELSAQSRRQGASEVQSLETHHGDRSVTHRFLLYSYHFLRLSDWIATLGAIYDGPGIQDYSNANDMQLALAQIISWISCSFLYGKDFVDFGSIDWGRLLRNHGISDSEKVLIFFDDHQSELKRLKQALKAGFRHLIFEDNYDTGTCDHYFLRHIYDPSYIRGVHIAYGSAVLHPARRARLPHALRPPAINAHAHFHPWPSIRKTCLPQGFGGGCRREALATECCTPTANRGYRAGGQKQPATTVGHRDLYGPSKYTRHLQATKDTLREEGCEHTSAEIKRSAINGSHRLGMKCIHYEINVLLFRV

SEQ ID NO: 182993 - protein, 136 aa, Zea Mays
MCVYELCVYGLKSLHVFVAAFQIGQCVFSVCFWICTSSCCITSHQRDHALCFDLVRLFSSPQLCLCCVLCFGSGGFHSSGWNFDLADLDSGGLIISVGKAKKRVLLSTNHACRLLAAKMDRIDQELGEYIIKQIKQ

SEQ ID NO: 182994 - protein, 758 aa, Zea Mays
MALIRRKKHAMIRFLKKDVADLLANGLDTHAFRRIDGLLVELNHASCYDMIEGFCHYIGKQLGSLQKQRDCPPEFREAVSTLIFAAARYPDLPELCDLRHIFTERYGNFVEHFVSQEFIRKLDSTEFTNEERFQVMQSVAEELSVSFDAKELELKLWASLQTEHDMLEKGSRKPAELAMPSSSKQICVENASCEEQEDILEKSLTRPTEPAMSLFDKTKYNGDAPCERKNKDMLENYSTKPIELATASSNKQKVTENVPGKRNYDAEPAHHTEKVEIQLVQKDIQSVADAHHTIDENSRKQQPYVSDEKEHLQKPVSPVDTNRTQKDVQKLNRRAVRHLEKELMEAVELDLNGLPKFGFGAVRFPEAEGNKTVQLNVKPNEAVRDFHIEKENDEVLHCSRLPGGSEHNGGHADSGLRAQGLENQGHPVSPLSGNTRKKAPYTKLNAVNIKNPTEKQANNGFLHDKPQHLADLGYPVQKGQGDPERALTMLPPYVEPKSNMQPVNDDPEKQTPSGYRKPNIPGQTDHLENKNVLRPVSVRRRTAKLPAPVDAYVEVPNNAKVTSQTPKSHRSHSSRRNGAKDDQNRKCNGTDDVGSETNAQITPSSQSKHVGRRNGALNHKNNSGRLMQRMQPEAAETAIDCGNLLPRNANGQMRHNSGRGGDMDEEERMMDKLLMHYSKKGSDLTNNETHTDAAQKVSLHPTGRAISLPPESVGPSKDAKVPARCTSLQPEGPRSAHVHPKMPDFDELAARVKALRKA

SEQ ID NO: 182995 - protein, 175 aa, Zea Mays
MEYFLRQLETIGFCGVQNFPTVGLFDGNFRQNLEETGMGYSMEVEMISMAHRMGFLTTPYAFNPDEAAAMAKAGAHIVVAHMGLTTAGSIGAMTAATLDDSVLRVQAIADAAFGVNPDIIVLCHGGPISGPLEAEFVLKNTKRVHGFYGASSMERLPVEQAITNTMREYKRISLK

SEQ ID NO: 182996 - protein, 304 aa, Zea Mays
MILIGKVQVSIVDVSTTEKTTANDFKDIIFIPRNTILSCHLGVDQHNLPDNRGEAIALMSKALQSFLKKRYDSGMLVGAVGLGGSGGTALIAPALRLLPLGVPKLIVSTVASGHTTPYVETSDLVLFPSVVDICGINSVSRVILSNAAAAFAGMVHGILSASNESDETSTKPTVGITMFGVTTPCVNAVKDRLNKEGYETLIFHATGVGGKAMEDLVRGGFIQGVLDVTTTEVADHIVGGIMACDETRFDAIIENKIPLVLSVGALDMVNFGARDTIPLAFADRNIHVHNEQKYCGGRGQYYIN

SEQ ID NO: 182997 - protein, 471 aa, Zea Mays
MILIGKVQVSIVDVSTTEKTTANDFKDIIFIPRNTILSCHLGVDQHNLPDNRGEAIALMSKALQSFLKKRYDSGMLVGAVGLGGSGGTALIAPALRLLPLGVPKLIVSTVASGHTTPYVETSDLVLFPSVVDICGINSVSRVILSNAAAAFAGMVHGILSASNESDETSTKPTVGITMFGVTTPCVNAVKDRLNKEGYETLIFHATGVGGKAMEDLVRGGFIQGVLDVTTTEVADHIVGGIMACDETRFDAIIENKIPLVLSVGALDMVNFGARDTIPLAFADRNIHVHNEQVSLMRTTVEENKKFARFIADKINKSSSKVTVCLPQKGISAIDAPGMPFYDPEATSTLLGELNTLIQRTDIREVKLFPYHINDPEFANALVDAFLSMDVQASSSAQPKQDLNIGKSCSGQKISDSSIIWRTPVDFPDAKPGELPLIVLRRKVTRPRGSKEGPIQKTPYGRQKHAYRKESI

SEQ ID NO: 182998 - protein, 628 aa, Zea Mays
MEVLCIGTADTKFEELLFLAAQLRSALAASGSDSKVQVSIVDVSTTEKTTANDFKDIIFIPRNTILSCHLGVDQHNLPDNRGEAIALMSKALQSFLKKRYDSGMLVGAVGLGGSGGTALIAPALRLLPLGVPKLIVSTVASGHTTPYVETSDLVLFPSVVDICGINSVSRVILSNAAAAFAGMVHGILSASNESDETSTKPTVGITMFGVTTPCVNAVKDRLNKEGYETLIFHATGVGGKAMEDLVRGGFIQGVLDVTTTEVADHIVGGIMACDETRFDAIIENKIPLVLSVGALDMVNFGARDTIPLAFADRNIHVHNEQVSLMRTTVEENKKFARFIADKINKSSSKVTVCLPQKGISAIDAPGMPFYDPEATSTLLGELNTLIQRTDIREVKLFPYHINDPEFANALVDAFLSMDVQASSSAQPKQDLNIGKSCSGQKISDSSIIWRTPVDFPDAKPEILRRTRSILHKLKEQISDGTPVIGAGAGTGISAKFEEAGGVDLIVLYNSGRFRMAGRGSLAGLLPFGDANDIVLQMANEVLPVVKGVPVLAGVCATDPFRRMEYFLRQLETIGFCGVQNFPTVGLFDGNFRQNLEETGMGYRPLRMRHLGLILISLFSVTEAPYLDP

SEQ ID NO: 182999 - protein, 713 aa, Zea Mays
MEVLCIGTADTKFEELLFLAAQLRSALAASGSDSKVQVSIVDVSTTEKTTANDFKDIIFIPRNTILSCHLGVDQHNLPDNRGEAIALMSKALQSFLKKRYDSGMLVGAVGLGGSGGTALIAPALRLLPLGVPKLIVSTVASGHTTPYVETSDLVLFPSVVDICGINSVSRVILSNAAAAFAGMVHGILSASNESDETSTKPTVGITMFGVTTPCVNAVKDRLNKEGYETLIFHATGVGGKAMEDLVRGGFIQGVLDVTTTEVADHIVGGIMACDETRFDAIIENKIPLVLSVGALDMVSLMRTTVEENKKFARFIADKINKSSSKVTVCLPQKGISAIDAPGMPFYDPEATSTLLGELNTLIQRTDIREVKLFPYHINDPEFANALVDAFLSMDVQASSSAQPKQDLNIGKSCSGQKISDSSIIWRTPVDFPDAKPEILRRTRSILHKLKEQISDGTPVIGAGAGTGISAKFEEAGGVDLIVLYNSGRFRMAGRGSLAGLLPFGDANDIVLQMANEVLPVVKGVPVLAGVCATDPFRRMEYFLRQLETIGFCGVQNFPTVGLFDGNFRQNLEETGMGYSMEVEMISMAHRMGFLTTPYAFNPDEAAAMAKAGAHIVVAHMGLTTAGSIGAMTAATLDDSVLRVQAIADAAFGVNPDIIVLCHGGPISGPLEAEFVLKNTKRVHGFYGASSMERLPVEQAITNTMREYKRISLK

SEQ ID NO: 183000 - protein, 478 aa, Zea Mays
MEVLCIGTADTKFEELLFLAAQLRSALAASGSDSKVQVSIVDVSTTEKTTANDFKDIIFIPRNTILSCHLGVDQHNLPDNRGEAIALMSKALQSFLKKRYDSGMLVGAVGLGGSGGTALIAPALRLLPLGVPKLIVSTVASGHTTPYVETSDLVLFPSVVDICGINSVSRVILSNAAAAFAGMVHGILSASNESDETSTKPTVGITMFGVTTPCVNAVKDRLNKEGYETLIFHATGVGGKAMEDLVRGGFIQGVLDVTTTEVADHIVGGIMACDETRFDAIIENKIPLVLSVGALDMVNFGARDTIPLAFADRNIHVHNEQVSLMRTTVEENKKFARFIADKINKSSSKVTVCLPQKGISAIDAPGMPFYDPEATSTLLGELNTLIQRTDIREVKLFPYHINDPEFANALVDAFLSMDVQASSSAQPKQDLNIGKSCSGQKISDSSIIWRTPVDFPDAKPGELPLIVLRRKVTRPRGS

SEQ ID NO: 183001 - protein, 286 aa, Zea Mays
MLARSGLTFVHIPFPDRMPHDWADRHATENRMRLHALRVIRERKMDGVVVFTDDSNVHSMELFDEVQKVQWMGAVSVGILAHTGTADQLRLSEEDKQNMPLPVQGPACNSSGHLIGWHTFNSLPFSGKTATVVGEAAPVLPRGLEWAGFVLNSRMLWKEADGKPDWVKDLDAVGENGEEIENPLTLLNDPSSVEPLGNCGKKVLLWWLRVEARADSKFPEGWVIEPPLEVVVPAKRTPWPETTTELPAELLDDKQEQEDRRLSRANKSSRPRGTTKRKGDPQGQDN

SEQ ID NO: 183002 - protein, 491 aa, Zea Mays
MMKSLLPQSQLRRSAAAAARSSAGGAAGADGAMSDGGGAGPRAPASSTFWFLLHALCCLISLFLGFRFSRLLFFLLFSTTALYRSSTSSSSAAVLRATTTTTTTTTTTTTTTNTFTLSFAAANTPPSTPANRTALDVADKGAASGNPQSHVVVGRHGIRIRPWPHPDPVEVMRAHRIMERVQEEQRRWYGVKEPRAGGTTNATASMLARSGLTFVHIPFPDRMPHDWADRHATENRMRLHALRVIRERKMDGVVVFTDDSNVHSMELFDEVQKVQWMGAVSVGILAHTGTADQLRLSEEDKQNMPLPVQGPACNSSGHLIGWHTFNSLPFSGKTATVVGEAAPVLPRGLEWAGFVLNSRMLWKEADGKPDWVKDLDAVGENGEEIENPLTLLNDPSSVEPLGNCGKKVLLWWLRVEARADSKFPEGWVIEPPLEVVVPAKRTPWPETTTELPAELLDDKQEQEDRRLSRANKSSRPRGTTKRKGDPQGQDN

SEQ ID NO: 183003 - protein, 55 aa, Zea Mays
MSSSCSERFAHELGYEVLQLRSIMLLGLVVSLIITCAPLFFLLRTLPPSHLQILS

SEQ ID NO: 183004 - protein, 182 aa, Zea Mays
MAAYFNHSSSYPPPPPPPGTSPYGAYRHAYPPAPAPPAAYGAYYDRAEQALPARDEVRTLFIAGLPADAKPREVYNLFRDFPGYVSSHLRTGKSSQGMVFDLEKNCSLHVDLAKSNSRSKRLRSDDTSPYSPEKRNRKPRGFPDSGMTQVAFWAEWHERNHLYFHTTKILVLTAYGRSTTIT

SEQ ID NO: 183005 - protein, 130 aa, Zea Mays
MFQMMNLMRRFHRLFHYSQKQMMIKAKKVNVMWRSLLLLSPLNRRLAWRKQRILRSMKLMLVAPTMMKVTKTLLIQKRVNQMMTRVLRARIGQAASPLKTPPGKKFAVSDDAKKNIHVHVEVGEDGSLNH

SEQ ID NO: 183006 - protein, 124 aa, Zea Mays
MIVSQVPKKAIPLFPKADDDKSKESKCDVEKPAATESSKPKVSLEETKDPEKHEVDVGGTDDDESDEDFVDSEEGESDDDESTKSKNRPSSLTLEDTSREKVSDDAKKNIHVHVEVGEDGSLNH

SEQ ID NO: 183007 - protein, 109 aa, Zea Mays
MMIKAKKVNVMWRSLLLLSPLNRRLAWRKQRILRSMKLMLVAPTMMKVTKTLLIQKRVNQMMTRVLRARIGQAASPLKTPPGKKFAVSDDAKKNIHVHVEVGEDGSLNH

SEQ ID NO: 183008 - protein, 123 aa, Zea Mays
MMIKAKKVNVMWRSLLLLSPLNRRLAWRKQRILRSMKLMLVAPTMMKVTKTLLIQKRVNQMMTRVLRARIGQAASPLKTPPGKKLVMMLRKISTSMSKLVKTARSIIDNYKQSTGHSCKSCSK

SEQ ID NO: 183009 - protein, 124 aa, Zea Mays
MTVSQVPKKAIPLFPKADDDKSKESKCDVEKPAATESSKPKVSLEETKDPEKHEVDVGGTDDDESDEDFVDSEEGESDDDESTKSKNRPSSLTLEDTSREKVSDDAKKNIHVHVEVGEDGSLNH

SEQ ID NO: 183010 - protein, 95 aa, Zea Mays
MVIDVSNDESDEEVPQAIPLFPKADDDKSKESKCDVEKPAATESSKPKVSLEETKDPEKHEVDVGGTDDDESDEDFVDSEEGESDDDEVGISDES

SEQ ID NO: 183011 - protein, 103 aa, Zea Mays
MLNIVYIQMIKAKKVNVMWRSLLLLSPLNRRLAWRKQRILRSMKLMLVALTMMKVTKTLLIQKRVNRMMTRIPVMGMNVRVQMKKMKTLQIVLRARIGQQQHP

SEQ ID NO: 183012 - protein, 189 aa, Zea Mays
MTVSQVPKKAIPLFPKADDDKSKESKCDVEKPAATESSKPKVSLEETKDPEKHEVDVGGTDDDESDEDFVDSEEGESDDDENSSDGDECESSNEEDEDSPNSAKGKNRPAATPLKTPPGKKARTTTSSMGKRPVSVSDDAKKSIHVTGYGCKSCSKFLYQNFSQLDAVVHSDTWASNSLQGEAQCSKVK

SEQ ID NO: 183013 - protein, 84 aa, Zea Mays
MMIKAKKVNVMWRSLLLLSPLNRRLAWRKQRILRSMKLMLVALTMMKVTKTLLIQKRVNRMMTRIPVMGMNVRVQMKKMKTLQM

SEQ ID NO: 183014 - protein, 101 aa, Zea Mays
MDQIGYNAGRTPFTDISNTIITGNQNESNSLGPIVDAKERKRQRDRERYAAMTVEEKNEKNRKRREARQRNKGLSIEPLSSRGDEKLIFLLLYLHVCTIQS

SEQ ID NO: 183015 - protein, 201 aa, Zea Mays
MLRAHAQQALSLPPLCLRPRISPFPNSAASRPPLQNRWSRPRISPPCPRPPAVKRMKPGRGSVQLPHRFDEFLFNSYEGQASTSIQANQPISFDKGTLLVMDQIGYNAGRTPFTDISNTIITGNQNESNSLGPIVDAKERKRQRDRERYAAMTVEEKNEKNRKRREARQRNKGLSIEPLSSRGDEKLIFLLLYLHVCTIQS

SEQ ID NO: 183016 - protein, 62 aa, Zea Mays
MEKSFGLENYQLTNTLSVKLVWYSRRSLSYYTPRKPAPSLPLATNVGIARESILSFYFVQYF

SEQ ID NO: 183017 - protein, 142 aa, Zea Mays
MRYTWLAAMETLRMVPPVFTMTRKTVDDVEYGGYLIPKGWQVIHAANMTHWDPAIFPEPGRFDPARFENPSAVPPFAFVPFGGGARVCPGNEFARVETLVTVHHIVTRFRWKLAAGCDRSFSRFPLPYPSQGLLIDIEPIQK

SEQ ID NO: 183018 - protein, 882 aa, Zea Mays
MQFTLRQSATRTGVLQQQQHPGCQLQPPIWSSARASIPNFWPSSQEFGNCSKLTVLKAGHNNLTGGLPHELFNATSLEHLSFPNNNLQGALDGSSLVKLRNLIFLDLGSNGLEGNMPDSIGQLGRLEELHLDNNLIVGELPSALSNCRSLKYITLRNNSFMGDLSRINFTQMDLTTADFSLNKFNGTIPENIYACSNLIALRLAYNNFHGQFSPRIANLRSLSFLSVTNNSFTNITGALQNLNRCKNLTSLLIGTNFKGETIPQYAAIDGFENLRVLTIDACPLVGEIPIWLSKLTRLEILDLSYNHLTGTIPSWINRLELLFFLDISSNRLTGDIPPELMEMPMLQSEKNSAKLDPKFLELPVFWTQSRQYRLLNAFPNVLNLCNNSLTGIIPQGIGQLKVLNVLNFSTNSLSGEIPQQICNLTNLQTLDVSNNQLTGELPSALSNLHFLSWFNVSNNDLEGPVPSGGQFNTFTNSSYIGNPKLCGPMLSVHCGSVEEPRASMKMRHKKTILALALSVFFGGLAILFLLGRLILSIRSTESADRNKSSNNRDIEATSFNSASEHVRDMIKGSTLVMVPRGKGESNNLTFNDILKATNNFDQQNIIGCGGNGLVYKAELPCGSKLAIKKLNGEMCLMEREFTAEVEALSMAQHENLVPLWGYCIQGNSRLLIYSFMENGSLDDWLHNTDNANSFLDWPTRLKIAQGAGRGLSYIHNTCNPNIVHRDVKSSNILLDREFNAYVADFGLARLILPYNTHVTTELVGTLGYIPPEYGQAWVATLRGDIYSFGVVLLELLTGKRPVQVLTKSKELVQWVREMRSQGKDIEVLDPALRGRGHDEQMLNVLEVAYKCINHNPGLRPTIQEVVYCLETIVEPQQVQVQL

SEQ ID NO: 183019 - protein, 948 aa, Zea Mays
MARSRKSCCLLEDSKGGSHHLSAILRGCSDSTCHAIHSTAICHQNWCSPAAAASWMSASTTYLVLCKSVNPQFLAFLSSFAGPLPSSICIHAPSLVTLDLCLNDFSGTISPEFGNCSKLTVLKAGHNNLTGGLPHELFNATSLEHLSFPNNNLQGALDGSSLVKLRNLIFLDLGSNGLEGNMPDSIGQLGRLEELHLDNNLIVGELPSALSNCRSLKYITLRNNSFMGDLSRINFTQMDLTTADFSLNKFNGTIPENIYACSNLIALRLAYNNFHGQFSPRIANLRSLSFLSVTNNSFTNITGALQNLNRCKNLTSLLIGTNFKGETIPQYAAIDGFENLRVLTIDACPLVGEIPIWLSKLTRLEILDLSYNHLTGTIPSWINRLELLFFLDISSNRLTGDIPPELMEMPMLQSEKNSAKLDPKFLELPVFWTQSRQYRLLNAFPNVLNLCNNSLTGIIPQGIGQLKVLNVLNFSTNSLSGEIPQQICNLTNLQTLDVSNNQLTGELPSALSNLHFLSWFNVSNNDLEGPVPSGGQFNTFTNSSYIGNPKLCGPMLSVHCGSVEEPRASMKMRHKKTILALALSVFFGGLAILFLLGRLILSIRSTESADRNKSSNNRDIEATSFNSASEHVRDMIKGSTLVMVPRGKGESNNLTFNDILKATNNFDQQNIIGCGGNGLVYKAELPCGSKLAIKKLNGEMCLMEREFTAEVEALSMAQHENLVPLWGYCIQGNSRLLIYSFMENGSLDDWLHNTDNANSFLDWPTRLKIAQGAGRGLSYIHNTCNPNIVHRDVKSSNILLDREFNAYVADFGLARLILPYNTHVTTELVGTLGYIPPEYGQAWVATLRGDIYSFGVVLLELLTGKRPVQVLTKSKELVQWVREMRSQGKDIEVLDPALRGRGHDEQMLNVLEVAYKCINHNPGLRPTIQEVVYCLETIVEPQQVQVQL

SEQ ID NO: 183020 - protein, 213 aa, Zea Mays
MREVRNVTREFFQLPYEEKLKIKMTPQSGYRGYQRIGENITKGKPDMHEAIDCYTPIRPGKYGDLAKPMEGSNLWPKYPSNFEVLLENYIKLCRDISRKIMRGIALALGGAIDAFEGDTAGDPFWVLRLIGYPVDIPEEQRTDTGCGAHTDYGLLTLVNQDDDICALEVQNRSGLDKWNISAHPSQSCQQFPALPCICCILLRVQLRCCSRAC

SEQ ID NO: 183021 - protein, 248 aa, Zea Mays
MANDKDLLQVVRLLDDACKEAGFFYVKGHGIDESLMREVRNVTREFFQLPYEEKLKIKMTPQSGYRGYQRIGENITKGKPDMHEAIDCYTPIRPGKYGDLAKPMEGSNLWPKYPSNFEVLLENYIKLCRDISRKIMRGIALALGGAIDAFEGDTAGDPFWVLRLIGYPVDIPEEQRTDTGCGAHTDYGLLTLVNQDDDICALEVQNRSGLDKWNISAHPSQSCQQFPALPCICCILLRVQLRCCSRAC

SEQ ID NO: 183022 - protein, 545 aa, Zea Mays
MLGIIDPTKKRSTDDEAMFVTILRALSQAVSKIDTVYHHALLHNIFTMCVWHLHSDTRVVFLDLITRLAAVADQYLRECLQMLVNNFTPPGPLIRYIEEPRWLPKKEKIYSQLQESLKMISDTVPLAPRMLKDIIDRSMPKLFDSKAKMVSFVKCMLGLDAVVWDIIGSSLLEKVVYLLTELDVNITWEDILQDEHNKGIFDMELEDLAEDEDNLGQEGTKVHFGGNMCAEKLDGLMVVVCEHLKSRVEEPERLIKEFVTLKAIFKSHVLRVHKSKFAQFIMFYACSLHPEIGDGFANFLTDIFIDKDKNEDAITRLVDWCDYYCGHQLDNGVTANPIKHQLFYASCQAVMYVLCFRLRSIMDYPNLKQQLFRMRIRDILVHPLQPLKVCLPSIVNEFLRQATAASLFHAPAISMHEDAVESDLSKAFGGLNRLDMFFPFDPYLLKESDRYIRPNFEFWSLVKTTYSNDNSDEDDEELGDIDAPGMNVGSLDDHFEIDFNSDDDIEYKMNKMSITPQRTFYHPLATNSESNRMPARIRPSVSPPS

SEQ ID NO: 183023 - protein, 122 aa, Zea Mays
MAYWREISVCFWFLIGHRHASEEQFSRFLHYEVDAIRKACASLEEGYLPLVTFIVVQKRHHTLFCPEDHRSHRQPDRRGNILQALSVHPVHVPGNKQLACPTSQKVIAKYDELAALQAEMAL

SEQ ID NO: 183024 - protein, 181 aa, Zea Mays
MLVHISTAKQLHLVYLEKNPGVTLLVSLICRDMPVRSSLAGSCIMKWMQLESLEEGYLPLVTFIVVQKRHHTLFCPEDHRSHRQPDRRGNILQVTVVDTKICHPSEFDFYLCSHSGIQDELDAKPEELEGEELESKLLEPVAALSVHPVHVPGNKQLACPTSQKVIAKYDELAALQAEMAL

SEQ ID NO: 183025 - protein, 61 aa, Zea Mays
MSYFCFRELLVPFYKANGSRKPNRKIFYGDMPVRSSLAGSCIMKWMQLERRVPAWKRATFL

SEQ ID NO: 183026 - protein, 60 aa, Zea Mays
MGLICWYLFQYLIHNFCVLPLKGCCLLRSGIHDNMQPQIVYRAVSKKFTCIHLFSILVSI

SEQ ID NO: 183027 - protein, 330 aa, Zea Mays
MAAAASYFTGPTILPSQRATAAPDNSAVATPSLAKSRDPRCSGCSPTTVRHIARSFAAADATSGGDPVISIDGVDATNVWLLGRAVSVMNMEAGVSFTLDDGTGQIALMRWITDDIDAKEVSFVQNGLYLKVQVTLVGFQAKQHGFAHSIRPVTNFNELALHFIECMYVHLENVRPKMKDQFPRAVQANVSAHEMQAQVAHTVQTNVPAYMPFSGGVREHHVDFAPEVNQGRFPSSLQTNASTHAPFSGGVGEQQVHFTQPNQHDLQSMVLEVMQQPDILALENGVHVDEVARRLGMPRAQIMAIAQRLVDLACLYSTIDDYHFKSLLNG

SEQ ID NO: 183028 - protein, 159 aa, Zea Mays
MKDQFPRAVQANVSAHEMQAQVAHTVQTNVPAYMPFSGGVREHHVDFAPEVNQGRFPSSLQTNASTHAPFSGGVGEQQVHFTQPNQFTGGQQHDLQSMVLEVMQQPDILALENGVHVDEVARRLGMPRAQIMAIAQRLVDLACLYSTIDDYHFKSLLNG

SEQ ID NO: 183029 - protein, 405 aa, Zea Mays
MLIKRPSSLPPCNSLIVSQSSQYSIERDLISFRAIIRSSVVERMDMASSSVSAALLLAVSLAALHLCCRHGHGAGDAAGNGITAIYSLGDSITDTGNLVKEAPPGMFETIKHLPYGVTFGYPTGRCSDGLLMIDFLAQDLGLPFLNPYLGKNKSFDHGVNFAVAGATAVDPADQFNLPAVPVPFASKSLKVQLRWFKDFLKYTFGTDEGSRLKPLHCVWLRACMRACRDSQTASSFSGFGRGDRRERLQLRLLPGQACGRGGEAHPRGREDHRRRRQGGAGHGRHQGHRPGQLPHRLRAGLPGHERRLVGAGGLRLGGVPPGAQRLRRQAQLAAPARRRRPAGVVPGRRRRLRRLLRLLPHPPPQRLLVRFRRREHAQGLLRRRCRRVQLRLAADVRLPGDGGVR

SEQ ID NO: 183030 - protein, 136 aa, Zea Mays
MAACDNHGYQTRTEETHRMVQGSKLNLKSSPSTSGTNQSARLGNAQHSTPQQVTEDSSLHECKPVNCLSLFSEENSTVKERFHRETHKSVEDESWSASVESDLDLKLSIGPSSHSPKTQHWVFSGSEERKPSGQHR

SEQ ID NO: 183031 - protein, 152 aa, Zea Mays
MRSRRWHSVVAVALAAAAWWWCAAAQAQAQAQLSQSYYASTCPDVETLVRGAVTQKLQETFNAAPGTLRLFFHDCFVRGCDASVLLSGPDDEHSAGADTTLSPDALDLVTRAKAAVDADPRCANRVSCADILALAARDVVSQVLCCAVCFLG

SEQ ID NO: 183032 - protein, 114 aa, Zea Mays
MRLDIDNMSYEELLALEEHIGSVTTALTEEQFTKCVNQSVYEARNSYRDVSKIAADDVKCSVCQEEYVDGEEIGTMQCEHQYHVRCIHEWLKQKNWCPICKASAIPSEMTKGDA

SEQ ID NO: 183033 - protein, 450 aa, Zea Mays
MDESACRSTAPVGFLRRGSGISLRNQSNEDRSNQYNKQPGKSSNPNPVKLRFTENKEKPRYFQGTFHSSGSRASSVSSSKAPTAPGTGAQRRGLKNLGCTSISDVLPSGCSSSDSARDRRIEVTKKRTSGAGSSSRSRISEQSNFSQPRASYPGSTGPRARAAEQSASQQTARTNSRNIPDHTDSIRTRRPFTLRARERMMPGEREDSVFALHETVASIHPECGHFHMDGTPPERLGRPFYAELPHAIYSSNRQGSSSQTARRRSTSRTEESPQRMFHGMFWERDGYRGINMEGIAQALLALDRIEHDVELTYEQLLLLETNLLLSGLDLHDQHEDMRLDIDNMSYEELLALEEHIGSVTTALTEEQFTKCVNQSVYEARNSYRDVSKIAADDVKCSVCQEEYVDGEEIGTMQCEHQYHVRCIHEWLKQKNWCPICKASAIPSEMTKGDA

SEQ ID NO: 183034 - protein, 577 aa, Zea Mays
MDESACRSTAPVGFLRRGSGISLRNQSNEDRSNQYNKQPGKSSNPNPVKLRFTENKEKPRYFQGTFHSSGSRASSVSSSKAPARKYCDERQKQPFLAETDIAESSNRRTEVRRLQSGKKASVFGDGHPYTQKSISEASSSSTITGGLPEEHDLGALYVSGSSGSSAHPVNPRNAALNASAHMQKDKEEMSSGRPQGAPTFVRRHTLPQSFSTGVKSPTAPGTGAQRRGLKNLGCTSISDVLPSGCSSSDSARDRRIEVTKKRTSGAGSSSRSRISEQSNFSQPRASYPGSTGPRARAAEQSASQQTARTNSRNIPDHTDSIRTRRPFTLRARERMMPGEREDSVFALHETVASIHPECGHFHMDGTPPERLGRPFYAELPHAIYSSNRQGSSSQTARRRSTSRTEESPQRMFHGMFWERDGYRGINMEGIAQALLALDRIEHDVELTYEQLLLLETNLLLSGLDLHDQHEDMRLDIDNMSYEELLALEEHIGSVTTALTEEQFTKCVNQSVYEARNSYRDVSKIAADDVKCSVCQVFFTLVFQCLSIDELKLLALFGCVWIKDYWRRGLNHSLVKIE

SEQ ID NO: 183035 - protein, 217 aa, Zea Mays
MAWCVGPDRHRDQPPPNPAALLAAELSSNARTTSRPPQLKPRGKAGCECETDQTKNTYQSPAHSGRGRTIGTRPSPPSSSSHVLFHSSNGLCFIRPYCHNLPADGLREHLLDVDGGGAAAVPKIRVRGLRRRADATGEEILRGVHLDVPRGAVMGVIGPSGSGKSTLLRALNRLWEPAPGAVLLDGADICALDVLALRRKEPWLTTYDTGRSCAARS

SEQ ID NO: 183036 - protein, 112 aa, Zea Mays
MAPTQTHGGESNLNHRRADISPPDAYKYIVDRRITQSRPWCKHAASHARHRKRGRTEGGVLPLWDCSSTSMEASVIDQGCVLWDTRTGVALSPGQHAGRSLTNFSSDCTGRR

SEQ ID NO: 183037 - protein, 82 aa, Zea Mays
MDRNPASSELTSSPTLYIFLDRRPRLHLRFFVHDSKSDADSKNRGAPTSCLNQEASPGYSTSSLPSTSWNAKKPKVWFFPIK

SEQ ID NO: 183038 - protein, 782 aa, Zea Mays
MADALFVVLSKLADSLGEQTLERISTKLIEVAPVLTDFEHSMKQIEAELLILQAFIAQVGTKVGDKAFDAWLDQVRDVAHEVEDIIDEYAYLEVQAVDTGSFFKRKFLQIKKFAAWQKFHSQISHVEARIQRLGEIRNRYGILSGEIDRSKKLRSPNRLFMSDSSYLTDNSEIVGHVDEIGRLTQWLLEYKQERTLIAVFGMGGSGKTTIASSAYKSQKITRTFNCHAWVTVSQTYQVEELLREIINQLIDQRASMSSGFMTMSGLRLVEVIQSYLQDKKYFIVLDDVWDKDAWLFLNYAFVRNNCGSKVLITTRRKDVSSLAVDQYTIELKTLQYAESWELFCKKAFRASKDNQCPENLRFCAEKIVARCQGLPLAIVTIGSVLSYHEFEEQGWESFYSQLSWQLANNPELNWISNVLNMSLNDLPSYLRNCFLYCSLYPEDYKIKRKVISKLWIAEGLVEDREDGTTMEEVANYYLVELTQRCLLRVTEIHDFQQRSLNCLGATKIPVNICHLKNLQAIQIVLANKDLVSQLGNLKLMRSLAIAEVRQSYIAELWKSLTKMPNLNRLAISTCNMEEILDFKMLKPLSNLVFFKLAGKLESGVLPLMLYYFEKLTWLQLDWSGLKKDPMSSLSHMSNLVHLFMCGSYCGEQLTFCSGWFPKLNYLQLSKMENLNWIEIEDGTMMCLNNLYLVDLGNLKAVPYGIKYIRTLHQMHLTDMSKEFLGSLQGSASPVVQHICNIHIFESSDSEAVNKFFFEPYLATKFGPGATKHAPTYLGSSGI

SEQ ID NO: 183039 - protein, 579 aa, Zea Mays
MADALFVVLSKLADSLGEQTLERISTKLIEVAPVLTDFEHSMKQIEAELLILQAFIAQVGTKVGDKAFDAWLDQVRDVAHEVEDIIDEYAYLEVQAVDTGSFFKRKFLQIKKFAAWQKFHSQISHVEARIQRLGEIRNRYGILSGEIDRSKKLRSPNRLFMSDSSYLTDNSEIVGHVDEIGRLTQWLLEYKQERTLIAVFGMGGSGKTTIASSAYKSQKITRTFNCHAWVTVSQTYQVEELLREIINQLIDQRASMSSGFMTMSGLRLVEVIQSYLQDKKYFIVLDDVWDKDAWLFLNYAFVRNNCGSKVLITTRRKDVSSLAVDQYTIELKTLQYAESWELFCKKAFRASKDNQCPENLRFCAEKIVARCQGLPLAIVTIGSVLSYHEFEEQGWESFYSQLSWQLANNPELNWISNVLNMSLNDLPSYLRNCFLYCSLYPEDYKIKRKVISKLWIAEGLVEDREDGTTMEEVANYYLVELTQRCLLRVTESNACGRPRAFVMHDLVRELTSNIAKKEKFGIAYGDASTTQVPPEVRRLCIQRGAQTLNSIARLKFSSRWLCKLKLVMEPLLFFGLTVG

SEQ ID NO: 183040 - protein, 899 aa, Zea Mays
MADALFVVLSKLADSLGEQTLERISTKLIEVAPVLTDFEHSMKQIEAELLILQAFIAQVGTKVGDKAFDAWLDQVRDVAHEVEDIIDEYAYLEVQAVDTGSFFKRKFLQIKKFAAWQKFHSQISHVEARIQRLGEIRNRYGILSGEIDRSKKLRSPNRLFMSDSSYLTDNSEIVGHVDEIGRLTQWLLEYKQERTLIAVFGMGGSGKTTIASSAYKSQKITRTFNCHAWVTVSQTYQVEELLREIINQLIDQRASMSSGFMTMSGLRLVEVIQSYLQDKKYFIVLDDVWDKDAWLFLNYAFVRNNCGSKVLITTRRKDVSSLAVDQYTIELKTLQYAESWELFCKKAFRASKDNQCPENLRFCAEKIVARCQGLPLAIVTIGSVLSYHEFEEQGWESFYSQLSWQLANNPELNWISNVLNMSLNDLPSYLRNCFLYCSLYPEDYKIKRKVISKLWIAEGLVEDREDGTTMEEVANYYLVELTQRCLLRVTESNACGRPRAFVMHDLVRELTSNIAKKEKFGIAYGDASTTQVPPEVRRLCIQREVPGVVTELYNLRYIDFSYTKVKTIPASFRKLVNLQVLDLRFTYVEELPLEITTLTNLRHLHVFAVHDFQQRSLNCLGATKIPVNICHLKNLQAIQIVLANKDLVSQLGNLKLMRSLAIAEVRQSYIAELWKSLTKMPNLNRLAISTCNMEEILDFKMLKPLSNLVFFKLAGKLESGVLPLMLYYFEKLTWLQLDWSGLKKDPMSSLSHMSNLVHLFMCGSYCGEQLTFCSGWFPKLNYLQLSKMENLNWIEIEDGTMMCLNNLYLVDLGNLKAVPYGIKYIRTLHQMHLTDMSKEFLGSLQGSASPVVQHICNIHIFESSDSEAVNKFFFEPYLATKFGPGATKHAPTYLGSSGI

SEQ ID NO: 183041 - protein, 834 aa, Zea Mays
MADALFVVLSKLADSLGEQTLERISTKLIEVAPVLTDFEHSMKQIEAELLILQAFIAQVGTKVGDKAFDAWLDQVRDVAHEVEDIIDEYAYLEVQAVDTGSFFKRKFLQIKKFAAWQKFHSQISHVEARIQRLGEIRNRYGILSGEIDRSKKLRSPNRLFMSDSSYLTDNSEIVGHVDEIGRLTQWLLEYKQERTLIAVFGMGGSGKTTIASSAYKSQKITRTFNCHAWVTVSQTYQVEELLREIINQLIDQRASMSSGFMTMSGLRLVEVIQSYLQDKKYFIVLDDVWDKDAWLFLNYAFVRNNCGSKVLITTRRKDVSSLAVDQYTIELKTLQYAESWELFCKKAFRASKDNQCPENLRFCAEKIVARCQGLPLAIVTIGSVLSYHEFEEQGWESFYSQLSWQLANNPELNWISNVLNMSLNDLPSYLRNCFLYCSLYPEDYKIKRKVISKLWIAEGLVEDREDGTTMEEVANYYLVELTQRCLLRVTESNACGRPRAFVMHDLVRELTSNIAKKEKFGIAYGDASTTQVPPEVRRLCIQRVHDFQQRSLNCLGATKIPVNICHLKNLQAIQIVLANKDLVSQLGNLKLMRSLAIAEVRQSYIAELWKSLTKMPNLNRLAISTCNMEEILDFKMLKPLSNLVFFKLAGKLESGVLPLMLYYFEKLTWLQLDWSGLKKDPMSSLSHMSNLVHLFMCGSYCGEQLTFCSGWFPKLNYLQLSKMENLNWIEIEDGTMMCLNNLYLVDLGNLKAVPYGIKYIRTLHQMHLTDMSKEFLGSLQGSASPVVQHICNIHIFESSDSEAVNKFFFEPYLATKFGPGATKHAPTYLGSSGI

SEQ ID NO: 183042 - protein, 414 aa, Zea Mays
MSLNDLPSYLRNCFLYCSLYPEDYKIKRKVISKLWIAEGLVEDREDGTTMEEVANYYLVELTQRCLLRVTESNACGRPRAFVMHDLVRELTSNIAKKEKFGIAYGDASTTQVPPEVRRLCIQRVHDFQQRSLNCLGATKIPVNICHLKNLQAIQIVLANKDLVSQLGNLKLMRSLAIAEVRQSYIAELWKSLTKMPNLNRLAISTCNMEEILDFKMLKPLSNLVFFKLAGKLESGVLPLMLYYFEKLTWLQLDWSGLKKDPMSSLSHMSNLVHLFMCGSYCGEQLTFCSGWFPKLNYLQLSKMENLNWIEIEDGTMMCLNNLYLVDLGNLKAVPYGIKYIRTLHQMHLTDMSKEFLGSLQGSASPVVQHICNIHIFESSDSEAVNKFFFEPYLATKFGPGATKHAPTYLGSSGI

SEQ ID NO: 183043 - protein, 723 aa, Zea Mays
MADALFVVLRKVALSLGEGALVKIGTDVVEAAPILTDFEHGMRQTEGELLVLQAFIGQVRAQKAGDKAFGAWLDQVRDVAHEVEDIVDEYAYLTTQAMDASSFFKRKFHQVKNFAAWQKLPIRISQVEARVRRLSEMRSRYGISVGEQDRGSKLQQSNQFSASDFAYLTDDSEIVGHGEEIERLTQWLLEENQDRTLIAIFGMGGLGKTTVASSVYKNQKIRRTFDCHAWVTVSQTYQAEELLREIMNQLIEQRASLASGFMTMSRMRLVEMIQNYLRDKKYFIVLDDVWDKDAWLFLNYAFARNNCGSKVLITTRRKDVYSLAVHSHVIELKTLNYAESWELFCKKAFFALEGNICPKNLTSLVEKVVDKCQGLPLAIIAIGRILSCHGLDEWEWAFFYNQLNWQLANNSELSWISTVLNLSLDDLPSHLRSCFLYCSLFPEDHFIKRKQIAKLWIAEGLVDERGDGTTMEEVAEHYLAELTHRSLLQVIERNASGRPRTFVMHDLVREVTSITAEKEKFAVIHGHVGTTQVSHDARRLCIQKRKMKGGVLPSIFNKFEKLTQLKMDWSGLNKDPISSFSYMLTLVDVWFFGAYCGEYLSFCAGWFPNLKSLHIADMEHLTRIEIEDGTMMGLHHLELVGLRNMRLVPKGIKYIRTLRQMILTDMPKELVESLRGSDAHIVQHVPNIHIFDSSDPEAVNNFIFWPHLAKKYGSGVTKYDPRK

SEQ ID NO: 183044 - protein, 584 aa, Zea Mays
MMLPSSTISCISPRRLPSPITRSNPSPTARMADVLDPASDAPRARRPPPPPPDSPEDRSPQLPPPPPGGPPAASRKRSRSPPPPPPPPLGSSRPQRYRDHRSGGGRGGSSPSPPPYRGSRRHSPSRRSPSPPFKRSRRDDGYDRRGGRGSPPRYGYDDRRRGYDHERGGGRGGYEDDRNQGRYLNRAPDWPDSGYGAANDGPGVTQREGLMTYKQFMQVLEDDISPSEAERRYQEYRTEYITTQKRAYFDLHKNEDWLKDKYHPTNLLSVIERRNERCKVIAKDFFLDLQNGTLDLGPGITAGAASKLGGSDGNSEDDMDNDKRRKHGKDSSKATDSLSGAPKAHPVSSESRRVQADIEQTLALVRKLDAEKGIDGNVLSSGDHDKSDVDKSHIGSMGPIVIIRGLTTVKGLEGVELLDTILTYLWRIHGVDYYGTSESHEAKGLRHVRVDSKTSSTSDVSSADWEKKLDTFWQERLNGQDQLVILTAKDKIDAAAAEVLEPLVRKIRDEKYGWKYGCGAKGCTKLFHAPEFVHKHLKLKHPDLVLESTSKVREDLYFQNYMNDPNAPGGTPVMQQSAPRKTET

SEQ ID NO: 183045 - protein, 737 aa, Zea Mays
MMLPSSTISCISPRRLPSPITRSNPSPTARMADVLDPASDAPRARRPPPPPPDSPEDRSPQLPPPPPGGPPAASRKRSRSPPPPPPPPLGSSRPQRYRDHRSGGGRGGSSPSPPPYRGSRRHSPSRRSPSPPFKRSRRDDGYDRRGGRGSPPRYGRGYDHERGGGRGGYEDDRNQGRYLNRAPDWPDSGYGAANDGPGVTQREGLMTYKQFMQVLEDDISPSEAERRYQEYRTEYITTQKRAYFDLHKNEDWLKDKYHPTNLLSVIERRNERCKVIAKDFFLDLQNGTLDLGPGITAGAASKLGGSDGNSEDDMDNDKRRKHGKDSSKATDSLSGAPKAHPVSSESRRVQADIEQTLALVRKLDAEKGIDGNVLSSGDHDKSDVDKSHIGSMGPIVIIRGLTTVKGLEGVELLDTILTYLWRIHGVDYYGTSESHEAKGLRHVRVDSKTSSTSDVSSADWEKKLDTFWQERLNGQDQLVILTAKDKIDAAAAEVLEPLVRKIRDEKYGWKYGCGAKGCTKLFHAPEFVHKHLKLKHPDLVLESTSKVREDLYFQNYMNDPNAPGGTPVMQQSAPDRGRRRPSMDSRLKFDRGSNRDHDKADRDGVRYGRGDHSPSRDGPDDQMFDGFRGRPSNAPFVAEFPAPPILMPVPGAGPLGPFVPAPPEIAMHMLREQGPPPPFEPNGAPHGNAGMLGPMMGGPAPIIAMPPNFRHDPRRLRSYNDLDAPDEEVTVLDYRSL

SEQ ID NO: 183046 - protein, 414 aa, Zea Mays
MDNDKRRKHGKDSSKATDSLSGAPKAHPVSSESRRVQADIEQTLALVRKLDAEKGIDGNVLSSGDHDKSDVDKSHIGSMGPIVIIRGLTTVKGLEGVELLDTILTYLWRIHGVDYYGTSESHEAKGLRHVRVDSKTSSTSDVSSADWEKKLDTFWQERLNGQDQLVILTAKDKIDAAAAEVLEPLVRKIRDEKYGWKYGCGAKGCTKLFHAPEFVHKHLKLKHPDLVLESTSKVREDLYFQNYMNDPNAPGGTPVMQQSAPDRGRRRPSMDSRLKFDRGSNRDHDKADRDGVRYGRGDHSPSRDGPDDQMFDGFRGRPSNAPFVAEFPAPPILMPVPGAGPLGPFVPAPPEIAMHMLREQGPPPPFEPNGAPHGNAGMLGPMMGGPAPIIAMPPNFRHDPRRLRSGIFFGNKMQ

SEQ ID NO: 183047 - protein, 228 aa, Zea Mays
MDADAAAAAAAAAVSQMDPHSALVAGTVPPMATNQLTLSFQGEVYVFDSVSPDKVQAVLLLLGGRELSSLGGASSSAPYSKRLNYPHRVASLMRFREKRKERNFDKKIRYSVRKEVALRMQRNRGQFTSSKPKPDEIAASEMASADGSPNWALVEGRPPSAAECHHCGTNATATPMMRRGPDGPRTLCNACGLMWANKNGSAMSAPGSELENAAAAMTNGHESSSSGV

SEQ ID NO: 183048 - protein, 76 aa, Zea Mays
MVSVNGSVPMSFAASEEPAAYGELVSIGGIGPGVNGKLSAAVAEVLEAKLSVSRSRFYIKFDDVRGHNFGFNGSTF

SEQ ID NO: 183049 - protein, 92 aa, Zea Mays
MSMSGEPTKALTNGFLSKSTAAPIYLLFKSRKARLAGVHCASFCTAKLSPTTLPTIELSICIHALGYLHVFCAEVVTGYLWLVKMVRITGQL

SEQ ID NO: 183050 - protein, 905 aa, Zea Mays
MSSLMSMAPQKAVVAETGEVVAAQDVKVGTVLAVKAGEVVPIDGVVVDGRSEVDESTLTGESFPVAKQPESQVWAGTLNIDGYIAVRTTAMADNSAVAKMARMVEEAQNSRSRTQRLIDTCAKYYTPAVVVMAAGVAVVPVVVRAHNLKHWFQLALVLLVSACPCALVLSTPVATFCALLTAARTGLLIKGGDVLETLARIKIAAFDKTGTITRGEFSVEEFQAVGERVTTPQLLYWVSSIESRSSHPMASVLVDYAQSKSVGPKSDNVAEFQIFPGEGIYGEIDGEGVYIGNKRILSRASCETVPDMKDMKGVTVGYVACKGQLIGVFTLSDSCRTGSDEAIRELRSLGIKSVMLTGDSSAAASYAQNQLGNILDEVHSELLPEDKVRIVDELKAKHGPTLMIGDGMNDAPALAKADVGVSMGVSGSAVAMETSHITLMSNDIRRIPMAVQLARRTHRTIVVNIVFSVITKLAIVGLALAGHPLIWAAVLADVGTCMLVIMYSMLLLRSESNGGRKVKKCCASSQHGSHSHARKKHCVSHHCSDGPCNKSTAGCSKESPSAGKHACSDHGHAHTHCKEPSNHRPERHACHDHGHSHNHCKEPSSHVVTEKHVCHDHGNTHSHCEEAGNQLLLVESHGCNDHGHGHSHDRCKELSSPRFTSKHECHDHEHSHCKEPKTPCADSEAACHGHGHGHEHRHCEGDSHSHATGEHGCHEHDAHSHCEEHGHSDTAVEHACEHECHGEHQTVHAVETHHCHDHDHEHGQHELGEIEEPEKDCHDHSHHCCHEPHGKDKVAAEPVEEVTISIAALPKDEGHHHSEEQHNGEHCRKAKDCGGGGGAAPTDCAASKNCCGVKGGDACSSVQAARARETGPCCRSYVKCPRTAAASRSSCCGHSMLKLPEIVVE

SEQ ID NO: 183051 - protein, 919 aa, Zea Mays
MAEPVRPPLRAPPRRLALRAPLASPQVVRAGGGGRRPAADRPQELRGRAEAHPRRQHTHAHRSFRGDSSQGLLRGWVHRVPVHYGRMAGDQGEPQGYIAVRTTAMADNSAVAKMARMVEEAQNSRSRTQRLIDTCAKYYTPAVVVMAAGVAVVPVVVRAHNLKHWFQLALVLLVSACPCALVLSTPVATFCALLTAARTGLLIKGGDVLETLARIKIAAFDKTGTITRGEFSVEEFQAVGERVTTPQLLYWVSSIESRSSHPMASVLVDYAQSKSVGPKSDNVAEFQIFPGEGIYGEIDGEGVYIGNKRILSRASCETVPDMKDMKGVTVGYVACKGQLIGVFTLSDSCRTGSDEAIRELRSLGIKSVMLTGDSSAAASYAQNQLGNILDEVHSELLPEDKVRIVDELKAKHGPTLMIGDGMNDAPALAKADVGVSMGVSGSAVAMETSHITLMSNDIRRIPMAVQLARRTHRTIVVNIVFSVITKLAIVGLALAGHPLIWAAVLADVGTCMLVIMYSMLLLRSESNGGRKVKKCCASSQHGSHSHARKKHCVSHHCSDGPCNKSTAGCSKESPSAGKHACSDHGHAHTHCKEPSNHRPERHACHDHGHSHNHCKEPSSHVVTEKHVCHDHGNTHSHCEEAGNQLLLVESHGCNDHGHGHSHDRCKELSSPRFTSKHECHDHEHSHCKEPKTPCADSEAACHGHGHGHEHRHCEGDSHSHATGEHGCHEHDAHSHCEEHGHSDTAVEHACEHECHGEHQTVHAVETHHCHDHDHEHGQHELGEIEEPEKDCHDHSHHCCHEPHGKDKVAAEPVEEVTISIAALPKDEGHHHSEEQHNGEHCRKAKDCGGGGGAAPTDCAASKNCCGVKGGDACSSVQAARARETGPCCRSYVKCPRTAAASRSSCCGHSMLKLPEIVVE

SEQ ID NO: 183052 - protein, 1007 aa, Zea Mays
MGDAAAAGTLHKSYFDVLGICCPSEVPLVEKLLRPLPGVRTVTVIVPSRTVIVLHDAAATSPAQIVSGAIALKDYSEAGFIVFLFTTAEWLETRASHKATAGMSSLMSMAPQKAVVAETGEVVAAQDVKVGTVLAVKAGEVVPIDGVVVDGRSEVDESTLTGESFPVAKQPESQVWAGTLNIDGYIAVRTTAMADNSAVAKMARMVEEAQNSRSRTQRLIDTCAKYYTPAVVVMAAGVAVVPVVVRAHNLKHWFQLALVLLVSACPCALVLSTPVATFCALLTAARTGLLIKGGDVLETLARIKIAAFDKTGTITRGEFSVEEFQAVGERVTTPQLLYWVSSIESRSSHPMASVLVDYAQSKSVGPKSDNVAEFQIFPGEGIYGEIDGEGVYIGNKRILSRASCETVPDMKDMKGVTVGYVACKGQLIGVFTLSDSCRTGSDEAIRELRSLGIKSVMLTGDSSAAASYAQNQLGNILDEVHSELLPEDKVRIVDELKAKHGPTLMIGDGMNDAPALAKADVGVSMGVSGSAVAMETSHITLMSNDIRRIPMAVQLARRTHRTIVVNIVFSVITKLAIVGLALAGHPLIWAAVLADVGTCMLVIMYSMLLLRSESNGGRKVKKCCASSQHGSHSHARKKHCVSHHCSDGPCNKSTAGCSKESPSAGKHACSDHGHAHTHCKEPSNHRPERHACHDHGHSHNHCKEPSSHVVTEKHVCHDHGNTHSHCEEAGNQLLLVESHGCNDHGHGHSHDRCKELSSPRFTSKHECHDHEHSHCKEPKTPCADSEAACHGHGHGHEHRHCEGDSHSHATGEHGCHEHDAHSHCEEHGHSDTAVEHACEHECHGEHQTVHAVETHHCHDHDHEHGQHELGEIEEPEKDCHDHSHHCCHEPHGKDKVAAEPVEEVTISIAALPKDEGHHHSEEQHNGEHCRKAKDCGGGGGAAPTDCAASKNCCGVKGGDACSSVQAARARETGPCCRSYVKCPRTAAASRSSCCGHSMLKLPEIVVE

SEQ ID NO: 183053 - protein, 991 aa, Zea Mays
MGDAAAAGTLHKSYFDVLGICCPSEVPLVEKLLRPLPGVRTVTVIVPSRTVIVLHDAAATSPAQIVKALNQARLEASVRAYGGGSDGRQAAGSKRWPSPYVLLCGLLLVVSLFERLWPPLKWCALAAAAAGLPPIALRSFAAARRLTLDVNILMLIAVSGAIALKDYSEAGFIVFLFTTAEWLETRASHKATAGMSSLMSMAPQKAVVAETGEVVAAQDVKVGTVLAVKAGEVVPIDGVVVDGRSEVDESTLTGESFPVAKQPESQVWAGTLNIDGYIAVRTTAMADNSAVAKMARMVEEAQNSRSRTQRLIDTCAKYYTPAVVVMAAGVAVVPVVVRAHNLKHWFQLALVLLVSACPCALVLSTPVATFCALLTAARTGLLIKGGDVLETLARIKIAAFDKTGTITRGEFSVEEFQAVGERVTTPQLLYWVSSIESRSSHPMASVLVDYAQSKSVGPKSDNVAEFQIFPGEGIYGEIDGEGVYIGNKRILSRASCETVPDMKDMKGVTVGYVACKGQLIGVFTLSDSCRTGSDEAIRELRSLGIKSVMLTGDSSAAASYAQNQLGNILDEVHSELLPEDKVRIVDELKAKHGPTLMIGDGMNDAPALAKADVGVSMGVSGSAVAMETSHITLMSNDIRRIPMAVQLARRTHRTIVVNIVFSVITKLAIVGLALAGHPLIWAAVLADVGTCMLVIMYSMLLLRSESNGGRKVKKCCASSQHGSHSHARKKHCVSHHCSDGPCNKSTAGCSKESPSAGKHACSDHGHAHTHCKEPSNHRPERHACHDHGHSHNHCKEPSSHVVTEKHVCHDHGNTHSHCEEPKTPCADSEHQTVHAVETHHCHDHDHEHGQHELGEIEEPEKDCHDHSHHCCHEPHGKDKVAAEPVEEVTISIAALPKDEGHHHSEEQHNGEHCRKAKDCGGGGGAAPTDCAASKNCCGVKGGDACSSVQAARARETGPCCRSYVKCPRTAAASRSSCCGHSMLKLPEIVVE

SEQ ID NO: 183054 - protein, 438 aa, Zea Mays
MASGADAAALVTSGADEWAAACPPLRRNLQLLAPDEVELAKMLLNEGQIHLFEHWPEPGIDDDKKRGFFDQVRRLNSSYPGGLVSYIKNAKKLLADSKAGKNPYDGFTPSVPSGEILNFGDDNFVSLEAAGIKEAHNAAFVLVAGGLGERLGYKGIKVALPRETTTGKCFIQHYIESILVLQEASCKTVDDGCQKKIPFVIMTSDDTNALTIKLLESNSYFGMEPSQVKLLKQEKVACLADNDARLALDPSDKYKIQTKPHGHGDVHSLLYSSGLLEQWKSEGRKWVLFFQDTNGLLFNAIPSALGVSATKGYNVNSLAVPRKAKEAIGGITKLTHVDGRTMVINVEYNQLDPLLRATGYPDGDTNSETGYSPYPGNINQVNYIFQRDNLPYDTRSIDCSALMIWRCNANTNEFCGCCYLQCHIMCVITFHVHFVHCF

SEQ ID NO: 183055 - protein, 284 aa, Zea Mays
MASGADAAALVTSGADEWAAACPPLRRNLQLLAPDEVELAKMLLNEGQIHLFEHWPEPGIDDDKKRGFFDQVRRLNSSYPGGLVSYIKNAKKLLADSKAGKNPYDGFTPSVPSGEILNFGDDNFVSLEAAGIKEAHNAAFVLVAGGLGERLGYKGIKVALPRETTTGKCFIQHYIESILVLQEASCKTVDDGCQKKIPFVIMTSDDTNALTIKLLESNSYFGMEPSQVKLLKQEKVACLADNDARLALDPSDKYKIQTKPHGHGDVHSLLYSSGLLEQWQFRLL

SEQ ID NO: 183056 - protein, 704 aa, Zea Mays
MELAGDVLHGGTPDLAMDTPDPGMGSPELASGDPQRRPGRHERSNPWGSQPRREERRAPPPSLHRRELPGRVLERRRGGVSDAGPVLDMMAVMLENIASTPVVARSTAAAVYRTAQIIASVPNLQYQNKVFPEALFHQLLLTMIHPDHEARVAAHRIFAIVLVPSSVSPSIQASPSSRPKKHDMQRTLSRAVSVFSSSAAIFDKMKKDKNSENSQGESKDNSMHSVGEGTGQSKSQNLHVSQSRRSMKAPNFSMKRGPSMAMRAPSVAIRAPSISLRGPSMSLRASSMSVKEDQSSSNKSDEETESVLVKLSARQITLLLSSIWAQSTSPENTPVNYEAIAHTYSLLLLFSGSKASTFEALTQSFQVAFSLRSYSLTEADSLQPSRRRSLFTLSTAMIIFSSRAYNVLPLIPICKQMINDRAADPFLHLVDESRLTAVKDSSNDPSKIYGSPEDNNNALKSLSEIELSESQSRECIVSTIMNNIANMLDAELHNVRSQLLSDFTPDDMCPTSTQFFEVHADNPSSGSYETGHHQEGLLIDLGNDHDAFGEASESAEASASSIPASDLLSIDQLLETVGAEPAPQAGVVSADIGFKDMTSHCEALTIGKQQKMSAFMSFQQSVQAAGLPSSQPNQMELDLSQDPQLPQTGAHSTNPFTDDSLQGYPQYTKGPNGDNAQPGQDFQQQSLKLPAASPYDNFLRAAGC

SEQ ID NO: 183057 - protein, 1045 aa, Zea Mays
MVSLCYFCPGLTTRSRMPVKRYKKILAEIFPKTQDEEPNERRIGKLCEYASKNPLRVPKITVYLEQHIYRDLRSEQYGFAKVVMLIYRRLSVSCKEQMPLFASSLLSIVHTLLDQKRQDDLCIVGCETLFDFAVNQVDGTYQFNLEGLVPRLCEIAQEVGEDERASALRAAALQSLSAMVWFMGELSHISSEFDNVVQVVLENYKPQKMQNDDQGTNDADNQLVQEDQKAEHPPSPFIITPAPSWESIVNVKGGVNLPEEDARDPKFWSRICVHNMAKLSREATTFRRILECLFRYFGNNSSWLSENGLALCVLLDMQLLVESSGQNMHLMLSLLIKHIEHKTMLKQPDMQLSIVEVAATLAEQSSAIASPTTMGAISDLVRHLKRTFHITLGSKDTELVKWNEKFRKGIDECLVQLSKKVSDAGPVLDMMAVMLENIASTPVVARSTAAAVYRTAQIIASVPNLQYQNKVFPEALFHQLLLTMIHPDHEARVAAHRIFAIVLVPSSVSPSIQASPSSRPKKHDMQRTLSRAVSVFSSSAAIFDKMKKDKNSENSQGESKDNSMHSVGEGTGQSKSQNLHVSQSRRSMKAPNFSMKRGPSMAMRAPSVAIRAPSISLRGPSMSLRASSMSVKEDQSSSNKSDEETESVLVKLSARQITLLLSSIWAQSTSPENTPVNYEAIAHTYSLLLLFSGSKASTFEALTQSFQVAFSLRSYSLTEADSLQPSRRRSLFTLSTAMIIFSSRAYNVLPLIPICKQMINDRAADPFLHLVDESRLTAVKDSSNDPSKIYGSPEDNNNALKSLSEIELSESQSRECIVSTIMNNIANMLDAELHNVRSQLLSDFTPDDMCPTSTQFFEVHADNPSSGSYETGHHQEGLLIDLGNDHDAFGEASESAEASASSIPASDLLSIDQLLETVGAEPAPQAGVVSADIGFKDMTSHCEALTIGKQQKMSAFMSFQQSVQAAGLPSSQPNQMELDLSQDPQLPQTGAHSTNPFTDDSLQGYPQYTKGPNGDNAQPGQDFQQQSLKLPAASPYDNFLRAAGC

SEQ ID NO: 183058 - protein, 108 aa, Zea Mays
MGVTDEELQLLDAFEDVEYTRTRVEISLADSSENMLADTYVWSDAEDLNLYGEWDFEEWKKLHMKDFLAMTNGFMHELEQPESKTRVETYQEFMQQQEQPAPGTQVEG

SEQ ID NO: 183059 - protein, 216 aa, Zea Mays
MHHNARRRKPQADTISFNSSTMFYDTRQRTNLFFSQPLYGQVRSNAGSSWDNLGGLKFMETKHPPVHPTKTASPDELHFSALQITSAAAHTGHHHDLDGFMAFKGTSTKVLNQGTSPAWAAASSSNNGGPEGGRALSLLSDGSWGSSSAVIQQPTSHADAGALLPPLATVAVSNAAAAAGHPLDPSPGRFWPQDDHPPLVDGPATQIPELAHLRIW

SEQ ID NO: 183060 - protein, 63 aa, Zea Mays
MVSTSDSVLSSDVDSGDDFVACALVGAFSGTLPAFCCSSSIFCKYLACSSIRSCNCLCTWWWN

SEQ ID NO: 183061 - protein, 184 aa, Zea Mays
MSAPAAQAVVALALAAILSTPAPQADTFSNVPPTLSGGDGKQERIKHPRSAKALQCTTKCVGTCIRGGGGAPGEGPLNVRRPLVVFKDGFRSRQYWWVLLLPALQPPLLFTIADATTARGSPKMGRTDPETGQRNNMPKPKVVGATAMAAVQARYGIRFFCQASRSRTSEATRVIRYSKPVSNI

SEQ ID NO: 183062 - protein, 95 aa, Zea Mays
MSAPAAQAVVALALAAILSTPAPQADTFSNVPPTLSGGDGKQERIKHPRSAKALQCTTKCVGTCIRGGGGAPGEGPLNVRRPLVVFKDGFRSRQY

SEQ ID NO: 183063 - protein, 624 aa, Zea Mays
MAAIVAARASAPGRAAVSTIAAFHSHASPSRALPLASSSIGGARRYHHAPACCFATKPTAPAAAELVDQDLATATQEAAKPRRKRRSRKAKKSATAAKEEDGTDDKPVAAAEDEAKRKKEAAGAEDSARALVAGLDDVIVNPVGLGRRSRQVFDEVWRKFSRLGQISSASSTALAEEEQAVLIRGGPMCEFTVPGAQDTTVLVVGATSRIGRIVVRKLMLRGYNVKALVRRNDPEVIDMLPRSVDVVVGDVGDPATVKAAVSGCSKIIYCATARSTITGDLNRVDNQGDYYNELAQLRAGKSSKSKLLIAKFKSAKSLKGWEVRQGSYFPNTFVSRFDEGIDASLDFSEDQQAVFSGFVFTRGGYVEISKRLSLPLGSTLDRYDGLLFSVGGNGRSYVVILETGPLADTTQSKKYFARMTTKVGFCRVRVPFSSFRPVNPQDPPLDPFLVHTLTIRFEPKRQRPGEASQNSSDPRNFELKLEYIKALPTGQETDFILVSCSGSGIESNRREQVLKAKKAGEDALRRSGLGYTIVRPGPLQEEPGGQRALIFDQGNRISQGISCADVADICVKALHDSTARNKSFDVCYEYVSDQGNELYELVAHLPDKANNYLAPALSVLEKNT

SEQ ID NO: 183064 - protein, 269 aa, Zea Mays
MYMDQKEVVDALSHHSKIEPCITELVWRQLEHQNPLFFKAYYMRLMLKNQIMVFNKLLQDQFEVINKEFSSGIPSMSLPNGSNSNLLKQNPCFLPETAPGSAMPDGIMHNGSSRGIINGTPSGDQLLNASKDLHGLHNGIDASTSLQSDQNAAAVLYGVDNETSATIKTESCYSSNADFAFCGNTFLESCQSIGDASGGGSFSSSELNGQPLNDSILDMESSSFSFLNQMPQSFIFPDLGDDFNQSAEITQFLTPETNFSDSTGGDHTG

SEQ ID NO: 183065 - protein, 270 aa, Zea Mays
MYMDQKEVVDALSHHSKIEPCITELVWRQLEHQNPLFFKAYYMRLMLKNQIMVFNKLLQDQFEVINKEFSSGIPSMSLPNGSNSNLLKQNPCFLPETAPGSAMPDGIMHNGSSRGIINGTPSGDQLLNASKDLHGLHNGIDASTSLQSDQNAAAVLYGVDNETSATIKTESCYSSNADFAFCGNTFLESCQSIGDASGGGSFSSSELNGQPLNDSILDMESSSFSFLNQMPQSFIFPDLGDDFNQSAEITQFLTPETNFSDSTGGDHTAG

SEQ ID NO: 183066 - protein, 723 aa, Zea Mays
MAPGTSANPDLFHHILNELQVPLTAMCSRDDEEALSKCMNLGACFHLLKPLNRRSFSILWHQALEHKSKKAAPQRPSLNDSTKNRMVSPSTEKPKEVLILERNNLSVPQSNGYEEPKKQNRVTWTIELHEKFLEAVEALGGNKSARPEKILHLMNVKGLTVKHIGSHLQKHRLRNQNTKQGQRQENASRKPISRQGEATSESITPRVETDGEVYPSRLWTKVKKRSVDTSALKTGMHTCTSGNDNEGTESVWDRYENNLQVFAENKKRWMFTSEHQWPRRNNIDTTDEGDPNEAPETAAGASIEIFGSSSLISDQVGEKNRVESDRDNNTVWSTDLLEGYGASIESSGSSSLLANDQVGENNHSEAARANDSMGNITLLEAYGGAYIGTSGSGSLLTGDLVRQNGCAEATRHNDNLWGVNLPQGYGAFTEISGSSNMLTSYQVGENNGTEFARDNGHMENISLLEVYGASIENAGSSSMLTSDQVGQSNLTEADRIYDTMGSINYLEGTVDPEYIAPMDYSVAWAHLEGNGPDLRSPSDGREEAYSFWMSQLAGPQDYQSLGPEGFLQVGDDAYNDALRSVGLVNVDEQATQGWQEQQSLSMEDLLQVDDVAWDDTLISMGLINLLDEPMAEEAAIGGSQGQQSLAPEVLQAGDNAYGDDLGSIEMVNLLNEPMTQEAAIADALVDDPMTLIAQDDVPWAWSPAVPGDYGIDWIQDPNAELYG

SEQ ID NO: 183067 - protein, 781 aa, Zea Mays
MMERLSALVLDGDPASLSTISETLAKFNFRVVSFQTAEAALDFIKCGAAKAADLDLVLVEVNLNNMAPGTSANPDLFHHILNELQVPLTAMCSRDDEEALSKCMNLGACFHLLKPLNRRSFSILWHQALEHKSKKAAPQRPSLNDSTKNRMVSPSTEKPKEVLILERNNLSVPQSNGYEEPKKQNRVTWTIELHEKFLEAVEALGGNKSARPEKILHLMNVKGLTVKHIGSHLQKHRLRNQNTKQGQRQENASRKPISRQGEATSESITPRVETDGEVYPSRLWTKVKKRSVDTSALKTGMHTCTSGNDNEGTESVWDRYENNLQVFAENKKRWMFTSEHQWPRRNNIDTTDEGDPNEAPETAAGASIEIFGSSSLISDQVGEKNRVESDRDNNTVWSTDLLEGYGASIESSGSSSLLANDQVGENNHSEAARANDSMGNITLLEGTSGSGSLLTGDLVRQNGCAEATRHNDNLWGVNLPQGYGAFTEISGSSNMLTSYQVGENNGTEFARDNGHMENISLLEVYGASIENAGSSSMLTSDQVGQSNLTEADRIYDTMGSINYLEGTVDPEYIAPMDYSVAWAHLEGNGPDLRSPSDGREEAYSFWMSQLAGPQDYQSLGPEGFLQVGDDAYNDALRSVGLVNVDEQATQGWQEQQSLSMEDLLQVDDVAWDDTLISMGLINLLDEPMAEEAAIGGSQGQQSLAPEVLQAGDNAYGDDLGSIEMVNLLNEPMTQEAAIADALVDDPMTLIAQDDVPWAWSPAVPGDYGIDWIQDPNAELYG

SEQ ID NO: 183068 - protein, 80 aa, Zea Mays
MADPGMGVNSLRGHHNPVTDGGKRSRRARSRGHRVVELQSKAWRVSLIFAEHGTFTTRVKNSTRKPGHGEVGNLVGVVTN

SEQ ID NO: 183069 - protein, 224 aa, Zea Mays
MQNIRQYNCLFAFTSMGAHIDRSLNDGRGPPVFKVCGQIHHRIGSLLPMTDQPPKFLQLYVYDTSHEVNNRIRSLSSDDAPDSPIQPQIVNELLQMLDTHNPFAKKFRIAKKRLTEHANEEFIIRIIGAKEGDPVQYDMPTTDDLAMLVIGDFSLETFKRDIIIETRNSELKRISSLHPAYMALQYPLLFPYGERGFQVGVMYSGIQNKQPNSRIHMTMQDYYC

SEQ ID NO: 183070 - protein, 963 aa, Zea Mays
MEEEVTGSGGGIGRKMAAGEVDLKEKSGTAWSHSYLNQKPWHPLSYPNQRRKWIAEQVHANHARRQEEVQREFAQEQEFFRQTALFSKKDKEKMEVMKAVSFMYVRPPGYNAESAKAAEIEDEKKRSDPGDMGTASASTSSIPDKGPEKAKSGADKKNRPKDVFGRPLATEQEFEVLKNAPRLDTGAPARVKPFGVEVRNVRCLRCGNYGHQSGDRECPLKDAIMPNEESRLKRDDPLTTIMAQTDSSEPLKWELKQKPGMSPPRGGFDPDDPNQQIVAEDIFDEYGGFLGNCDIPALISNFSATKSKKRSKKKSKHKQAKSAIHEDSGRHESSYHLSSDFDNEKRNITSRSKRKKANCSDSSYSDSEIDARKGKSKSKHKHTKKYQLKSSDSEFDVREDTRRRLKRDHMKEKRDESPLPFSKDQGDTEGKRHSRCSREKHNYSYSSSSSERGRRRSREKRHYSYSPSSSERGRHSLRHKEKQYYSDSSSDRSHRHSRRSREKRHDRDSSSPDAIRRSSRSTEKQRRPDTSPRHANGHSKKSSGKQDYTERSRYETSRHSRRSQEKRHYPDSSASDYSDSDQHKKHRHHPAAAESPTPTPQAKMLSSSTSTLRLHQPTRPHRRHPPAPALGVATHLASPRRWRGHAPGAGAPLRARPQRIRAVDAAQPFDYESRAAGLLEERQRLKIAIVGFGNFGQFLARTFARQGHTLLAHSRTDHTALATTLGATFFADPHDLCECHPDVVLLATSILSAEAVLRSLPVHRLRRNTLFVDVLSVKEFPKNLLLSSLPPDFDVICTHPMFGPESARDGWDGLPFVFDRVRVGDCPARRARADAFLNIFEREGCRMVEMSCAEHDAHAAETQFLTHTVGRMLAMLELRSTPINTKGYETLLRLVDNTCSDSFDLYNGLFMYNKNSTELLNRLEWAMDSVKKRLFDGLHDVLRKQLFEGSPHAPDVSSSNVRK

SEQ ID NO: 183071 - protein, 84 aa, Zea Mays
MLLHLLTFLGIGRSFIWMQGGGSSAAKEVCSHHGPFQEQEASGGLQESCTGVRLRRSEILNSTGWPRGGSVTVGVVRSVEIELL

SEQ ID NO: 183072 - protein, 55 aa, Zea Mays
MQGGGSSAAKEVCSHHGPFQEQVHGGGGLCRCRQRKHQAACKKAALECDCDEAKF

SEQ ID NO: 183073 - protein, 200 aa, Zea Mays
MRVLNLSKAKSGDVEVSFDTSHSHSSSNIETPQNESFQSEALELVVATKKEEYGNHATSDHVSMLSVTNVAINGSEVVPEESQENLISKEPEDNGIKNLDIPIQFSETTPYPSHESFASSDHQPAIPTLVEGDKETCKEQFDVQIHGQSNDTEVACDSSVTTCEAVPDHATTELDVKSDSLDNSQSLPSSIQECEPIYQG

SEQ ID NO: 183074 - protein, 695 aa, Zea Mays
MSSDPSPHLPSPVAPPGAAEADPHHLPQPAEPHEVMHRTRAVDFLGRRTPIVYQNDNGPCPLLAICNVLLLKNVISLNPDAGEVSQQKLLSLVAERLIDPNIAGQDKDEEYVCNREQNIADAIDLLPRLATGIDVNVMFRKIDDFEFTRERAIFDLLDIPLYHGWIVDPQDTETATAIGSKSYNALASGLAEFKSGKPTEENKYVEEETVDFAAATTAALKIPSPSVSRGRSFDEHTLSNSSTVPHKRRGDLEEEEELMRVLNLSKAKSGDVEVSFDTSHSHSSSNIETPQNESFQSEALELVVATKKEEYGNHATSDHVSMLSVTNVAINGSEVVPEESQENLISKEPEDNGIKNLDIPIQFSETTPYPSHESFASSDHQPAIPTLVEGDKETCKEQFDVQIHGQSNDTEVACDSSVTTCEAVPDHATTELDVKSDSLDNSQSLPSSIQECEPIYQGEEHILGTTNMVYENQEPVYEGEVVLAEQADKIGESSSSGDDKATEHQWELIDNFLLTTANQLTVYGLFCLQEGLNESELCVFFRNNHFNTMFKYNGSLYLLATDQGFISQTDLVNGDGVFLTSNFTPFNAETPRNDSWNEQQAMTSTADYLAQFDNSTSGNSDLELAIALQQQEFERQPQRFQAPQPQQQQQQQQQPPPQTQYQTQSGRPGLVVGPRRSNAPPPSRSESKKERCIVM

SEQ ID NO: 183075 - protein, 508 aa, Zea Mays
MSSDPSPHLPSPVAPPGAAEADPHHLPQPAEPHEVMHRTRAVDFLGRRTPIVYQNDNGPCPLLAICNVLLLKNVISLNPDAGEVSQQKLLSLVAERLIDPNIAGQDKDEEYVCNREQNIADAIDLLPRLATGIDVNVMFRKIDDFEFTRERAIFDLLDIPLYHGWIVDPQDTETATAIGSKSYNALASGLAEFKSGDKETCKEQFDVQIHGQSNDTEVACDSSVTTCEAVPDHATTELDVKSDSLDNSQSLPSSIQECEPIYQGEEHILGTTNMVYENQEPVYEGEVVLAEQADKIGESSSSGDDKATEHQWELIDNFLLTTANQLTVYGLFCLQEGLNESELCVFFRNNHFNTMFKYNGSLYLLATDQGFISQTDLVWQRLDEVNGDGVFLTSNFTPFNAETPRNDSWNEQQAMTSTADYLAQFDNSTSGNSDLELAIALQQQEFERQPQRFQAPQPQQQQQQQQQPPPQTQYQTQSGRPGLVVGPRRSNAPPPSRSESKKERCIVM

SEQ ID NO: 183076 - protein, 674 aa, Zea Mays
MSSDPSPHLPSPVAPPGAAEADPHHLPQPAEPHEVMHRTRAVDFLGRRTPIVYQNDNGPCPLLAICNVLLLKNVISLNPDAGEVSQQKLLSLVAERLIDPNIAGQDKDEEYVCNREQNIADAIDLLPRLATGIDVNVMFRKIDDFEFTRERAIFDLLDIPLYHGWIVDPQDTETATAIGSKSYNALASGLAEFKSGKPTEENKYVEEETVDFAAATTAALKIPSPSVSRGRSFDEHTLSNSSTVPHKRRGDLEEEEELMRVLNLSKAKSGDVEVSFDTSHSHSSSNIETPQNESFQSEALELVVATKKEEYGNHATSDHVSMLSVTNVAINGSEVVPEESQENLISKEPEDNGIKNLDIPIQFSETTPYPSHESFASSDHQPAIPTLVEVTTCEAVPDHATTELDVKSDSLDNSQSLPSSIQECEPIYQGEEHILGTTNMVYENQEPVYEGEVVLAEQADKIGESSSSGDDKATEHQWELIDNFLLTTANQLTVYGLFCLQEGLNESELCVFFRNNHFNTMFKYNGSLYLLATDQGFISQTDLVWQRLDEVNGDGVFLTSNFTPFNAETPRNDSWNEQQAMTSTADYLAQFDNSTSGNSDLELAIALQQQEFERQPQRFQAPQPQQQQQQQQQPPPQTQYQTQSGRPGLVVGPRRSNAPPPSRSESKKERCIVM

SEQ ID NO: 183077 - protein, 708 aa, Zea Mays
MSSDPSPHLPSPVAPPGAAEADPHHLPQPAEPHEVMHRTRAVDFLGRRTPIVYQNDNGPCPLLAICNVLLLKNVISLNPDAGEVSQQKLLSLVAERLIDPNIAGQDKDEEYVCNREQNIADAIDLLPRLATGIDVNVMFRKIDDFEFTRERAIFDLLDIPLYHGWIVDPQDTETATAIGSKSYNALASGLAEFKSGKPTEENKYVEEETVDFAAATTAALKIPSPSVSRGRSFDEHTLSNSSTVPHKRRGDLEEEEELMRVLNLSKAKSGDVEVSFDTSHSHSSSNIETPQNESFQSEALELVVATKKEEYGNHATSDHVSMLSVTNVAINGSEVVPEESQENLISKEPEDNGIKNLDIPIQFSETTPYPSHESFASSDHQPAIPTLVEGDKETCKEQFDVQIHGQSNDTEVACDSSVTTCEAVPDHATTELDVKSDSLDNSQSLPSSIQECEPIYQGEEHILGTTNMVYENQEPVYEGEVVLAEQADKIGESSSSGDDKATEHQWELIDNFLLTTANQLTVYGLFCLQEGLNESELCVFFRNNHFNTMFKYNGSLYLLATDQGFISQTDLVWQRLDEVNGDGVFLTSNFTPFNAETPRNDSWNEQQAMTSTADYLAQFDNSTSGNSDLELAIALQQQEFERQPQRFQAPQPQQQQQQQQQPPPQTQYQTQSGRPGLVVGPRYIISGRSLKVPLWKSPVFPHTLHTKN

SEQ ID NO: 183078 - protein, 852 aa, Zea Mays
MLPRSRIRGRDPPPSGGRYRRRSPAPPSPRHQRRPRDPPYPQPKRRSSELPPPRRYDENPLPSGFAAAAERRSRGDILLEAGRLAAHYLVAEGLLPEHVLLSREDPNHNHSYRPEPPVPVPAPVPAPAPSSYGRKRDEDDGPRWRRSGSGAGDLDRGSKWDDNREAKRSGWDRRSHSFDERRKYNDGGDVDRGGRRTRDYNELKRPPMSRSYSHNDRRALADGTVDRRRRSRSRSRTRGYYTGSRRDPDLRAGTRDLDRTKVTDSGAVPAAGGDGGMHNVDANEIPRQPKVPGSVVVSETDDSAVEAVAIEDKQMESDTAGLDHAQDMSEGEDSEFAEDISEDEDGEFAGSDLNDEDGDEMDNTQSQLSDVHVHTSESVEELDLRQSQLSNAEEGMETCIAHVYACMVEPLAENNVCSETRYEMEEPQNGSETAVGDLYSDEQEQPLTEYNGCSEVKCEMEAARSEFETGVDNLDRDEQERLLAENNSCSEVRYGMEAPQCEVETGVGGLNRDDKEQPLVVTNDYSELRYETTASQTEVETVVGDLSRDEQELPAWYKIFDLNVIETPVGCEFSEISRSPPADDLCDSVPDLIGLVNQQENNDTSEIHGQDDRAGANQMLEDESNLDNYDLNNEADEHARDDTSVNQVQDENAEDNHLPEDGHGLMKYDMNIEAGEPAHDNHQMNNAEIHLNHSMVAHISDNCHMNNEKMLLKQNVDEQQMENEQMLIDQVTTVHVLDSHHVNHEQLLLGHSVDDHDQMEPNPMALGVHNLDNYYLSSKQVLLNNDADQHAGDIHHLKDGQIILDEAADGQARVNGQTIHVIDLEEDYQTSTFRDNLQTNTQAASSTATPDF

SEQ ID NO: 183079 - protein, 847 aa, Zea Mays
MLPRSRIRGRDPPPSGGRYRRRSPAPPSPRHQRRPRDPPYPQPKRRSSELPPPRRYDENPLPSGFAAAAERRSRGDILLEAGRLAAHYLVAEGLLPEHVLLSREDPNHNHSYRPEPPVPVPAPVPAPAPSSYGRKRDEDDGPRWRRSGSGAGDLDRGSKWDDNREAKRSGWDRRSHSFDERRKYNDGGDVDRGGRRTRDYNELKRPPMSRSYSHNDRRALADGTVDRRRRSRSRSRTRGYYTGSRRDPDLRAGTRDLDRTKVTDSGAVPAAGGDGGMHNVDANEIPRQPKVPGSVVVSETDDSAVEAVAIEDKQMESDTAGLDHAQDMSEGEDSEFAEDISEDEDGEFAGSDLNDEDGDEMDNTQSQLSDVHVHTSESVEELDLRQSQLSNAEEGMETCIAHVYACMVEPLAENNVCSETRYEMEEPQNGSETAVGDLYSDEQEQPLTEYNGCSEVKCEMEAARSEFETGVDNLDRDEQERLLAENNSCSEVRYGMEAPQCEVETGVGGLNRDDKEQPLVVTNDYSELRYETTASQTEVETVVGDLSRDEQELPAWYKIFDLNVIETPVGCEFSEISRSPPADDLCDSVPDLIGLVNQQENNDTSEIHGQDDRAGANQMLEDESNLDNYDLNNEADEHARDDTSVNQVQDENAEDNHLPEDGHGLMKYDMNIEAGEPAHDNHQMNNAEIHLNHSMVAHISDNCHMNNEKMLLKQNVDEQQMENEQMLIDQVTTVHVLDSHHVNHEQLLLGHSVDDHDQMEPNPMALGVHNLDNYYLSSKQVLLNNDADQHAGDIHHLKDGQIILDEAADGQARVNGQTIHVIDLEEDYAQQSESRNTGEYLDATPDF

SEQ ID NO: 183080 - protein, 171 aa, Zea Mays
MDAAVSLSLPLHHHAHGPLPHHATSASAVTAPPPKPDVQAPPAARLSPALAAPSPPRSSPAAARSSSRAATGYAAALADACVRAGTLRRAARHARALLHLLLRLERPLEEGAAAVEAAVTVAGQQLDARVAALVRMLVAKGRAGVLAEALAEFAAICDHLLSTRPRARHAY

SEQ ID NO: 183081 - protein, 182 aa, Zea Mays
MKECQKFRDFKASNVLLDAEFKPKLSDFGLAREGPTEGKTHVSTAVVGTHGYAAPDYIETGHLTVKSDVWSFGVVLYEILTGRRSLERSRPAEEQKLLGWVRQHPPDGAGFRAIMDPRLGGRYPLAAAREVARLADRCLGKNPKERPAMRDVVEVLERVVQMEPTTTTADKRGGDGRLPAKR

SEQ ID NO: 183082 - protein, 68 aa, Zea Mays
MDTIQFFCKYDMKDGGTPTPVAFSSPKHHMLSMPLGSLQKSYSYCYAIKLCVSTRYFLHTAYLLSGPS

SEQ ID NO: 183083 - protein, 205 aa, Zea Mays
MSPSADAPGPASSASAPPLAPLIAAQLNYLLSHSKLPIRVVQIWSGCRNGRPADRFRLAIPFCLDYVHWDFVYNALSPKVAPDVVFGPEDERFQPLVDYAAAGNGDKSCLARWDCRAPEGLHALVQELRELYIEYQKERVHMVDDARLAFELSTVLSKEGIEVCMVPSADRDVLGDYLKRSISRSFFLSAGVQATLLCLLLHDSN

SEQ ID NO: 183084 - protein, 226 aa, Zea Mays
MSPSADAPGPASSASAPPLAPLIAAQLNYLLSHSKLPIRVVQIWSGCRNGRPADRFRLAIPFCLDYVHWDFVYNALSPKVAPDVVFGPEDERFQPLVDYAAAGNGDKSCLARWDCRAPEGLHALVQELRELYIEYQKERVHMVDDARLAFELSTVLSKEGIEVCMVPSADRMRPNLLYHFWSLTLTLPNWCQDVLGDYLKRSISRSFFLSAGVQATLLCLLLHDSN

SEQ ID NO: 183085 - protein, 336 aa, Zea Mays
MSPSADAPGPASSASAPPLAPLIAAQLNYLLSHSKLPIRVVQIWSGCRNGRPADRFRLAIPFCLDYVHWDFVYNALSPKVAPDVVFGPEDERFQPLVDYAAAGNGDKSCLARWDCRAPEGLHALVQELRELYIEYQKERVHMVDDARLAFELSTVLSKEGIEVCMVPSADRPDEAKFAVPLLESDFDFAKLVPGCPWRLPQKIHLQVIFPISRSSSYSSMPSAPRLKLISTPDLRSLLSVEDVKLPPWSNGMCLAEYLPALEDSLNGLLVDASASIGSRRRFIEALAPIFGRPLEADPEGYSSFHFWNVHISGSLCHPPSIPKATTCRHTAEFSAL

SEQ ID NO: 183086 - protein, 458 aa, Zea Mays
MANGDAAVEVGGNGEQEAAARQASTFAELGICAELVEACDAMGWKEPTRIQAEAIPHALQGKDLIALAQTGSGKTGAFALPILQELLSNRQAEQSFFACVLSPTRELAIQIAEQFEALGSAIGLRCSVLVGGVDRVQQVLSIGKRPHIVVGTPGRLLDHLTETKGFSLKKIKYLVLDEADKLLNVEFEKSLDDILSEMPKDRRTFLFSATMTKKVNKLQRACLRNPAKVEVSSKYSTVDSLKQEFYFVPADDKDCYLLHVLNERLESMIMIFVRTCESTRLLALMLRNLGLKAMSISGQMSQDKRLGALNRFKAKDCNILICTDVASRGLDIQGVDMVINYDIPMNSKDYVHRVGRTARAGRSGYAVSLVNQYEAQWFVLIEQLLGFAGKKIDQCKVDRDEVLILKGPISDAKRIALTKLKDSGGHKKRRNVGDDDEEVEDHSSHSRRPKSLKRSNRR

SEQ ID NO: 183087 - protein, 79 aa, Zea Mays
MRVTLCWEPDFLLMSLLRARWMHVRWCCNCKQNMLRYIVDGEIIIRFINGRMGIMVSQFGTHPRFAHSPTHPKPWCALI

SEQ ID NO: 183088 - protein, 777 aa, Zea Mays
MRNDDLANPPKVEEKLGAVPHGLSTDSEVAQREAESISRKTLRSSAEKFEFQAEVSRLMDIIINSLYSNKDIFLRELISNASDALDKIRFLSLTDKEVLGEGDTAKLEIQIKLDKEKKILSIRDRGIGMTKEDLINNLGTIAKSGTSAFVEKMQSGGDLNLIGQFGVGFYSVYLVADYVEVVSKHNDDKQYVWESKADGSFAISEDTWNEPLGRGTEIRLHLRDEAKEYLEEDKLKDLVKKYSEFINFPIYLWSTKEVDVEVPADEDETSEEEDSSPETTEEETEEDEEKEKKPKTKTIKETTSEWELLNDMKAVWLRSPKEVTDEEYSKFYHSLAKDFGDDKPMGWSHFTAEGDVEFKALLFIPPKAPHDLYESYYNSNKSNLKLYVRRVFISDEFDDLLPKYLSFLRGIVDSDTLPLNVSREMLQQHSSLKTIKKKLIRKALDMIRKLAEEDPDEYSNKDKTDEEKNEMEEKKGQYAKFWNEFGKSIKLGIIEDATNRNRLAKLLRFESTKSDGKLASLDEYISRMKPGQKDIFYLTGSSKDQLEKSPFLERLTKKNYEVIFFTDPMDEYLMQYLMDYEDRKFQNVSKEGLKLGKDSRLKDLKESFKELTEWWKKALESESVDSVKVSSRLHDTPCVVVTSKYGWSANMEKIMQAQTLSDSSKQAYMRGKRVLEINPRHPIIKELRDKVAQDNESEELKQTARLVYQTALMESGFNLPDPKEFASSIYKSVHKSLDLSPDAAVEEEDEAEEQPEVEEKEPAAKEGSEPSFDKDEL

SEQ ID NO: 183089 - protein, 896 aa, Zea Mays
MSKFNAAPELLVSDGDLTSLGAVVDRLVTLKYVASPHPLKIQSGLVGRIGSGIVVRDRTAEVIECKFKSLSALVSIYCAVPAYQKHTYKWKFNLLILVKFQSCSDPASTAAKKLQVNAEESSDDLANPPKVEEKLGAVPHGLSTDSEVAQREAESISRKTLRSSAEKFEFQAEVSRLMDIIINSLYSNKDIFLRELISNASDALDKIRFLSLTDKEVLGEGDTAKLEIQIKLDKEKKILSIRDRGIGMTKEDLINNLGTIAKSGTSAFVEKMQSGGDLNLIGQFGVGFYSVYLVADYVEVVSKHNDDKQYVWESKADGSFAISEDTWNEPLGRGTEIRLHLRDEAKEYLEEDKLKDLVKKYSEFINFPIYLWSTKEVDVEVPADEDETSEEEDSSPETTEEETEEDEEKEKKPKTKTIKETTSEWELLNDMKAVWLRSPKEVTDEEYSKFYHSLAKDFGDDKPMGWSHFTAEGDVEFKALLFIPPKAPHDLYESYYNSNKSNLKLYVRRVFISDEFDDLLPKYLSFLRGIVDSDTLPLNVSREMLQQHSSLKTIKKKLIRKALDMIRKLAEEDPDEYSNKDKTDEEKNEMEEKKGQYAKFWNEFGKSIKLGIIEDATNRNRLAKLLRFESTKSDGKLASLDEYISRMKPGQKDIFYLTGSSKDQLEKSPFLERLTKKNYEVIFFTDPMDEYLMQYLMDYEDRKFQNVSKEGLKLGKDSRLKDLKESFKELTEWWKKALESESVDSVKVSSRLHDTPCVVVTSKYGWSANMEKIMQAQTLSDSSKQAYMRGKRVLEINPRHPIIKELRDKVAQDNESEELKQTARLVYQTALMESGFNLPDPKEFASSIYKSVHKSLDLSPDAAVEEEDEAEEQPEVEEKEPAAKEGSEPSFDKDEL

SEQ ID NO: 183090 - protein, 407 aa, Zea Mays
MPCRRPTYTTSDDTTMERSSSTSSSSRTTPGSSRLQPTRSRLGVDEEYDSAFKSKSFLDLWSHAHRHLRHTFSSSPSFKLATSSSFKSAGVVKDHDHDAASDAALEQSCSYTVLDDFVLEPSPEVLARGRGRRRRRRRVDKLLVEYFDVTQEACEACSSLLAAIAAARRHQLTLRRLLRRLEDDDDDDQAAAWDAVAAHVRLDNPLSSPGRLAAFHAVHGRCGPLAARLASAQRRLRRLARAMRVARGAAAAALVAACAAAIVASVVFAAHAVVGIGAAAAAAGVGAGPATSVRRRWYARAGAAVDAAARGAYIVGRDLDTVSCMVRRAHDELEHGRDVARIAVQGRGERPLLQEVTREEAECEEDLRTQLEELEEHVCLCLITINRSRRMVAHEMTGGSLQPTPQH

SEQ ID NO: 183091 - protein, 412 aa, Zea Mays
MPCRRPTYTTCMNHAPDDTTMERSSSTSSSSRTTPGSSRLQPTRSRLGVDEEYDSAFKSKSFLDLWSHAHRHLRHTFSSSPSFKLATSSSFKSAGVVKDHDHDAASDAALEQSCSYTVLDDFVLEPSPEVLARGRGRRRRRRRVDKLLVEYFDVTQEACEACSSLLAAIAAARRHQLTLRRLLRRLEDDDDDDQAAAWDAVAAHVRLDNPLSSPGRLAAFHAVHGRCGPLAARLASAQRRLRRLARAMRVARGAAAAALVAACAAAIVASVVFAAHAVVGIGAAAAAAGVGAGPATSVRRRWYARAGAAVDAAARGAYIVGRDLDTVSCMVRRAHDELEHGRDVARIAVQGRGERPLLQEVTREEAECEEDLRTQLEELEEHVCLCLITINRSRRMVAHEMTGGSLQPTPQH

SEQ ID NO: 183092 - protein, 427 aa, Zea Mays
MRPSSLPPSSSSLSSSLPSSSSTSIFGIGTPDDTTMERSSSTSSSSRTTPGSSRLQPTRSRLGVDEEYDSAFKSKSFLDLWSHAHRHLRHTFSSSPSFKLATSSSFKSAGVVKDHDHDAASDAALEQSCSYTVLDDFVLEPSPEVLARGRGRRRRRRRVDKLLVEYFDVTQEACEACSSLLAAIAAARRHQLTLRRLLRRLEDDDDDDQAAAWDAVAAHVRLDNPLSSPGRLAAFHAVHGRCGPLAARLASAQRRLRRLARAMRVARGAAAAALVAACAAAIVASVVFAAHAVVGIGAAAAAAGVGAGPATSVRRRWYARAGAAVDAAARGAYIVGRDLDTVSCMVRRAHDELEHGRDVARIAVQGRGERPLLQEVTREEAECEEDLRTQLEELEEHVCLCLITINRSRRMVAHEMTGGSLQPTPQH

SEQ ID NO: 183093 - protein, 475 aa, Zea Mays
MPASCHPIRRRPRCSGSSGGSSGRVAWTIVREKEREREREREREREIRIGDLHAKSQCCVLERDMDTHTTVMLPKQRDADDTTMERSSSTSSSSRTTPGSSRLQPTRSRLGVDEEYDSAFKSKSFLDLWSHAHRHLRHTFSSSPSFKLATSSSFKSAGVVKDHDHDAASDAALEQSCSYTVLDDFVLEPSPEVLARGRGRRRRRRRVDKLLVEYFDVTQEACEACSSLLAAIAAARRHQLTLRRLLRRLEDDDDDDQAAAWDAVAAHVRLDNPLSSPGRLAAFHAVHGRCGPLAARLASAQRRLRRLARAMRVARGAAAAALVAACAAAIVASVVFAAHAVVGIGAAAAAAGVGAGPATSVRRRWYARAGAAVDAAARGAYIVGRDLDTVSCMVRRAHDELEHGRDVARIAVQGRGERPLLQEVTREEAECEEDLRTQLEELEEHVCLCLITINRSRRMVAHEMTGGSLQPTPQH

SEQ ID NO: 183094 - protein, 252 aa, Zea Mays
MHPSSGAGDYAPYYPPYPSPAAPPPAAYPSVSAPASAPPYSSYPADFAPAPSYPAYPPADLPHYAPPPAAPAPPQPYYPYEPAPAPPLPPSPHNPVPSPYPSLDRAGSYGYGSGPGSGYGQELYPPKPAGGWSDDGAYAYNGGDAPEPYGSRGTAPRPGSGSALFDDYGRSIGSAADRGGRGGSAASPKVVRAVPKAETSEDVRGGVQKFRVKLLPEGAGSPMDVLCQIHRTHTQCSAPAANLQTPSRPHAT

SEQ ID NO: 183095 - protein, 205 aa, Zea Mays
MMKVHCGFMKNSGADMDIIDVKYIQKCKFVVASGIFDGYDIPHQPSNISRRSQKLFCFLMVVDEVSLDFIQKNTTVKIDSAGGKWVGIWRLLTVHRLPFDEPRRNGKIPKILTHRLFPQAWYSIWIDGKMELIVDPLLILERYLWRGKYTFAVAVHKHHRSIYEEGDAIKRRKRYARPLVDLQMKMYYYEGMEPWSPKKKMPGGE

SEQ ID NO: 183096 - protein, 394 aa, Zea Mays
MGLSSKPLHRCPIPVADDPNVVVIPKRTPNTIVKKLAYITVDKQDKDPSPLFGGRQNWKQREESFKLNSTMKVHCGFMKNSGADMDIIDVKYIQKCKFVVASGIFDGYDIPHQPSNISRRSQKLFCFLMVVDEVSLDFIQKNTTVKIDSAGGKWVGIWRLLTVHRLPFDEPRRNGKIPKILTHRLFPQAWYSIWIDGKMELIVDPLLILERYLWRGKYTFAVAVHKHHRSIYEEGDAIKRRKRYARPLVDLQMKMYYYEGMEPWSPKKKMPGDVPEGAVLIREHTATTNLFSCLWFNEVNLFTPRDQISFGYVARRLGDALELFMFPNCEYNSLFVLHRHTREHSSKVEWAKTVDEIVEKGLRESRGGLGLWTPYPADLSSVELPAVRRTSPAG

SEQ ID NO: 183097 - protein, 665 aa, Zea Mays
MVAIVGFGDRWRLRLSHEIIFQAVWNLLSILRTGDREAYRQFFLDAMVAVEDVLYVASLHDRSLSGVSPGRCLVKCLCGSLDILDTPGPFSELPASCRPKNGPGVLVDLTGDARWRPFATSLIKLVNKCLTDGTLYVDGLVTMPFVSAACSILCYGDGSLHKVCFDFARIVATVMTPEILPLESIIRSITCILSQEISELSDIRDADYDFSMGACLCALHSSCPDYIVESTAADIVNVLKRAVKTSKSAELQVALYTAYKRIIELCSVQVWKPEILLKLLSLPKPCSKLIQCIRAVIGKFGQTFFTLDDGNSQSSPQARSEKNELQKAGHKRIPQNEESNSAKRQKITESGFSAATGFEKEDYGYAFLQSLNSLINCLSPDNHESYPLDPDVAIETVQRNLYSFDASLYFEALHTVMLLQFNLPGHTKLLEDDYQLIGDGTHFVNPIYADLISMLKLIWDVGHDVTETSSNYKIEYLLMQVFAKLGNRLNSGCDLEFFDLAICNGTAEIKNEAIISLPIIVLYSGPRILGAMFKKLESVDALGLENVGKHIAFSLGFLSCLNGTTYYTDNVGKGNHCKLFLDKHYEQPVSTLDLLLRGFCCPQCDIRNRTIHNEEQISIVNIAPLQVENADFNINISKAHTLLFKFLYAGTSEEFIVSLVEASST

SEQ ID NO: 183098 - protein, 416 aa, Zea Mays
MVAIVGFGDRWRLRLSHEIIFQAVWNLLSILRTGDREAYRQFFLDAMVAVEDTPGPFSELPASCRPKNGPGVLVDLTGDARWRPFATSLIKLVNKCLTDGTLYVDGLVTMPFVSAACSILCYGDGSLHKVCFDFARIVATVMTPEILPLESIIRSITCILSQEISELSDIRDADYDFSMGACLCALHSSCPDYIVESTAADIVNVLKRAVKTSKSAELQVALYTAYKRIIELCSVQVWKPEILLKLLSLPKPCSKLIQCIRAVIGKFGQTFFTLDDGNSQSSPQARSEKNELQKAGHKRIPQNEESNSAKRQKITESGFSAATGFEKEDYGYAFLQSLNSLINCLSPDNHESYPLDPDVAIEVISLLCISLCVYPKTSLFTRVSKQVLSWISWIHKQSRETCIPLMHHCILKLFIL

SEQ ID NO: 183099 - protein, 752 aa, Zea Mays
MVAIVGFGDRWRLRLSHEIIFQAVWNLLSILRTGDREAYRQFFLDAMVAVEADVLYVASLHDRSLSGVSPGRCLVKCLCGSLDILDTPGPFSELPASCRPKNGPGVLVDLTGDARWRPFATSLIKLVNKCLTDGTLYVDGLVTMPFVSAACSILCYGDGSLHKVCFDFARIVATVMTPEILPLESIIRSITCILSQEISELSDIRDADYDFSMGACLCALHSSCPDYIVESTAADIVNVLKRAVKTSKSAELQVALYTAYKRIIELCSVQVWKPEILLKLLSLPKPCSKLIQCIRAVIGKFGQTFFTLDDGNSQSSPQARSEKNELQKAGHKRIPQNEESNSAKRQKITESGFSAATGFEKEDYGYAFLQSLNSLINCLSPDNHESYPLDPDVAIETVQRNLYSFDASLYFEALHTVMLLQFNLPGHTKLLEDDYQLIGDGTHFVNPIYADLISMLKLIWDVGHDVTETSSNYKIEYLLMQVFAKLGNRLNSGCDLEFFDLAICNGTAEIKNEAIISLPIIVLYSGPRILGAMFKKLESVDALGLENVGKHIAFSLGFLSCLNGTTYYTDNVGKGNHCKLFLDKHYEQPVSTLDLLLRGFCCPQCDIRNRTIHNEEQISIVNIAPLQVENADFNINISKAHTLLFKFLYAGTSEEFIVSLVEVLPRLLRHSNRRLLLEMRTQWNQCFEFLLCHEMKAVREAFSGVVYCFLEDSVMDILFSGGLGMNGGSKELQFMDKIKCAFTEAEDPQILL

SEQ ID NO: 183100 - protein, 821 aa, Zea Mays
MLCLVSPSSSPTPLPPPRRSRSHADRAAPPGIAGGGNVRLSVLSVQCKARRSGVRKSKFATAATVQEDKTMATAKGDVDHLPIYDLDPKLEIFKDHFRYRMKRFLEQKGSIEENEGSLESFSKGYLKFGINTNEDGTVYREWAPAAQEAELIGDFNDWNGANHKMEKDKFGVWSIKIDHVKGKPAIPHNSKVKFRFLHGGVWVDRIPALIRYATVDASKFGAPYDGVHWDPPASERYTFKHPRPSKPAAPRIYEAHVGMSGEKPAVSTYREFADNVLPRIRANNYNTVQLMAVMEHSYYASFGYHVTNFFAVSSRSGTPEDLKYLVDKAHSLGLRVLMDVVHSHASNNVTDGLNGYDVGQSTQESYFHAGDRGYHKLWDSRLFNYANWEVLRFLLSNLRYWLDEFMFDGFRFDGVTSMLYHHHGINVGFTGNYQEYFSLDTAVDAVVYMMLANHLMHKLLPEATVVAEDVSGMPVLCRPVDEGGVGFDYRLAMAIPDRWIDYLKNKDDSEWSMGEIAHTLTNRRYTEKCIAYAESHDQSIVGDKTIAFLLMDKEMYTGMSDLQPASPTIDRGIALQKMIHFITMALGGDGYLNFMGNEFGHPEWIDFPREGNNWSYDKCRRQWSLVDTDHLRYKYMNAFDQAMNALDERFSFLSSSKQIVSDMNDEEKVIVFERGDLVFVFNFHPKKTYEGYKVGCDLPGKYRVALDSDALVFGGHGRVGHDVDHFTSPEGVPGVPETNFNNRPNSFKVLSPPRTCVAYYRVDEAGAGRRLHAKAETGKTSPAESIDVKASRASSKEDKEATAGGKKGWKFARQPSDQDTK

SEQ ID NO: 183101 - protein, 298 aa, Zea Mays
MAMELAKQLLVAVLRSYAPPLWATIIASVFVIISVSLSLYLLLNHLSAYKNPEEQKFLVGVILMVPCYAVESYISLVYPSISVDIEIMRDGYEAFAMYCFGRYLVACLGGEDRTIEFLKREGGSGSAVPLLGQASEQRYVNHPFPMNYMLKPWPLGEWFYLVIKFGLVQYMIIKSICAILAVILESFGVYCEGEFKLNCGYSYTAVVLNFSQSWALYCLVQFYAVIKDELAHIKPLAKFLTFKSIVFLTWWQGIAIALLFNWGSLRGPIAQELQFKSSIQDFIICIEFLEIMLLSTAL

SEQ ID NO: 183102 - protein, 418 aa, Zea Mays
MLCSRVGKYISLVYPSISVDIEIMRDGYEAFAMYCFGRYLVACLGGEDRTIEFLKREGGSGSAVPLLGQASEQRYVNHPFPMNYMLKPWPLGEWFYLVIKFGLVQYMIIKSICAILAVILESFGVYCEGEFKLNCGYSYTAVVLNFSQSWALYCLVQFYAVIKDELAHIKPLAKFLTFKSIVFLTWWQGIAIALLFNWGSLRGPIAQELQFKSSIQDFIICIEMGVAAVAHLYVFPAKPYELIGDCFVGDVSVLGDYASVDCPLDPDEVKDSERPTKFRLPQPDDHVRCSTAIKESVRDVVLGGGEYIVNDLKFTVNHAVEPINEKLHMISENIKKREKGKRKTNDDSCISSPTSLTRVISGIDDPLLNGSLSDNSGPKKARRQRRKSGYASAESGGESSDHGLGGFEIRGNRWITRE

SEQ ID NO: 183103 - protein, 142 aa, Zea Mays
MKGAKSKGAAKADAKLAVKSKGAEKPAKGRKGKAGKDPNKPKRAPSAFFVFMEEFRKEFKEKNPKNKSVAADKAPYVAKANKLKLEYNKAIAAYNKGESTAAKKAPAKEEEEEDEEESDKSKSEVNDEDDEEGSEEDEDDDE

SEQ ID NO: 183104 - protein, 120 aa, Zea Mays
MKGAKSKGAAKADAKEEFRKEFKEKNPKNKSVAAVGKAAGDRWKSLSESDKAPYVAKANKLKLEYNKAIAAYNKGESTAAKKAPAKEEEEEDEEESDKSKSEVNDEDDEEGSEEDEDDDE

SEQ ID NO: 183105 - protein, 61 aa, Zea Mays
MPLGHAFLLIPCACPPLLQRPSPPFPLPSLPLPAGRQRQFRPRFDPDSSARDRDSLRQARI

SEQ ID NO: 183106 - protein, 427 aa, Zea Mays
MERDALDSPALSIDKRLRSDAVESPLVDDATQPKEGADGYPVKVRKPYTITKQREKWTEEEHGKFLEALKLYGRSWRQIQEHIGTKTAVQIRSHAQKFFSKVVREPGASNSIEIPPPRPKRKPLHPYPRKCADSTVTNAPMGEPKNAPVSSPSGSDQENGSPVSVLSAMQSDAFGSSISNPSTGGTSPASSDDGNNVPEIVNGEENLLTQQIEDRSHQESKQDNSDGELSEEDSSRVQETSLKLFGKTVIIPDPKKVCSSDGGAGDDTQEVMQTSWVGGGVAAYPAHNGWFLPFHSFPAHMYESGDARISPLHMWWPYYGFPAGHPRGFGTGLLNEGAIESDADNSPSVETNSDRTGNVHVQTTTPTIHNNAVKESVGPVEMPESGPSIELKPSANSAFVRVKPSSSVSGDQSLVRGFVPYKRCKVE

SEQ ID NO: 183107 - protein, 332 aa, Zea Mays
MESMAQVVREPGASNSIEIPPPRPKRKPLHPYPRKCADSTVTNAPMGEPKNAPVSSPSGSDQENGSPVSVLSAMQSDAFGSSISNPSTGGTSPASSDDGNNVPEIVNGEENLLTQQIEDRSHQESKQDNSDGELSEEDSSRVQETSLKLFGKTVIIPDPKKVCSSDGGAGDDTQEVMQTSWVGGGVAAYPAHNGWFLPFHSFPAHMYESGDARISPLHMWWPYYGFPAGHPRGFGTGLLNEGAIESDADNSPSVETNSDRTGNVHVQTTTPTIHNNAVKESVGPVEMPESGPSIELKPSANSAFVRVKPSSSVSGDQSLVRGFVPYKRCKVE

SEQ ID NO: 183108 - protein, 335 aa, Zea Mays
MVGLGARYKVVREPGASNSIEIPPPRPKRKPLHPYPRKCADSTVTNAPMGEPKNAPVSSPSGSDQENGSPVSVLSAMQSDAFGSSISNPSTGGTSPASSDDGNNVPEIVNGEENLLTQQIEDRSHQESKQDNSDGELSEEDSSRVQETSLKLFGKTVIIPDPKKVCSSDGGAGDDTQEVMQTSWVGGGVAAYPAHNGWFLPFHSFPAHMYESGDARISPLHMWWPYYGFPAGHPRGFGTGLLNEGAIESDADNSPSVETNSDRTGNVHVQTTTPTIHNNAVKESVGPVEMPESGPSIELKPSANSAFVRVKPSSSVSGDQSLVRGFVPYKRCKVE

SEQ ID NO: 183109 - protein, 756 aa, Zea Mays
MMYYRKALELQAFLDMANNDDLMKGYRAMEVMSEDSPLKTQCKAIADMKFTYVVSCQLYGIQKRSNEPCAHDILRLMTEYPSLRVAYIDEVEAPSKDRIKKIEKVYYSVLVKASVTKPNEPGQSLDQVIYKIKLPGNAILGEGKPENQNHAIIFTRGECLQTIDMNQEHYMEEALKMRNLLQEFEKKHGVRHPSILGVREHIFTGSVSSLAWFMSNQETSFVTIGQRVLANPLSKASKIINLSEDIFAGFNSTLREGNVTHHEYMQVGKGRDVGLNQISLFEAKIANGNGEQTLSRDIYRLGHRFDFFRMLSCYYTTIGFYFSTMITVWTVYVFLYGRLYLVLSGLDEALATGKRFVHNTPLQVALASESFVQLGFLMALPMMMEIGLERGFRTALSDFILMQLQLASVFFTFSLGTKTHYYGRTLLHGGAEYRATGRGFVVFHAKFAENYRLYSRSHFVKGLELMILLVVYEIFGQSYRGAITYIFITVSMWFMVGTWLFAPFLFNPSGFEWQKIVDDWTDWHKWISNRGGIGVAPEKSWESWWEKEQEPLRYSGKRGTIVEILLALRFFIYQYGLVYHLNITKKITKDNQSVLVYCFSWVVIFVVLLVMKTVSVGRRRFSAEFQLVFRLIKGLIFITFTAIVVILIAIPGMTVLDIFVCILAFMPTGWGLLLIAQAIRPVIQKIGLWGSIKALARGYEILMGLLLFTPIAFLAWFPFVSEFQTRMLFNQAFSRGLQISRILGGHKKDRGTRSKE

SEQ ID NO: 183110 - protein, 462 aa, Zea Mays
MQVGKGRDVGLNQISLFEAKIANGNGEQTLSRDIYRLGHRFDFFRMLSCYYTTIGFYFSTMITVWTVYVFLYGRLYLVLSGLDEALATGKRFVHNTPLQVALASESFVQLGFLMALPMMMEIGLERGFRTALSDFILMQLQLASVFFTFSLGTKTHYYGRTLLHGGAEYRATGRGFVVFHAKFAENYRLYSRSHFVKGLELMILLVVYEIFGQSYRGAITYIFITVSMWFMVGTWLFAPFLFNPSGFEWQKIVDDWTDWHKWISNRGGIGVAPEKSWESWWEKEQEPLRYSGKRGTIVEILLALRFFIYQYGLVYHLNITKKITKDNQSVLVYCFSWVVIFVVLLVMKTVSVGRRRFSAEFQLVFRLIKGLIFITFTAIVIAQAIRPVIQKIGLWGSIKALARGYEILMGLLLFTPIAFLAWFPFVSEFQTRMLFNQAFSRGLQISRILGGHKKDRGTRSKE

SEQ ID NO: 183111 - protein, 1050 aa, Zea Mays
MGRIGTAVRGGRARIRPSLGPRTFRMGSWVARSSGSRRQRGGRRRGGRRFRGGCWREAGGGVGAGKGRDRGGRRREDRRAGDGRAAILSRCIEWGETPPDFFFLSWCRDSNPGWLSRPLLWRVRLTSCTIKPLVQPTKDIMREPIRTFQWHEFFPHGTNNIGVVISLWAPIILVYFMDTQIWYALFSTLIGGIYGAYRRLGEIRTLGMLRSRFESLPEAFNERLIPSDANKSKGLRAAFSSRPKASGDESEREKRAARFAQMWNAIITSFREEDLIDNREKDLLLVPDCKDRELDIFQWPPFLLASKIPIALDMAADSGGKDRDLTKRIKSDPYFSFAIRECYASFKNIINTLVFGQREKDVLVQIFTVVDKHIEEETLITGLNMKNLPALSKKFVELLELLQKNKEEDLGQVVILFQDMLEVVTRDIMEEQDLLETLDSLHGANSRKHEGITPLDQQDQLFAKAIKFPVVESNAWTEKIKRLHLLLTVKESAMDVPINLDARRRISFFANSLFMDMPNAPKVRNMLPFSILTPYYKEDVLFSLQNLEERNEDGVSILFYLQKIYPDEWKNFLERVGCKNEEVLREDEQLEEKLCLWVSYRGQTLTRTVRGMMYYRKALELQAFLDMANNDDLMKGYRAMEVMSEDSPLKTQCKAIADMKFTYVVSCQLYGIQKRSNEPCAHDILRLMTEYPSLRVAYIDEVEAPSKDRIKKIEKVYYSVLVKASVTKPNEPGQSLDQVIYKIKLPGNAILGEGKPENQNHAIIFTRGECLQTIDMNQEHYMEEALKMRNLLQEFEKKHGVRHPSILGVREHIFTGSVSSLAWFMSNQETSFVTIGQRVLANPLRVRFHYGHPDVFDRLFHVTRGGVSKASKIINLSEDIFAGFNSTLREGNVTHHEYMQVGKGRDVGLNQISLFEAKIANGNGEQTLSRDIYRLGHRFDFFRMLSCYYTTIGFYFSTMITVWTVYVFLYGRLYLVLSGLDEALATGKSFSWPLFSSHSRWEQKLTTTEGRYSMEERNTEPLDVGLWCSMPNLLRTIDFIPVAILSRALS

SEQ ID NO: 183112 - protein, 1165 aa, Zea Mays
MREPIRTFQWHEFFPHGTNNIGVVISLWAPIILVYFMDTQIWYALFSTLIGGIYGAYRRLGEIRTLGMLRSRFESLPEAFNERLIPSDANKSKGLRAAFSSRPKASGDESEREKRAARFAQMWNAIITSFREEDLIDNREKDLLLVPDCKDRELDIFQWPPFLLASKIPIALDMAADSGGKDRDLTKRIKSDPYFSFAIRECYASFKNIINTLVFGQREKDVLVQIFTVVDKHIEEETLITGLNMKNLPALSKKFVELLELLQKNKEEDLGQVVILFQDMLEVVTRDIMEEQDLLETLDSLHGANSRKHEGITPLDQQDQLFAKAIKFPVVESNAWTEKIKRLHLLLTVKESAMDVPINLDARRRISFFANSLFMDMPNAPKVRNMLPFSILTPYYKEDVLFSLQNLEERNEDGVSILFYLQKIYPDEWKNFLERVGCKNEEVLREDEQLEEKLCLWVSYRGQTLTRTVRGMMYYRKALELQAFLDMANNDDLMKGYRAMEVMSEDSPLKTQCKAIADMKFTYVVSCQLYGIQKRSNEPCAHDILRLMTEYPSLRVAYIDEVEAPSKDRIKKIEKVYYSVLVKASVTKPNEPGQSLDQVIYKIKLPGNAILGEGKPENQNHAIIFTRGECLQTIDMNQALKMRNLLQEFEKKHGVRHPSILGVREHIFTGSVSSLAWFMSNQETSFVTIGQRVLANPLRVRFHYGHPDVFDRLFHVTRGGVSKASKIINLSEDIFAGFNSTLREGNVTHHEYMQVGKGRDVGLNQISLFEAKIANGNGEQTLSRDIYRLGHRFDFFRMLSCYYTTIGFYFSTMITVWTVYVFLYGRLYLVLSGLDEALATGKRFVHNTPLQVALASESFVQLGFLMALPMMMEIGLERGFRTALSDFILMQLQLASVFFTFSLGTKTHYYGRTLLHGGAEYRATGRGFVVFHAKFAENYRLYSRSHFVKGLELMILLVVYEIFGQSYRGAITYIFITVSMWFMVGTWLFAPFLFNPSGFEWQKIVDDWTDWHKWISNRGGIGVAPEKSWESWWEKEQEPLRYSGKRGTIVEILLALRFFIYQYGLVYHLNITKKITKDNQSVLVYCFSWVVIFVVLLVMKTVSVGRRRFSAEFQLVFRLIKGLIFITFTAIVVILIAIPGMTVLDIFVCILAFMPTGWGLLLVSS

SEQ ID NO: 183113 - protein, 1582 aa, Zea Mays
MAAPGRRTADVSSSSPSPSPAAPSTGRRLLRTQTVANLGESIFDSEVVPSSLVEIAPILRVANEVEVENPRVAYLCRFYAFEKAHRLDPTSSGRGVRQFKTALLQRLERENDPTLKGRVHKSDASEMQRFYREYYRKYIQALQTVVNKDDRARLTKAYQTAAILFEVLRAVNDSQSVEVDQAILDTHIKVEEKKKLFLPYNILPLDPESTGEAIMRYPEIQAAVYALRNTRGLPWPKDQDKKPEEKNTGKDLLDWLQAMFGFQKDNVSNQREHLILLLANVHIRKIPKADQQPKLDDKALDDVMKKLFKNYKKWCKYLGRKSSLWLPTIQQEVQQRKLLYMGLYLLIWGEAANLRFMPECICYIYHHMAFELYGMLAGNVSPMTGENVRPAYGGDEEAFLTKVVTPIYKVIEKEAERSKTMKSKHSHWRNYDDLNEYFWSVDCFRLGWPMRADADFFKTPKDPYLNHLNGENRSAGNVHWMGKVNFVEIRSFWHIFRSFDRMWIFLILSLQAMIIIAWNGGTPSDIFDAGVFKKVLSIFISAAILKLGQVTYAYTWENPTGLARTIKSWLGDGQNQPSLYILAVVIYMAPNILASMLFLFPFMRRILESSNVKVITIMMWWSQPRLFVGRGMHEGAFSLFKYTMFWIILLAMKLIVSFYIEIKPLVQPTKDIMREPIRTFQWHEFFPHGTNNIGVVISLWAPIILVYFMDTQIWYALFSTLIGGIYGAYRRLGEIRTLGMLRSRFESLPEAFNERLIPSDANKSKGLRAAFSSRPKASGDESEREKRAARFAQMWNAIITSFREEDLIDNREKDLLLVPDCKDRELDIFQWPPFLLASKIPIALDMAADSGGKDRDLTKRIKSDPYFSFAIRECYASFKNIINTLVFGQREKDVLVQIFTVVDKHIEEETLITGLNMKNLPALSKKFVELLELLQKNKEEDLGQVVILFQDMLEVVTRDIMEEQDLLETLDSLHGANSRKHEGITPLDQQDQLFAKAIKFPVVESNAWTEKIKRLHLLLTVKESAMDVPINLDARRRISFFANSLFMDMPNAPKVRNMLPFSILTPYYKEDVLFSLQNLEERNEDGVSILFYLQKIYPDEWKNFLERVGCKNEEVLREDEQLEEKLCLWVSYRGQTLTRTVRGMMYYRKALELQAFLDMANNDDLMKGYRAMEVMSEDSPLKTQCKAIADMKFTYVVSCQLYGIQKRSNEPCAHDILRLMTEYPSLRVAYIDEVEAPSKDRIKKIEKVYYSVLVKASVTKPNEPGQSLDQVIYKIKLPGNAILGEGKPENQNHAIIFTRGECLQTIDMNQEHYMEEALKMRNLLQEFEKKHGVRHPSILGVREHIFTGSVSSLAWFMSNQETSFVTIGQRVLANPLRVRFHYGHPDVFDRLFHVTRGGVSKASKIINLSEDIFAGFNSTLREGNVTHHEYMQVGKGRDVGLNQISLFEAKIANGNGEQTLSRDIYRLGHRFDFFRMLSCYYTTIGFYFSTMITVWTVYVFLYGRLYLVLSGLDEALATGKSFSWPLFSSHSRWEQKLTTTEGRYSMEERNTEPLDVGLWCSMPNLLRTIDFIPVAILSRALS

SEQ ID NO: 183114 - protein, 1098 aa, Zea Mays
MLRSRFESLPEAFNERLIPSDANKSKGLRAAFSSRPKASGDESEREKRAARFAQMWNAIITSFREEDLIDNREKDLLLVPDCKDRELDIFQWPPFLLASKIPIALDMAADSGGKDRDLTKRIKSDPYFSFAIRECYASFKNIINTLVFGQREKDVLVQIFTVVDKHIEEETLITGLNMKNLPALSKKFVELLELLQKNKEEDLGQVVILFQDMLEVVTRDIMEEQDLLETLDSLHGANSRKHEGITPLDQQDQLFAKAIKFPVVESNAWTEKIKRLHLLLTVKESAMDVPINLDARRRISFFANSLFMDMPNAPKVRNMLPFSILTPYYKEDVLFSLQNLEERNEDGVSILFYLQKIYPDEWKNFLERVGCKNEEVLREDEQLEEKLCLWVSYRGQTLTRTVRGMMYYRKALELQAFLDMANNDDLMKGYRAMEVMSEDSPLKTQCKAIADMKFTYVVSCQLYGIQKRSNEPCAHDILRLMTEYPSLRVAYIDEVEAPSKDRIKKIEKVYYSVLVKASVTKPNEPGQSLDQVIYKIKLPGNAILGEGKPENQNHAIIFTRGECLQTIDMNQALKMRNLLQEFEKKHGVRHPSILGVREHIFTGSVSSLAWFMSNQETSFVTIGQRVLANPLRVRFHYGHPDVFDRLFHVTRGGVSKASKIINLSEDIFAGFNSTLREGNVTHHEYMQVGKGRDVGLNQISLFEAKIANGNGEQTLSRDIYRLGHRFDFFRMLSCYYTTIGFYFSTMITVWTVYVFLYGRLYLVLSGLDEALATGKRFVHNTPLQVALASESFVQLGFLMALPMMMEIGLERGFRTALSDFILMQLQLASVFFTFSLGTKTHYYGRTLLHGGAEYRATGRGFVVFHAKFAENYRLYSRSHFVKGLELMILLVVYEIFGQSYRGAITYIFITVSMWFMVGTWLFAPFLFNPSGFEWQKIVDDWTDWHKWISNRGGIGVAPEKSWESWWEKEQEPLRYSGKRGTIVEILLALRFFIYQYGLVYHLNITKKITKDNQSVLVYCFSWVVIFVVLLVMKTVSVGRRRFSAEFQLVFRLIKGLIFITFTAIVVILIAIPGMTVLDIFVCILAFMPTGWGLLLVSS

SEQ ID NO: 183115 - protein, 965 aa, Zea Mays
MAAVLDSFVKRCTASLEDFADQEACAALGIVDDVRGLLATLLRIDAIISHEERRRVLSAKTDAWVVQVKDAMYEIDDVLDVCMIEGAKILAAGGPPTPKVRCFFCFKLSGPRKFRHEIGFTIRDIDLRLREVEEEMPRLPAGSAHSDDAKRDWFSRDVCKNCSDAMKPQAVGSQVQKAVGGLVPRMLREGKKKVDVFAIVGAVGIGKTTLAREIYNDDRMTENFPICVWVDMSKNLSELDFLKTIIRGAGANVGVTENKEELLILLASALSKRFLLVLDDLESPSIWDNLLKDSLGDGVVRGRILITTRNEEVATSMKATIHHVDKMDPESAWALLCNQVDAECNSEELATLKDVGIKIAEKCDGHPLAIKVIAGILRSRGNSKAEWEMVLNNDSWSMCPILPEVPQAVYVSYVDLSSQLKECFLHCSLYPEEFPIQRFALVRRWIAEGIVNARDKKLLEESAQEYYVELISRNLLQPDPESVERCWITHHLLRSLARALIADESILIYGQQKLNTSLSKPRHLTLCSMENSLDGPISLKQQMGLRSLMLFKSPNVRAIDLLMESASCLRVLDLSKTAVEAIPKSIGNLVHLRYLNLDGAQVRDIPSSIGFLINLQTLSLQGCQSLQRLPRSIRALLELRCLCLYGTSLSYVPKGVGKLKHLNHLDGLIIGHDNNAPEGCDLDDLKALSELRHLHIESLDRATSGASALANKPFLEDLYLSEQAPAIENQEDLEDKDETEKEEKEGQERSNGQCRGDESTKASEKIWNELTPPQSIKKLVIKNYKGVKFPKWIKGPKLGDSFPSLVFLDLENCMSCTKLPSLGLLSQLQSLQISNADSVITIGSEFLGTTVLSSATPFPKLEVLKLRNMKKLEEWSLTVEESQVVLPCLKSLQIQWCPKLKALPEGLKHVALCELHVEGAHSLTEIKDLPKLSDELHLKDNKVLMRCSTSDLSFLRPPRHFISKS

SEQ ID NO: 183116 - protein, 360 aa, Zea Mays
MNGSYTSSLSLHDVSVDDGQSALDNSSRTSSPFDILTPQDVIPIETASQVDGKSSKRKQQEVRYEGDPRVALPLMYIANLYETLISDVNVRLAALIGFREKTIGLALEASGGLYRKLIQRFPKRGHCSFKRRELATSHATRTKFPELVVQEEKRVRFVVINGLAIVERPENMRMEDAEWFKRLTGRSEVAICSRDYKFYSPRHKIRRSPQAAFDIPDTSALAEDENSSLVCSSGFRSPNEIQNQHQSTSKRPIEHLENQPFLHLFHQAEDDSMQQVQHCAQFPPIHQCTSTPHLSDNPQHQQQAYLSQHISCLQVGQGHLGGRMHIIPTSPAKFCDECGSPYLRATSKFCSECGTKRLGM

SEQ ID NO: 183117 - protein, 301 aa, Zea Mays
MNGSYTSSLSLHDVSVDDGQSALDNSSRTSSPFDILTPQDVIPIETARSRFLDLVVESFICEHVTELVECSSSDCSQVDGKSSKRKQQEVRYEGDPRVALPLMYIANLYETLISDVNVRLAALIGFREKTIGLALEASGGLYRKLIQRFPKRGHCSFKRRELATSHATRTKFPELVVQEEKRVRFVVINGLAIVERPENMRMEDAEWFKRLTGRSEVAICSRDYKFYSPRHKIRRSPQAAFDIPDTSALAEDENSSLVCSSGFRSPNEPTSPAKFCDECGSPYLRATSKFCSECGTKRLGM

SEQ ID NO: 183118 - protein, 393 aa, Zea Mays
MNGSYTSSLSLHDVSVDDGQSALDNSSRTSSPFDILTPQDVIPIETARSRFLDLVVESFICEHVTELVECSSSDCSQVDGKSSKRKQQEVRYEGDPRVALPLMYIANLYETLISDVNVRLAALIGFREKTIGLALEASGGLYRKLIQRFPKRGHCSFKRRELATSHATRTKFPELVVQEEKRVRFVVINGLAIVERPENMRMEDAEWFKRLTGRSEVAICSRDYKFYSPRHKIRRSPQAAFDIPDTSALAEDENSSLVCSSGFRSPNELALFQIQNQHQSTSKRPIEHLENQPFLHLFHQAEDDSMQQVQHCAQFPPIHQCTSTPHLSDNPQHQQQAYLSQHISCLQVGQGHLGGRMHIIPTSPAKFCDECGSPYLRATSKFCSECGTKRLGM

SEQ ID NO: 183119 - protein, 192 aa, Zea Mays
MRMEDAEWFKRLTGRSEVAICSRDYKFYSPRHKIRRSPQAAFDIPDTSALAEDENSSLVCSSGFRSPNEIQNQHQSTSKRPIEHLENQPFLHLFHQAEDDSMQQVQHCAQFPPIHQCTSTPHLSDNPQHQQQAYLSQHISCLQVGQGHLGGRMHIIPTSPAKFCDECGSPYLRFCDECGSPYLRATSKFCSE

SEQ ID NO: 183120 - protein, 88 aa, Zea Mays
MQQVQHCAQFPPIHQCTSTPHLSDNPQHQQQAYLSQHISCLQVGQGHLGGRMHIIPTSPAKFCDECGSPYLRATSKFCSECGTKRLGM

SEQ ID NO: 183121 - protein, 340 aa, Zea Mays
MAAPPPTGCFKCGRPGHWSRDCPSSASTNPPAAADAPTNPSHLSGAASRFNAKPRPPAAAVDGEDGKGKKKKERATRPKLTPDLLLSDGGIGFVLRYFPKAFKPRARPGHEVDDLANLIKLYADWHSRLIPYYSFEQFVRKLEKLGAGNRVRDVFPNSGIGSPEAVILRFCTNRQSTKTCHCQAEVNMVLKTQFSAPMLRCRTTMALAPWCRKTQIHRWRATTWWIPWKRICLTKSTKTQLISRLVREPARSLRSSRLQKKPTRWRRNPRTATSPSRRRLSSLRRRRHAWRPTGSRPWRERRHGLVPRSSPPRYARCCCLHFTSIVGWLVEMMHHSVVCH

SEQ ID NO: 183122 - protein, 382 aa, Zea Mays
MRKRDLGILLLAAFAIFFSLHHEGDFSFRESWYHLTDEDFPIKYEADRLPPPLVADLNGDGKPEVLLPTHDAKIQVLQPPHARHLNDDSAFQEARVMADISLLPDNVRLASGRRPIAMAVGNVDRSYRPGEVRKQVLVVVTSGWSVMCFDHNLKKLWEHNLQDDFPHAAHHREVAISITNYTLKHGDAGLVIVGGRMEMQHHSADLFDEFMIPEHNMDDRRRSASEKQGSEAGNADLRHFALYAFAGRSGDRRWSRKNENIQSQPSDASVMLPQHNYKLDVHALNSHQPGQFECREFRESILGIMPHHWDRREDTTLQLAHFRKHKRKQVKRTPGKAVINSVNKPIEHNPPGKDASNRIARALGKAADMANSNKARKVVSFT

SEQ ID NO: 183123 - protein, 95 aa, Zea Mays
MYRNDLIHGWGLDMKLGYCAQGDRTEKVGVIDSEYVVHQGIPSLGGPSLSSKTPRRSLDLRTHIRRQSSAELEKFKERWNRAVREDEGWRDPFDS

SEQ ID NO: 183124 - protein, 76 aa, Zea Mays
MYRNDLIHGWGLDMKLGYCAQGDRTEKVGVIDSEYVVHQGIPSLGGPSLSSKVLDISATNYFFRNLESGRTKDEVY

SEQ ID NO: 183125 - protein, 133 aa, Zea Mays
MKHQPPRRWGVVAAVVALVLLACLQIQYHHLKVDLGKAGFASATQENNAIRSRNRIRWGPDRNGAHSLPRGIVHRHSDMSLRPLWEDDTASTHKNKNSDYSALLAMAVGISQIKNIDTMALSEGKLCSHALPL

SEQ ID NO: 183126 - protein, 268 aa, Zea Mays
MKHQPPRRWGVVAAVVALVLLACLQIQYHHLKVDLGKAGFASATQENNAIRSRNRIRWGPDRNGAHSLPRGIVHRHSDMSLRPLWEDDTASTHKNKNSDYSALLAMAVGISQIKNIDTMARKFLKENYAVMLFHYDGNVDGWRHLEWSDKAIHILAHNQTKWWFAKRFLHPDVMAIYDFIFLWDEDLGVENFNPRRYLDIMVSEGLEITQPALDPDLSTDIHHRITIRNKMAKVHRRIYDNRPSMNCSDESKGPPCTGMILFMDGVLT

SEQ ID NO: 183127 - protein, 208 aa, Zea Mays
MKHQPPRRWGVVAAVVALVLLACLQIQYHHLKVDLGKAGFASATQENNAIRSRNRIRWGPDRNGAHSLPRGIVHRHSDMSLRPLWEDDTASTHKNKNSDYSALLAMAVGISQIKNIDTMARKFLKENYAVMLFHYDGNVDGWRHLEWSDKAIHILAHNQTKWWFAKRFLHPDVMAIYDFIFLWDEDLGVENFNPRRMGICAASLSLFS

SEQ ID NO: 183128 - protein, 278 aa, Zea Mays
MKHQPPRRWGVVAAVVALVLLACLQIQYHHLKVDLGKAGFASATQENNAIRSRNRIRWGPDRNGAHSLPRGIVHRHSDMSLRPLWEDDTASTHKNKNSDYSALLAMAVGISQIKNIDTMARKFLKENYAVMLFHYDGNVDGWRHLEWSDKAIHILAHNQTKWWFAKRFLHPDVMAIYDFIFLWDEDLGVENFNPRRYLDIMVSEGLEITQPALDPDLSTDIHHRITIRNKMAKVHRRIYDNRPSMNCSDESKGPPCTGGHGTSFFSHCLEMCMASNSE

SEQ ID NO: 183129 - protein, 325 aa, Zea Mays
MQPKMGKMDIDYQVLHDAFFKYQTKPKLSSHGDLYYEGKEFEVKLREMKPGMLSRELKDALGMPDGAPPPWLINMQRYGPPPSYPQLKIPGLNAPIPPGASFGYRPGEWGKPPVDEHGRPLYGDVFGVLQQDEPNYDDEPVDRSKHWGDLEEEEEEEEEEEEEEEPMEDEEMEDGIQSVDTISSTPTGVETPDVIDLRKLQRKETDKQAERPLYQVLEQKEERIAPGTLYGSSHTYVLGTQDKSSAPKRVDLLKNQKSDKVDVTIQPEELEAMDDVLAAKYEEAREEEKLRNQKEDFSDMVAENAHKRKRKQEKEGKSKKKEFKF

SEQ ID NO: 183130 - protein, 422 aa, Zea Mays
MKIADLKQICNRPDVVEVWDATAADPKLLVYLKAYRNTVPVPRHWSQKRKFLQGKRGIEKQPFQLPDFIAATGIEKIRQAYIEKEDSKKLKQKQRERMQPKMGKMDIDYQVLHDAFFKYQTKPKLSSHGDLYYEGKEFEVKLREMKPGMLSRELKDALGMPDGAPPPWLINMQRYGPPPSYPQLKIPGLNAPIPPGASFGYRPGEWGKPPVDEHGRPLYGDVFGVLQQDEPNYDDEPVDRSKHWGDLEEEEEEEEEEEEEEEPMEDEEMEDGIQSVDTISSTPTGVETPDVIDLRKLQRKETDKQAERPLYQVLEQKEERIAPGTLYGSSHTYVLGTQDKSSAPKRVDLLKNQKSDKVDVTIQPEELEAMDDVLAAKYEEAREEEKLRNQKEDFSDMVAENAHKRKRKQEKEGKSKKKEFKF

SEQ ID NO: 183131 - protein, 175 aa, Zea Mays
MFCGSVFFKQADRIWKTWTPSKCRFFLWLMAHNKCWTANRLAKRGLTQSLFCPLCDQHDETINHLLVGCSFACLFWFELFRPFGLQGFIPGQDIEDFNVWWCSNSARLDGLSKKGFDSLVALGAWMLWKHRNGVVFNGSSPSVVVAVRLAREEALLWSLAGAKGVSFLQAQSHMG

SEQ ID NO: 183132 - protein, 371 aa, Zea Mays
MVCEKNETDLDINIPAVLLPKDAGSALHTLLTNGNTVSVQLYSPDRPVVDTAEVFLWLMAVGTVLGASYWSAWSAREAVIEQEKLLKDGHEDLLNVEARGSSGMVDINVASAIMFVVVASCFLIMLYKLMSYWFVELLVVIFCIGGVEGLQTCLVALLSRWFKPAAESFVKVPFLGAVSHLTLAVCPFCVAFAVVWAVFRQLPFAWIGQDILGIALIVTVIQIVRVPNLKVGSVLLGCAFLYDIFWVFISKRWFHESVMIVVARGDKTDEDGVPMLLKIPRMFDPWGGYSIIGFGDILLPGLLVAFSLRYDFSAKKGLRSGYFLWAMVAYGSGTLIALGWKRGELQNLWARGEPERVCTHMHMPLLPTTPN

SEQ ID NO: 183133 - protein, 74 aa, Zea Mays
MVKPSVLPGVKPHVLVGPEVAWLSRIIYGGHREQRGAQAPLFGLCRPLAFVAWGSSAACHVAPYQRSVHSSLFR

SEQ ID NO: 183134 - protein, 110 aa, Zea Mays
MDTESCVRRGEPAIKNLATQMEMKPNRKPLGRNPLSDTPYRNPDMVLNGQGPSRHPLGGAPCHDLDAVLNGQGSSRHPLGGMLCHDLDAVSSEQGSSRRFLSGALHRHRV

SEQ ID NO: 183135 - protein, 433 aa, Zea Mays
MMVMQIVANVCICGPHLEPKISRSSLYTVGKITPIQRREVRASDYGSRASFWMNFPKNGSRLTPSHHADNFKWKDYCPMVFRNLREMFKIDAADYMVSICGSDALRELSSPGKSGSVFFLSQDDRFMIKTLRKSEVQVLLRMLPEYYHHVRTYENTLITKFFGLHRVKPSSSQKFRFVVMGNMFCTELRIHRRFDLKGSSLGRSTDKVKIDENTTLKDLDLNYSFYLEPSWRQTLLAQIETDSKFLKQHAIMDYSLLLGVHFRAPQSLRTQASFHQAILPDRLAVLSEEGALEEDVLNSPEGLVLVQRASDQNDVVIGSHIRGARLRSSSASFEEVDLLLPGTARLQIQLGVNMPARAKQTVEDDDSEDNGQVYDVVLYLGIIDILQEYSIRKKIEHAYKCIQYNSLSISVVEPSLYSERFLKFIQTIFPENS

SEQ ID NO: 183136 - protein, 656 aa, Zea Mays
MQGHGTYTWANGNTYVGAMKDGVMSGKGILTWNNGDSFEGNWLDGAMHGYGIYTWKDSGYYVGTWTRGVKDGKGTFYPKCRGIPVTDIDDLRNRGVLPGAESQTHGSRILHSASSDMADMVASRNQDSVGISSVRSLNFEKTRSTNVLLERRWSLGVAIEKFLGRETNESSAIERCENKADSNLPILEREYMQGVLISEVVVDASFSNPLKRVSRRQKKIVKDIKKPGQTIIKGHRSYDLMLSLQLGIRYTVGKITPIQRREVRASDYGSRASFWMNFPKNGSRLTPSHHADNFKWKDYCPMVFRNLREMFKIDAADYMVSICGSDALRELSSPGKSGSVFFLSQDDRFMIKTLRKSEVQVLLRMLPEYYHHVRTYENTLITKFFGLHRVKPSSSQKFRFVVMGNMFCTELRIHRRFDLKGSSLGRSTDKVKIDENTTLKDLDLNYSFYLEPSWRQTLLAQIETDSKFLKQHAIMDYSLLLGVHFRAPQSLRTQASFHQAILPDRLAVLSEEGALEEDVLNSPEGLVLVQRASDQNDVVIGSHIRGARLRSSSASFEEVDLLLPGTARLQIQLGVNMPARAKQTVEDDDSEDNGQVYDVVLYLGIIDILQEYSIRKKIEHAYKCIQYNSLSISVVEPSLYSERFLKFIQTIFPENS

SEQ ID NO: 183137 - protein, 490 aa, Zea Mays
MGSKSVDEVLDAAAGVHCSALRLDGPNVQFSASSEEEPTTSGLENGHQEPFVIGVAGGASSGKSTVCKMIIDQLRDQRVVAVTQESFYYGLTDEELVHVHDYNFDHPDAFHTELLLSCMQNLKHGKAVDIPNYNFKTYKSVPNARKVNPSDVIILEGILVFHDSRLRDLMNMKIFVDTDADVRLTRRIRRDTIDKGRDIKAVLDQYSKFVKPAFEDFILPTKKYADIIIPRGGDNDVAIDLIVQHIRTKLGQHDLCKIHPNLYVIQTTYQIRGMHTIIRDAATATHDFIFYADRLIRLVVEHGLGHLPFQEKQVITPTGSVYTGVEFSKRLCGVSVIRSGESMENALRACCKGIKIGKILIHREGDNGQQLIYQNLPKDIANRHVLLLDPILGTGNSAVQAISLLLKKGVQEANIIFLNLISAPQGVHVVSKRFPRVKIVTSEIEFGLNDDFRVVPGMGEFGDRYFGTDDYQSSTPFFCDDKNRVRYLLA

SEQ ID NO: 183138 - protein, 406 aa, Zea Mays
MGSKSVDEVLDAAAGVHCSALRLDGPNVQFSASSEEEPTTSGLENGHQEPFVIGVAGGASSGKSTVCKMIIDQLRDQRVVAVTQESFYYGLTDEELVHVHDYNFDHPDAFHTELLLSCMQNLKHGKAVDIPNYNFKTYKSVPNARKVNPSDVIILEGILVFHDSRLRDLMNMKIFVDTDADVRLTRRIRRDTIDKGRDIKAVLDQYSKFVKPAFEDFILPTKKYADIIIPRGGDNDVAIDLIVQHIRTKLGQHDLCKIHPNLYVIQTTYQIRGMHTIIRDAATATHDFIFYADRLIRLVVEHGLGHLPFQEKQVITPTGSVYTGVEFSKRLCGVSVIRSGESMENALRACCKGIKIGKILIHREGDNGQQLIYQNLPKDIANRKFSSSGHLPSIEEGCTRSKYYIP

SEQ ID NO: 183139 - protein, 495 aa, Zea Mays
MGSKSVDEVLDAAAGVHCSALRLDGPNVQFSASSEEEPTTSGLENGHQEPFVIGVAGGASSGKSTVCKMIIDQLRDQRVVAVTQESFYYGLTDEELVHVHDYNFDHPDAFHTELLLSCMQNLKHGKAVDIPNYNFKTYKSVPNARKVNPSDVIILEGILVFHDSRLRDLMNMKIFVDTDADVRLTRRIRRDTIDKGRDIKAVLDQYSKFVKPAFEDFILPTKKYADIIIPRGGDNDVAIDLIVQHIRTKLGQHDLCKIHPNLYVIQTTYQIRGMHTIIRDAATATHDFIFYADRLIRLVVEHGLGHLPFQEKQVITPTGSVYTGVEFSKRLCGVSVIRSGESMENALRACCKGIKIGKILIHREGDNGQQLIYQNLPKDIANRHVLLLDPILGTGNSAVQAISLLLKKGVQEANIIFLNLISAPQGVHVVSKRFPRVKIVTSEIEFGLNDDFRVVPGMGEFGDRYFGTDDYQSSTPFFCDDKNRVSHGCGVFSNF

SEQ ID NO: 183140 - protein, 542 aa, Zea Mays
MGSTRTSHPSFPVLLLFLLATAAAAGSNKAEEVDDLQYLIDNSEDIPPNDPDGWPEGGGGGDYDDDLLFQDQDQDLPDYEPQIDETHVVVLTAANFSSFLAATRHVMVEFYAPWCGHCRELAPEYAAAAAHLAVHHNQTDLALAKADATEETDLAQRYDVQGFPTIILFIDGVPKDYNGARTKDAIVDWINKKLGPAVQDVTSVHEAERILTGDDKAVIAFLDTLTGAHSDELAAASRLEDSINFYQTSIPDVAKLFHIDPAAKRPSIVLLKKEEEKLTFYDGKFKASAIADFVSANKLPLVTTLTQETSPSIFGNAIKKQILLFAVASESSKFLSIFKEAAKPFKGKLLFVFVERDNDEVGEPVANYFGLTGQETTVLAYTGNEDARKFFLDGEVSLEAIKDFAEGFLEDKLTPFYKSEPVPESNDGDVKIVVGKSLDVIVLDESKDVLLEIYAPWCGHCQSLEPTYNKLAKHLSGVDSLVIAKMDGTTNEHPRAKVTFEGERTVVDMYRFIKKHASIPFKLKRQESRRESIQTDGVKDEL

SEQ ID NO: 183141 - protein, 734 aa, Zea Mays
MAVTMTLISLRTFSTLIPPTPTRQYRTRSRRATPTKSSPPPSRRTRSTSMERVNPKLVPTNLDIGITVMFPIFCQCPAAADNATALITTKLQQYTSLDDHCHERGILHQDIKGSNLLIDYPDMLGDFGLNNYGAGHRQPLTSRVVTLWYRTPVLLLNSTSYGVGFDLWSAGCLNEIFFGKPLMPGSGEMYQLLKIFKLCGSPPDMVELQQHINNGHAVLGAHRVFEELSSHVIATCNNGVGSTMQDLAHAIGNTEVWPIPWPSFSFSPIGLAPLLALESIAVVGGRVEKREISKITDATIMLLEEMKAHGIKLKGETYHCLLNALATTRQTDQAYVVFSGTSVAGLVHRDSVQFRPIPWFFFRLCSEVGYRSYNWTERISEPTEQLMMVLSSLAWSGTQTVTTLKLQDQIQQQDIMVLIDSGSSHTFISDKLRPMLSGVEPLVNPITVQLAIRQVIPCHYHLPLAKWSMSGCHFSADLKFLLIPSFGQVITCNYQVPSAEWTMPVRSFSVDLTFLLLPLFDLVVGMDRLQRYSPMPVNWSNKWMIIPYQGATRCLQGVHPSVPTGAIVELWLLSATSQQNRFPDSKMPTINTQVQDIPSQFLDIFEDPVGLPPSRPGDHNIPLLLGAHMFTVCLYQYTPALKDHDTQAQELLTQLAIVSAYPNSPFTMQLVHGPSDLVRDGCFACNLGGRRSAEESLPISDRLGTSGVRRRGECQHQPFDRAGLAGCGTGAVER

SEQ ID NO: 183142 - protein, 837 aa, Zea Mays
MAVTMTLISLRTFSTLIPPTPTRQYRTRSRRATPTKSSPPPSRRTRSTSMERVNPKLVPTNLDIGITVMFPIFCQCPAAADNATALITTKLQQYTSLDDVSADALLRLTRPMEWERTTKPAMAHQPLSTIWLGTTPKGASTSQRQLSSGTRMPACRGGASKNGAHKLFDEMPSSNWRSPGRFLDVNICLIKCYMQQLFVGLQHCHERGILHQDIKGSNLLIDYPDMLGDFGLNNYGAGHRQPLTSRVVTLWYRTPVLLLNSTSYGVGFDLWSAGCLNEIFFGKPLMPGSGEMYQLLKIFKLCGSPPDMVELQQHINNGHAVLGAHRVFEELSSHVIATCNNGVGSTMQDLAHAIGNTEVWPIPWPSFSFSPIGLAPLLALESIAVVGGRVEKREISKITDATIMLLEEMKAHGIKLKGETYHCLLNALATTRQTDQAYVVFSGTSVAGLVHRDSVQFRPIPWFFFRLCSEVGYRSYNWTERISEPTEQLMMVLSSLAWSGTQTVTTLKLQDQIQQQDIMVLIDSGSSHTFISDKLRPMLSGVEPLVNPITVQLAIRQVIPCHYHLPLAKWSMSGCHFSADLKFLLIPSFGQVITCNYQVPSAEWTMPVRSFSVDLTFLLLPLFDLVVGMDRLQRYSPMPVNWSNKWMIIPYQGATRCLQGVHPSVPTGAIVELWLLSATSQQNRFPDSKMPTINTQVQDIPSQFLDIFEDPVGLPPSRPGDHNIPLLLGAHMFTVCLYQYTPALKDHDTQAQELLTQLAIVSAYPNSPFTMQLVHGPSDLVRDGCFACNLGGRRSAEESLPISDRLGTSGVRRRGECQHQPFDRAGLAGCGTGAVER

SEQ ID NO: 183143 - protein, 222 aa, Zea Mays
MKFLAPVCPPPDKAGERERERERERERERERERERERERERERENLSAGAAMAKPVSIQVWNPSGKYRVVSTKSMPGTRWIRLLTDNDCRLEICTEHKTILSVDDILALIGDRCDGVIGQLTEDWGDVLFSALKRAGGTVFSNMAVGYNNVDVEAANRNGIAIGNTPGVLTETTAELAASLSLAAARRIVEADQFMRAGLYDGWLPHLSVPLLPHILLQMQQ

SEQ ID NO: 183144 - protein, 366 aa, Zea Mays
MRSAWRTSGPSSDCCLPFPAMAKPVSIQVWNPSGKYRVVSTKSMPGTRWIRLLTDNDCRLEICTEHKTILSVDDILALIGDRCDGVIGQLTEDWGDVLFSALKRAGGTVFSNMAVGYNNVDVEAANRNGIAIGNTPGVLTETTAELAASLSLAAARRIVEADQFMRAGLYDGWLPHLFVGNLLKGQTVGVIGAGRIGSAYARMMIEGFKMNLIYYDLYQATRLENFVTAYGQFLKANGEEPVTWKRAATMEDVLREADVISLHPVLDKTTYHLINPERLAIMKKEAVLVNASRGPVIDEAALVEHLKANPMFRVGLDVFEDEPYMKPGLADMKNAVVVPHIASASKWTREGMATLSALNVLVCKHD

SEQ ID NO: 183145 - protein, 1793 aa, Zea Mays
MEPSPSSRRRSRAAAADKGKDPDPASSDHPSPPAPDDDADVTFPQPFTSASTALQGLLRRLGAGLDDLLPSSSSAPSSATSGHLKRILAGLQAHGDESRQLQSLMQLCEMLSIGTEDSLAAFPVDAFVPILVGMLGREDEPATAGASPDVMLLAARALSNLVDVLPSSCSAVVHYGAIQCFCARLLTIEYMDLAEQSLQALKKISLEHPTACLRAGALMAVLSYLDFFSTGVQRVALSTAANICRKLPSDASEFVMEAVPLLTNLLNHHDSKVLEHASVCLTRIAEAFAYYPDKLDELCNHGLVAQAASLIAVGNSSGQTSLSTSTYTGLIRLLSICASGSLLAVKTLLLLGISGTLKDILSGSALISGTSVSPAVTRPADQMFEIVSLADDLLPHIPARIIKLPTYYHTYKGSSTKKSASIKQEGGGSTGNERSGRERLLREQPELLQQFGMDLLPTMTQVYGSSVNAPIRHKCLSIIGKLMYYSSAETIQSLLGTTNISSFLAGILAWKDPQVLIPALQIAEIMMEKLPETFSKLFVREGVVHAVESLICSESSNKMPSQVPPQDKDKDSAMPSRSRRQRRRAGAVAAENSSLDESNSSNLGVMCSTATASEAPNTSLRFTVSDHAKSFKDKYFPADTDSSDIGFTDDLLKLRALCAKLNTVSENVKTKAKGKSKAISTNFLDISIDVEEQLDKIISEMLSELSKVNGVSTFEFIRSGVVIALLDYLSCGTFGKEKVSEGNLSQLRQQALRRYKTFISVALSIDHGRDETPMALLVQKLQSALSSLERFPVVLSQSSRIGIGGSRLTSGLSALAQPFKLRLSRAQGEKSLRDYSSNIVLIDPFASLASVEEFLWPRVQRSEVASKPIIPSGNNSESGVPGTTAGASLTAAMAQSGRRPTTRSKSSAAGGLTSKKDSHDESTSTAKGKGKAIVKPNSDESKGPNTRNAAHQKSASEKDLEMKQAHGHSSSEDEELDTSPVEIDDALMIDDDDISDDDDDDDDDHEVLQEGSLPICSQDGVHDVKLGDADESNIGSATFSHAQPSSGSGARNTSSRGPDSTEFRSMGTFGSRGAMSFVAATMAGLASVGGRSVRGVRDRRGLSLGGSMNDHNKLIFTAGGKQLNKHLTVYQAIQRQLMLDEDDEERFNGSDIPNDGNRFWGDVFTITYQKADNQVEKGCQGTSTSLNIKSDSYRSISEAQGVSLLDSILQGELPCDLERTNSTYNILALLRILEGLNQLSPRLRVQGASDDFAEGKINTLDELYRTGAKVPSEVFVNSKLTPKLARQMQDVLALCSGSLPSWCYQMTKACPFLFPFETRRQYFYSTAFGLSRALNRLQQQQSDNHSSGGEREVRFGRLQRQKVRVSRNRILDSAAKVMEMFSSQRAVLEVEYFGEVGTGLGPTLEFYTLLSHELQCAQLGLWRATSSYDSGLHTDMKDVIRLDPEDGSSGKELNTDLPGDGMYLIQAPLGLFPRPWPPKVDTSEGSRFFKVLEYFRLIGQVIAKVLQDGRLLDLPLSTAFYKLILGQELDLFDIVSFDSEFGKTLQELQVLVERKQFLESTSGKNQLQVADLCFHGASIEDLCLDFTLPGYPDYVLKEGEGGTIVNIYNLEEYITLVVDATVKSGIKRQVEAFRSGFNQVFDMSSLHIFSPQELDYLICGRQEIWESESLVDNIKFDHGYTAKSPAIVNLLEILSEFTPEQQHAFCQFVTGAPRLPHGGLAALSPKLTIVRKHPSSAVNTSNSTGAVESADDDLPSVMTCANYLKLPPYSTKEIMRKKLLYAILEGRGSFDLS

SEQ ID NO: 183146 - protein, 482 aa, Zea Mays
MKGPPRFHSATVATDDDSHSILLRCRIPPAGKNPLLLLLSAAAAMAAAVARSRAAAAWVRLLSLRPHSLAGSTALPRHGHHLGSRITPPRRHLAFSASSGDARPHQKFQSEWVVHELLAEVERERQRERQDRRAKDGKDQEEEPEEDEEDYMGVKPLIEKLERRKTKDMAAGEGFWEPTDSDSDEDDERYTPDAIKQRVDEFERKCKRHEEFLQSFAEADTLDEAHKWMTKINNFEERHLKLPLEYRVIGDMMNRLKDATGKERFVLLQKLNRAVRIMEIKEAYDPSNPANFGIIQHQQVGSPEDVVLNAGFDKEKQMIQGAELEDVDEEFNDVKERDDILIDKLDAIEKKIEGKLELLDHTFGKKGRALEEEIKDLVEERNSLSEKSRRPMYRKGFDVKVIDVNRTCKVTKGGQIAKFTALLATGNYNGVVGFAKAKGPTAKIAIQRAYEKCFQNLHYMERYEDHTIAHAIQAKYEKTKDC

SEQ ID NO: 183147 - protein, 59 aa, Zea Mays
MFAITIIVSLYSCSLSVCSLSDLIICFSLFCCCFHNRIFSVSVSRHDLVLSLCKLARLA

SEQ ID NO: 183148 - protein, 65 aa, Zea Mays
MVGLFASDFIVFFLQEFGDQGEDSIILSPWLKEISTPDRPAALRFLGEKYNNLIERYKKQVVKCS

SEQ ID NO: 183149 - protein, 499 aa, Zea Mays
MNFKLAVDAGGGSGATEGTDDGGGAAGSGMMLHVGSGGGGGDEAATESRLRRWTGDEETSIKEPTWRPLDIDYLQSSSSSKRTGKEKVATPAAPANYFKKGDAAAAGGGNYKLFSELEAIYKPGSGGAQTGSGSCLTGDDNAILEPAVADLPAVGPQQLNTSETSAGEEAAAVVQPQQQPQASADAARRKRKRRRQEQLSASASFFERLVQRLMEHQESLHRGFLEAMERRERERAARDEAWRRQEADKFAREAGARAQDRASAAAREAAIIAYLEKISGESITLPAPPAAAASGDDATAAGKELVPYDGGDATAAEGGGGSLHLSSTSRWPKHEVEALIRVRTGLEGRFQELGLKGPLWEEVSARMAAAGYGRNAKRCKEKWENINKYFRKAKESGKKRPAHAKTCPYFDELDRLYSRSADGGGGEARQLGSSELLDAVIKYPDVRYGPPVFGGGNANNEGGEDDDSDGEEEEEEEEDGIGKGRAGDDQDDEVDNDDE

SEQ ID NO: 183150 - protein, 267 aa, Zea Mays
MSLLLTNLYVLGVDVEVLGEKEPEPGRVEVGAGSDDAAGREARKLPGDVGEHVHGVGHDEQQRVVGLLRQRRHDLAEQRHVPLEQVEPRLALDLPRPGRHDDQVRAPGHGHVGAGHEARARQERRRVLQVQHLPAELVRDRVHQRDLVGQVAREDGLRDGHPHVARADDRHLGQPPPVVLRRRRRRVAGHRAEEARRRVAGVEAQLGERSGLLHLLLPTGGAAVAGGMGWDYVCDMIWLGQISADRISLWRKEGMAMGNGYSTRGRG

SEQ ID NO: 183151 - protein, 312 aa, Zea Mays
MLGCGIGTLSQKRPLIKYIFAAFIVSDGSSVIEFKRRIIFLREIDKIKKDKITKLVVLPLYPQYSISTSGSSIRVLQDIVKEDSYFSGLPISIIESWYQRDGYVKSMSDLIEKELSAFSNPEEVMIFFSAHGVPLTYVEDAGDPYRDQMEDCIALIMGELRSRGILNSHTLAYQSRVGPVQWLKPYTDEVLVELGQKGVKSLLAVPVSFVSEHIETLEEIDMEYKELALESGIKNWGRVPALGCTSTFISDLADAVVEALPSASALATRKPDDIDSSMDLTHYLTKMLFGSILAFVLLLSPRLVSAFRSTML

SEQ ID NO: 183152 - protein, 50 aa, Zea Mays
MVPLIRHSSISLMVLRRSSARLVTHVGYYICSIVIATTIAALPELNSGFF

SEQ ID NO: 183153 - protein, 66 aa, Zea Mays
MMRLWYSPITRMVPLIRHSSISLMVLRRSSARRAAKLVTHVGYYLCTIIISKTIVVLAELNSKGFV

SEQ ID NO: 183154 - protein, 337 aa, Zea Mays
MALVLDAKGDYDGALEHLVLASMTMVANGRDIEVATIDVAIGNTYLALARFDEAVFSYQKALTVLKSARGDDHPTVASVYVRLADLYHRTGRLRESKSYCENALRVYAKPAPGAAPDEIAGGLMEIAAIYEALGDLDEALKLLQRALRLLEGSPGQWSTVAGIEAQMGVLYYMVGRYADSRNSFESAVAKLRAIGERKSAFFGVLLNQMGLACVQLFKIDEAAQLFEEARAVLEQECGASHPDTLGVYSNLAAIYDAMGRVEDAIEILEHVLKVREEKLGTANPDVDDEKKRLAELLKEAGRSRNRKQKSLQNLFGTNSQRAKKEAGRRWSNFGFRS

SEQ ID NO: 183155 - protein, 236 aa, Zea Mays
MPGLAASDNSPPAPAPPPRRLSSPLPRRAPSSPSPSASSRAKPRKPSPSPAAFPTDADDSLVLDAKGDYDGALEHLVLASMTMVANGRDIEVATIDVAIGNTYLALARFDEAVFSYQKALTVLKSARGDDHPTVASVYVRLADLYHRTGRLRESKSYCENALRVYAKPAPGAAPDEIAGGLMEIAAIYEALGDLDEALKLLQRALRLLEGSPGQWSTVAGIEAQMGVLYYMVGRWG

SEQ ID NO: 183156 - protein, 65 aa, Zea Mays
MLQSSYAGILIQYSLDKYNKLDFNSTCLIFINEVSHPDSTNFQGGQKQMRCSPTEYSRVPTSDRS

SEQ ID NO: 183157 - protein, 1696 aa, Zea Mays
MSNTSGGSLMDGAAGGNLASRNDSQGVISSSHSGSDHVTKVPSVRRRTHPPMRLGSEVPEPSPKMRKVVNEEDTPCGASNTGKISASPSAVSRDPNGTSTSEDHAGGHSSEYATVGNARGSPIKRRCMQTSHYLGLFTPLKGKHTDEVAKSKQSTVSTKTKKFKEIQFQKLQRLPDGCHPDFDNDHLCSVNNHDLLPEMSTPSADLHLLTETGVENMRTPKSLHAELKRELSKLNTVLKLPDNVLFLANQFLEYLLNNHLVVREPRSILHAFNIALCWRAASFLKYTELDHRESLALASDGLNYECNEELAELFYKKIGILKEKVAHKPGGIINGRLSPHESSSANLRSDHSFRKQAMDLHGNFTKGTEDSPSATDQMVMVSDEQELLSAPDAGREHLLSEESSSSAAMKRIDLFNSIFFSRERDIIEKQQLEILNLRTLRDNQVKKLKEVCHAVVQHIRISNIDEEMEIDQIKLVIQWFTMFMHSFLAHIRLQFFKLDALHSTTLAEEELMKEKLKQEVVSGELDQFPDHCVTLPDSNSVIEEFIHFKKQNDDSHVDQKMALDGDQLMDDRPMEITILRSLFSPEACSTLAVRNEPTEAHLRSGGRASSEYVDLPDNNNHCISVGIDYQGGCSASSIPTSHGSINQGSATSLVVINAENDSTVAADPDHLESHILASVTTLQHPTSEEPSDTLHAMAVQDLQTEMQTTCPTLGAQHQKVCPDDSSKMNHEPDTTTGMLQEGTTSDHLGDSSKVNVEPDITTGMSQEGKTSDHLDDSSTGVKEKNIDTVIADPLNSENQSYIAMPEAWVAEIQSDQSSMPAQHSTSLPTQRKLPVLGHPPEEANPSSNLDTEAAQKPDIQPSSSTLDADSSETRHQPETTTVLSQVGSKNHDVGTFHAQKAQSDSPILAAPQSTAMLSLPLEAGTPANVSSTSSLQSNGVSSRHTPAVSESSGMLGTQPEQDLHHDLGPSMSLLGVPLQRMLPDDRSQTVCQPDRGTDLSGKGETEYLACTTSDLSTLPLSGEAETENGQASMPAQEITSPHAQHSLALATSQHPVGDLQPPTLILSEETERAGLLCTSASQDLQLSMITQEDVPLERTDLSGMPVTQSTTVLQSVEPSCDPHAEEAGTWGMLSAPDLQSRMQSSSQLQDQIAEAEGAGIFGTIPAQNLQPETWSSTSAQHISPLRTHPDERIQIGLQPNTTPVPELLGQLSTLTPAGLLSSNEPLMNELEKLKYCNAVLCKNHEQKKSQLQTECNQEIEKVKEKYELLRQEEDSVYHRLTTDLNRIYTKVLVNQSLAEFFKASLVQERSARPTIWQAPQSSQHAPCGTTAAQATLLPVASSLATRPTVLMSYHTTGPHLPPSQVARPPASGAIQLQPVLPGNHSRAAPSPVGSMHPRHGIYRAVGAQSRGPAPHLQQLRMPAPFAMVHRDGQHPPSIMNPGVIPSRQSVHGNFESSASGNALAGISFASMAPSSGHQAMSSTSDSHPVFPASSLLPGSGPGSMTNFVRSSTRIPVVMASEQAPRLNPYVHHIGGGPLNAAPAGIQQARAHIGRTPQAASDQSQDVLHRLLLQLPEVMAPSLAQPTASSSHPAPMAARQQAGLLNPAPDNVACPLNAVAGVGRPGARIGSQSYQVSASLLEWEATLRVGLIRGHQGTYPLGQGCSDLAGGPPGTSAAQGCGSGASREVVCLSDDEE

SEQ ID NO: 183158 - protein, 1000 aa, Zea Mays
MAVQDLQTEMQTTCPTLGAQHQKVCPDDSSKMNHEPDTTTGMLQEGTTSDHLGDSSKVNVEPDITTGMSQEGKTSDHLDDSSTGVKEKNIDTVIADPLNSENQSYIAMPEAWVAEIQSDQSSMPAQHSTSLPTQRKLPVLGHPPEEANPSSNLDTEAAQKPDIQPSSSTLDADSSETRHQPETTTVLSQVGSKNHDVGTFHAQKAQSDSPILAAPQSTAMLSLPLEAGTPANVSSTSSLQSNGVSSRHTPAVSESSGMLGTQPEQDLHHDLGPSMSLLGVPLQRMLPDDRSQTVCQPDRGTDLSGKGETEYLACTTSDLSTLPLSGEAETENGQASMPAQEITSPHAQHSLALATSQHPVGDLQPPTLILSEETERAGLLCTSASQDLQLSMITQEDVPLERTDLSGMPVTQSTTVLQSVEPSCDPHAEEAGTWGMLSAPDLQSRMQSSSQLQDQIAEAEGAGIFGTIPAQNLQPETWSSTSAQHISPLRTHPDERIQIGLQPNTTPVPELLGQLSTLTPAGLLSSNEPLMNELEKLKYCNAVLCKNHEQKKSQLQTECNQEIEKVKEKYELLRQEEDSVYHRLTTDLNRIYTKVLVNQSLAEFFKASLVQERSARPTIWQAPQSSQHAPCGTTAAQATLLPVASSLATRPTVLMSYHTTGPHLPPSQVARPPASGAIQLQPVLPGNHSRAAPSPVGSMHPRHGIYRAVGAQSRGPAPHLQQLRMPAPFAMVHRDGQHPPSIMNPGVIPSRQSVHGNFESSASGNALAGISFASMAPSSGHQAMSSTSDSHPVFPASSLLPGSGPGSMTNFVRSSTRIPVVMASEQAPRLNPYVHHIGGGPLNAAPAGIQQARAHIGRTPQAASDQSQDVLHRLLLQLPEVMAPSLAQPTASSSHPAPMAARQQAGLLNPAPDNVACPLNAVAGVGRPGARIGSQSYQVSASLLEWEATLRVGLIRGHQGTYPLGQGCSDLAGGPPGTSAAQGCGSGASREVVCLSDDEE

SEQ ID NO: 183159 - protein, 1694 aa, Zea Mays
MSNTSGGSLMDGAAGGNLASRNDSQGVISSSHSGSDHVTKVPSVRRRTHPPMRLGSEVPEPSPKMRKVVNEEDTPCGASNTGKISASPSAVSRDPNGTSTSEDHAGGHSSEYATVGNARGSPIKRRCMQTSHYLGLFTPLKGKHTDEVAKSKQSTVSTKTKKFKEIQFQKLQRLPDGCHPDFDNDHLCSVNNHDLLPEMSTPSADLHLLTETGVENMRTPKSLHAELKRELSKLNTVLKLPDNVLFLANQFLEYLLNNHLVVREPRSILHAFNIALCWRAASFLKYTELDHRESLALASDGLNYECNEELAELFYKKIGILKEKVAHKPGGIINGRLSPHESSSANLRSDHSFRKQAMDLHGNFTKGTEDSPSATDQMVMVSDEQELLSAPDAGREHLLSEESSSSAAMKRIDLFNSIFFSRERDIIEKQQLEILNLRTLRDNQVKKLKEVCHAVVQHIRISNIDEEMEIDQIKLVIQWFTMFMHSFLAHIRLQFFKLDALHSTTLAEEELMKEKLKQEVVSGELDQFPDHCVTLPDSNSVIEEFIHFKKQNDDSHVDQKMALDGDQLMDDRPMEITILRSLFSPEACSTLAVRNEPTEAHLRSGGRASSEYVDLPDNNNHCISVGIDYQGGCSASSIPTSHGSINQEFSTGDDRNIEHAKGDIIANPSMVPGSATSLVVINAENDSTVAADPDHLESHILASVTTLQHPTSEEPSDTLHAMAVQDLQTEMQTTCPTLGAQHQKVCPDDSSKMNHEPDTTTGMLQEGTTSDHLGDSSKVNVEPDITTGMSQEGKTSDHLDDSSTGVKEKNIDTVIADPLNSENQSYIAMPEAWVAEIQSDQSSMPAQHSTSLPTQRKLPVLGHPPEEANPSSNLDTEAAQKPDIQPSSSTLDADSSETRHQPETTTVLSQVGSKNHDVGTFHAQKAQSDSPILAAPQSTAMLSLPLEAGTPANVSSTSSLQSNGVSSRHTPAVSESSGMLGTQPEQDLHHDLGPSMSLLGVPLQRMLPDDRSQTVCQPDRGTDLSGKGETEYLACTTSDLSTLPLSGEAETENGQASMPAQEITSPHAQHSLALATSQHPVGDLQPPTLILSEETERAGLLCTSASQDLQLSMITQEDVPLERTDLSGMPVTQSTTVLQSVEPSCDPHAEEAGTWGMLSAPDLQSRMQSSSQLQDQIAEAEGAGIFGTIPAQNLQPETWSSTSAQHISPLRTHPDERIQIGLQPNTTPVPELLGQLSTLTPAGLLSSNEPLMNELEKLKYCNAVLCKNHEQKKSQLQTECNQEIEKVKEKYELLRQEEDSVYHRLTTDLNRIYTKVLVNQSLAEFFKASLVQERSARPTIWQAPQSSQHAPCGTTAAQATLLPVASSLATRPTVLMSYHTTGPHLPPSQVARPPASGAIQLQPVLPGNHSRAAPSPVGSMHPRHGIYRAVGAQSRGPAPHLQQLRMPAPFAMVHRDGQHPPSIMNPGVIPSRQSVHGNFESSASGNALAASSLLPGSGPGSMTNFVRSSTRIPVVMASEQAPRLNPYVHHIGGGPLNAAPAGIQQARAHIGRTPQAASDQSQDVLHRLLLQLPEVMAPSLAQPTASSSHPAPMAARQQAGLLNPAPDNVACPLNAVAGVGRPGARIGSQSYQVSASLLEWEATLRVGLIRGHQGTYPLGQGCSDLAGGPPGTSAAQGCGSGASREVVCLSDDEE

SEQ ID NO: 183160 - protein, 97 aa, Zea Mays
MYFFRDFTRKAQLASFLITPPATREERRDDDADGGVADGRSCRGVPHPPPARRPREPRQRLPRLQAVEPPHRRPRLPPQVPQDPPRQAAAHGPGAGL

SEQ ID NO: 183161 - protein, 635 aa, Zea Mays
MDRARGSAFLLGVLLAGSLFAFSVAKEETKKLGTVIGIDLGTTYSCVGVYKNGHVEIIANDQGNRITPSWVAFTDSERLIGEAAKNQAAVNPERTIFDVKRLIGRKFADKEVQRDMKLVPYKIINKDGKPYIQVKIKDGENKVFSPEEISAMILGKMKDTAEAYLGKKINDAVVTVPAYFNDAQRQATKDAGVIAGLNVARIINEPTAAAIAYGLDKKGGEKNILVFDLGGGTFDVSILTIDNGVFEVLATNGDTHLGGEDFDQRIMEYFIKLIKKKYSKDISKDNRALGKLRREAERAKRALSNQHQVRVEIESLFDGTDFSEPLTRARFEELNNDLFRKTMGPVKKAMEDAGLEKSQIHEIVLVGGSTRIPKVQQLLRDYFDGKEPNKGVNPDEAVAFGAAVQGSILSGEGGDETKDILLLDVAPLTLGIETVGGVMTKLIPRNTVIPTKKSQVFTTYQDQQTTVSIQVFEGERSMTKDCRLLGKFDLNGIAPAPRGTPQIEVTFEVDANGILNVKAEDKGTGKSEKITITNEKGRLSQEEIDRMVREAEEFAEEDKKVKERIDARNQLETYVYNMKNTVGDKDKLADKLEAEEKEKVEEAVCNPIVSAVYQRSGGAPGGDADGGVDDDHDEL

SEQ ID NO: 183162 - protein, 74 aa, Zea Mays
MRRDKLNDRFLELSSIMNPGKEAKLDKANILSDAARMVAQLRGEAEKLKESNEKLRENIKDLKVTFKETHWTRF

SEQ ID NO: 183163 - protein, 233 aa, Zea Mays
MMDCAGGRDPVEDFLLGGAGAGDDGDLVAVFCDDGGLGIEGIHGDACGFEQSNLGKRDEPCSSGPTSKACREKMRRDKLNDRFLELSSIMNPGKEAKLDKANILSDAARMVAQLRGEAEKLKESNEKLRENIKDLKEEKNELREEKVRLKVEKDRLEQQVKAMSVAPTGYVPHLPHPASYHPAAFTPFAPPQQAPANKSAPIPAPFPGMAMWQWLPPTIVDTTQDPKLWPPNA

SEQ ID NO: 183164 - protein, 134 aa, Zea Mays
MLYTDFDLLTDFPEPTLDFLADIPEEKLLLPFPAGSPEECPFDTEVALPTRWQKVDDFFQDITELFQIDPLPVVQPAIETRDVSLCNRTQRRSTPFRLHARGVRDREQQPRYGKQVATASIAVAATTTNCFCER

SEQ ID NO: 183165 - protein, 473 aa, Zea Mays
MADEKLAKLREATAGLTQISENEKSGFLSLVGRYLSGDEEHIEWAKIHTPTDEVVVPYDTLESPPEGTEATKKLLDKLAVLKLNGGLGTTMGCTGPKSVIEVRNGFTFLDLIVIQIESLNKKYGSNVPLLLMNSFNTHDDTLKIVEKYTNSSIEIHTFNQSQYPRVVADEFLPWPSKGKTDKDGWYPPGHGDIFPSLMNSGKLDLLLSQGKEYVFIANSDNLGAIVDMKILNHLIHKQNEYCMEVTPKTLADVKGGTLISYEGRVQLLEIAQVPDAHVNEFKSIEKFKIFNTNNLWVNLKAIKRLVEADALKMEIIPNPKEVDGVKVLQLETAAGAAIRFFDHAIGINVPRSRFLPVKATSDLQLVQSDLYTLVDGFVTRNSARTNPSNPSIELGPEFKKVGSFLGRFKSIPSIVELDSLKVSGDVWFGSGIVLKGKVTITAKPGVKLEIPDGAVIGNKVLAQRDAKVNEQGE

SEQ ID NO: 183166 - protein, 155 aa, Zea Mays
MEIIPNPKEVDGVKVLQLETAAGAAIRFFDHAIGINVPRSRFLPVKATSDLQLVQSDLYTLVDGFVTRNSARTNPSNPSIELGPEFKKVGSFLGRFKSIPSIVELDSLKVSGDVWFGSGIVLKGKVTITAKPGVKLEIPDGAVIGNKDISGPEDL

SEQ ID NO: 183167 - protein, 277 aa, Zea Mays
MADEKLAKLREATAGLTQISENEKSGFLSLVGRYLSGDEEHIEWAKIHTPTDEVVVPYDTLESPPEGTEATKKLLDKLAVLKLNGGLGTTMGCTGPKSVIEVRNGFTFLDLIVIQIESLNKKYGSNVPLLLMNSFNTHDDTLKIVEKYTNSSIEIHTFNQSQYPRVVADEFLPWPSKGKTDKDGWYPPGHGDIFPSLMNSGKLDLLLSQGKEYVFIANSDNLGAIVDMKILNHLIHKQNEYCMEVTPKTLADVKGGTLISYEGRVQVGELEGHQTPC

SEQ ID NO: 183168 - protein, 127 aa, Zea Mays
MILSVSFGPSFCLEQTLGPRIGYLPLLIPVIRAHFSNALPPGVDTVWFEYKGLPLKWYVPIGVLFDLLCADPERPWNLIVHFRGYPSEILSPCEGEDSVKWSYMNSLKEHSLSLFRPPSSLLGTVRV

SEQ ID NO: 183169 - protein, 56 aa, Zea Mays
MQHLLKKKLQAASHSHREVRIGHTHKRTCRCTCLPPFLLRALKVDTVNYITEMTNL

SEQ ID NO: 183170 - protein, 70 aa, Zea Mays
MYYYYHARNLSIEVECVRVGWGYAHRGLTRDVFDNNSCSEVPTSNDERSIPPLHSPFRSGYSLLISIHMS

SEQ ID NO: 183171 - protein, 573 aa, Zea Mays
MAVDSPPPASPQRRQSEAGAGGRRTDRHGRRLEVYNEVLVRLRSSAAVSPAFEDALWAHFHRLPARYALDVNAERADDVVTHQRLLQEARDPERRPALSVRVVQVSRIIDTDVGDPYDPDMEAVASNRPEANETVHPPPAFGSSSNLEALALETSESDVRSTGDTDHSVHLISRPMHEITFATIDKPKLLSQLTCLLAELGLDIQEAHAFSTIDGYSLDVFVVTGWHLGSTEQLQGDLLQKFHKIELSVQTQAWPLSSSLSPSSEGQQGGESMSSASVEIPTDGVDVWELDLKLLKFGSKVASGSNGDLYRGTYCNQDVAIKVVRPERISADMYRDFAQEVYIMRKVRHKNVVQFIGACTRQPTLYIVTDFMPGGSVYDYLHKNNNAFKLPEILKVATDITKGMNYLHQNNIIHRDLKTANLLMDENKVVKVADFGVARVKDQSGVMTAETGTYRWMAPEVIEHKPYDHKADVFSFAIVLWELLTGKIPYEYLTPLQAAIGVVQKGIRPTIPKDTHPKLIELLQKCWHRDPAERPDFSEILEILQKLSKEVRTDTEGRHKTKSGFLSALKRSH

SEQ ID NO: 183172 - protein, 522 aa, Zea Mays
MSYTISGGGTAPAAWAWLHGDLELTIHEARGLPNMDLLSTLLRRLCLCPPLAGITPARRRSLSDDDDDSAHAHAHTHPHHHHLRGRLHRRPRRRHEPQPHGHLLLPTSDPYAAVVVAGPHETTVARTYVFRNSEAPRWEASFLLPLAHAATGLEFHVKDADPFGSDLIGVAWLPAAAVLASAAAPIESQWLDLARPDARGPPAPGGGSAIRVSAAFVPAAASRGRSGVGVPAYFPLRRGCDVRLYQDAHVAAGELEGVGVVPGFLPGRCWEDLCMAVLGAQRLVYVAGWSVHTTVRLTREAMSPEMAAKVAELEELGGEPVEHMSLGELLKYKSQEGVRVLLLVWDDRTSHNNFFVKMKGVMQTRDEETKKFFKHSSVICVLSPRYPSSKLGLVKQKPRPCRWWGRCTRTTRSACSSTRRRPSRPAGSRLSSAASTSAPAATTRPATGSSATSKPSSTATSTIRHSVATSMVPGSHGTTCTAGWTGRRRTTSSRTSSSGGGRRPSCGRCSAGRRRTGRTTRC

SEQ ID NO: 183173 - protein, 921 aa, Zea Mays
MSYTISGGGTAPAAWAWLHGDLELTIHEARGLPNMDLLSTLLRRLCLCPPLAGITPARRRSLSDDDDDSAHAHAHTHPHHHHLRGRLHRRPRRRHEPQPHGHLLLPTSDPYAAVVVAGPHETTVARTYVFRNSEAPRWEASFLLPLAHAATGLEFHVKDADPFGSDLIGVAWLPAAAVLASAAAPIESQWLDLARPDARGPPAPGGGSAIRVSAAFVPAAASRGRSGVGVPAYFPLRRGCDVRLYQDAHVAAGELEGVGVVPGFLPGRCWEDLCMAVLGAQRLVYVAGWSVHTTVRLTREAMSPEMAAKVAELEELGGEPVEHMSLGELLKYKSQEGVRVLLLVWDDRTSHNNFFVKMKGVMQTRDEETKKFFKHSSVICVLSPRYPSSKLGLVKQKVVGTLYTHHQKCVLVDTPASESTRRITAFLGGLDLCAGRYDTPSHRLFRDLQTVFHGDVYNPTFGGDVNGPRQPWHDLHCRLDGPAAYDILKNFEQRWRKATKLREMFGGKAAHRKDDALLKLERIPWILSPTKPKQQPPSAAADTGAADHDDDERDQPALHVLPDGDPERWHAQVFRSVDAGSVKRFPRPWERAEMARRHLVGDKNLAVERSIHAAYVAAIRSAERFVYVENQYFIGGSYAWPSYRNGGACNLVPMEIALKVASKVRAGEPFAAYVVLPMWPEGNPGSGPAQEILFWQNQTMEMMYSVVAAALEGKGGHPQEHLNFYCLGNREPAEDAGDGNKWAPADPLDDATTSSAAAHARRHRRFMVYVHSKGMIVDDEYVIIGSANINQRSLAGSRDTEIAVGAYQPDHTGACPRGKVHGYRMSLWEEHLGKEAVRRPEVLRPESPRCVKLVNRIARDNWRRYAADDDKLGPLQGHLLRYPVHVRADGRVEPLPGNELFPDVGGRVVGAPNNLPDYLTM

SEQ ID NO: 183174 - protein, 177 aa, Zea Mays
MSFSRIFFSGHVQDYVPTVFDNFSANVVVDGNTVNLGLWDTAGQEDYNRLRPLSYRGADVFLLAFSLISKASYENVSKKWIPELKHYAPGVPIILVGTKLDLRDDKQFFVDHPGAVPITTAQGEELRKQIGAPYYIECSSKTQLNVKGVFDAAIKVVLQPPKAKKKKKAQRGACSIL

SEQ ID NO: 183175 - protein, 165 aa, Zea Mays
MDYVPTVFDNFSANVVVDGNTVNLGLWDTAGQEDYNRLRPLSYRGADVFLLAFSLISKASYENVSKKWIPELKHYAPGVPIILVGTKLDLRDDKQFFVDHPGAVPITTAQGEELRKQIGAPYYIECSSKTQLNVKGVFDAAIKVVLQPPKAKKKKKAQRGACSIL

SEQ ID NO: 183176 - protein, 137 aa, Zea Mays
MSASRFIKCVTVGDGAVGKTCMLISYTSNTFPTDYVPTVFDNFSANVVVDGNTVNLGLWDTAGQEDYNRLRPLSYRGADVFLLAFSLISKASYENVSKKWIPELKHYAPGVPIILVGTKLEREGCLRCGDKGCAAAA

SEQ ID NO: 183177 - protein, 95 aa, Zea Mays
MGYLPQAMVNYLALLGWGDGTENEFFTIDDLVQKFTINRVNKSGAVFDATKLKWMNGQHLRSFPHDELIKAFEDRWTDTGILQESESGFAKLPSF

SEQ ID NO: 183178 - protein, 287 aa, Zea Mays
MRSNGQPVYNFCVTVDDATMQISHVIRAEEHLPNTLRQALIYKALGFAMPSFAHVSLILAPDRSKLSKRHGATSVGQYKNMGYLPQAMVNYLALLGWGDGTENEFFTIDDLVQKFTINRVNKSGAVFDATKLKWMNGQHLRSFPHDELIKAFEDRWTDTGILQESESGFAKEAAELLKDGIDLITDADAALTNLLSYPLHTTLSSEEAKPVVQDKISEVAWSLISAYDSGELGQALAEGRDGWQKWVKGFGKSIKRKVFIRMIKLLGTRALPVMDIDCWALNFDYID

SEQ ID NO: 183179 - protein, 198 aa, Zea Mays
MNGQHLRSFPHDELIKAFEDRWTDTGILQESESGFAKEAAELLKDGIDLITDADAALTNLLSYPLHTTLSSEEAKPVVQDKISEVAWSLISAYDSGELGQALAEGRDGWQKWVKGFGKSIKRKGKGLFMPLRVLLTGKLHGPDMGGSIALIHKAGVCCAVTPQSNFVTLDERFRMLKDVDWESLAKEQETPAVPAAAS

SEQ ID NO: 183180 - protein, 175 aa, Zea Mays
MRSNGQPVYNFCVTVDDATMQISHVIRAEEHLPNTLRQALIYKALGFAMPSFAHVSLILAPDRSKLSKRHGATSVGQYKNMGYLPQAMVNYLALLGWGDGTENEFFTIDDLVQKFTINRVNKSGAVFDATKLKWMNGQHLRSFPHDELIKAFEDRWTDTGILQESESGFAKLPSF

SEQ ID NO: 183181 - protein, 407 aa, Zea Mays
MLRQRQKKSGGGREMLVTIDNLKRLCIDHYFEEEIEGAMATGACTRLLHSDDLFDATLAFRLLREAGHDVSAKDDVLRRFIDGASGDFKLSLSNDVRGLLSLHDMSHLDVGGEAALLHRAKEFSSRHLASAVRYLDDPSLAEYVRQSLDHPYHLSLTQYKARHHLRYLQSLPSRDAAVERLAVAEFQLNKSLHQGEMREIKRWWMDLGLAEEIPVVRDQVMKWYMWSMAALQGSSFSRYRVEITKIISLVYVVDDIFDLVGTLEELSAFTEAVKMWDTVAADSLPSCMRSCYKALHTVTNEIAEIAQKEHGSNHVNRLRKAWAVLFDGFMVEARWLATDQVPTAEDYLRNGVITSGVPLTFMHIFSMLGYDDPSTEEEEEAIIDHMPSIISCPAKILRLWDDMGSAG

SEQ ID NO: 183182 - protein, 92 aa, Zea Mays
MKMHCTHHKRWDDEDVENEAQKPGKMNRCKRIRKNHGKIIWANHFRPEGDQSWLRSLPFVLGTIYLTDSWKLRTVVVATLSNTWQFAPVEWS

SEQ ID NO: 183183 - protein, 277 aa, Zea Mays
MSAHLRLLSAAHVSAPTPTSLHRLRGPPPSPPAARLRLLLRPPRLGGSQARFAGAVRCSGSASAPAVARVGEDSDAAAGIWEQVRDIVVFAGPALGLWICGPLMSLIDTMVIGQTSALQLAALGPGTVFCDYLSYIFMFLSVATSNMVATSLAKKDEELTQHQVSMLLFLALACGIGMFLFTKVFGTQVLTAFTGSGNYELISSANTYAQIRGFAWPAVLVGLVAQSASLGMKDSWGPLKALAAASVINGVGDIFLCSVCDYGIAGAAWATMVSQLS

SEQ ID NO: 183184 - protein, 251 aa, Zea Mays
MSAHLRLLSAAHVSAPTPTSLHRLRGPPPSPPAARLRLLLRPPRLGGSQARFAGAVRCSGSASAPAVARVGEDSDAAAGIWEQVRDIVVFAGPALGLWICGPLMSLIDTMVIGQTSALQLAALGPGTVFCDYLSYIFMFLSVATSNMVATSLAKKDEELTQHQVSMLLFLALACGIGMFLFTKVFGTQVLTAFTGSGNYELISSANTYAQIRGFAWPAVLVGLVAQSASVFVIPQSGHEGLLGSFEGIGSC

SEQ ID NO: 183185 - protein, 120 aa, Zea Mays
MSLLANSSTRHSPPTANRTHLTFCFLLPSLSNQYKHTRVQSFSQRSTETAMRNGNRRHGALYSRRVVVDAVDEPRDVAAAVGADDEAAGRRCRRQQRHHAVAVHLHPAGLQRRAVRGPRR

SEQ ID NO: 183186 - protein, 777 aa, Zea Mays
MATPPPRPGPAAASAAVSLLDHLEHANFAPPPPPPPPPSPTTVLTAWSRLRDPNSTSPADALAALETLHHHRRALRLSSAHASLLLPLLPLHPRLVATLLAAAPHLGPASVPASLPFAPRLLLLGARASAKDLPGRASFGEPASTAKNPAGSGEPADGQDDDPVVAVGRILEDVERGGQSIDDVDHLALAGVGYALASADEVQFRRIIVPLLRICGRTGNLSVGVRVLKLMEWLVMGFIESRKMRNAQVLFEMTSPEECEGENYCVLLPAVMLACGGLRALRVASARYRLDFDPRLKQAPERTIQFAAERAVLEGRPADDQHILVQCVALGLSRCGQVAFHESVLRCVCMGLLKELLPLPDFLRRSVQNAGGNSNEVIKAQVNKHLDSVLFKEAGPVTGVLCNQYSYANDKAKSFVETCVWEYAQEIYRHLRAAVLLHRGKQDGLITAIDKNAEASFLMVVVFAAEVAKHRLNAKSSEGFQPEVAARILVAFSCVEHLRRLRLPEYTEAVRSAVLANQENVAATALFIESIPSYTELTSEPDLLALDRPTTYNWYRDEVQTSRMLFYLRVVPTCVSLIPVHTMQDKLASIMFLYLQHPNEKVTSASHSVMVSFLSSGSDADQDDRAALKERLAFYYIKRSLEAYPGLTPFDGLASGVAALVRHLPAGSAAILFCIHSLAVKAKDLCETANVQNKSLWRSWEESTDPCKKTLDLLLRLIFLVDIQVRLYMVNFLPPHGLIYGSLELLVSAVLAFRVCFVGLQNISLGFLYNNAYTKVA

SEQ ID NO: 183187 - protein, 62 aa, Zea Mays
MLTLLHFIYDEYGHPLWQCLLALVANNHFVLVVHIHALSCPQLFACHFDKVIYIMWIRAFAF

SEQ ID NO: 183188 - protein, 292 aa, Zea Mays
MGYVLSAVGRVLEQPTAWGAAWEMALLAGPLWAAALLGLLLGWAWRPRWAAGLVVATADDGGSATTAAAAAQPPFATLDFWKAQLPARLRAPLGTAVQQREGDKDAVQRNRGTEPVAVAVGMADLVNLWRLVEGADGGPAWTKMMEKSLPTMTYRAWRRDAQTGPPQYQSSSIFENASPEEVRDFFGDDEFRMSNRWDDMLIYHKTLEECRTTGTMKVHWVRKFPFFCSDREYIIARRIWKLGGAYYCVTKGIPCSSIPRRSRPRRVDLYYSSWCIRAVQERERRRKGGDGL

SEQ ID NO: 183189 - protein, 263 aa, Zea Mays
MMVLFWYLIIFLCQCSSIIFSSASTVKSSPLKLAHVYQCTGCNSFYLQNIGRIHSKDKENIAVPNFRLTLPEVCSECGHQFVMGGPLWSYPIHDKVWAASILSDIHAMREAYPAYPKISAILSSVSEELLEAPLFVSLHNLCAILKCTTPTMVMLQCAIRNAGYQVSGSHVDPLALKTDAPMSVIWDIMRCWVKLHPVKHRPGNHPGNVILSQEPKFQAKFSRVLGASVTRKRARFMPNPEKYWGPGTKAGRNPRTFQMDNRN

SEQ ID NO: 183190 - protein, 153 aa, Zea Mays
MGGPLWSYPIHDKVWAASILSDIHAMREAYPAYPKISAILSSVSEELLEAPLFVSLHNLCAILKCTTPTMVMLQCAIRNAGYQVSGSHVDPLALKTDAPMSVIWDIMRCWVKLHPVKHRPGNHPGNVILSQEPKFQSTGGLGHPEARKIHAKS

SEQ ID NO: 183191 - protein, 291 aa, Zea Mays
MSDLGPLSYFLGIEVQQTQKGFYLSQSKYIQDLLDRSGLTDTRTVATPMDIHLKLRPKDGTPLADPTRYRHIVGSLVYLTITRPDIAHAVHMLSQFVSTPTSVHYGHLLRVLRYLRGTRSRCLLYASDSPLQLHAYSDATWASDPVDRCSTTGYCILLGSSPIAWKSKKQAAISRSSAEAELRALATTTAEIIWLRWLLADLGVSCDTSTPLLCDNLSAIQIAHDPVKHELTKHIGVDASFTRFHCQRKTIDLQYVPSEYQLADFFTKAQTRAQHQFHLIKLKASDPPFSP

SEQ ID NO: 183192 - protein, 485 aa, Zea Mays
MDVIDLFKQDLSFSVEAEWSKSNLVNNRDISIAVLRSFILKRHEEYAARSRKGPGDTTLSAQAKYKEPKVLEALAASGLRAIRYAVEVDGIGEVTAVDNNEAAVEACKKNIQHNGSLASSKVVPHHADARVYMLTHPKEFDVVDLDPYGSPAAFLDSAVQCVADGGILMCSATDMAVLAGGNAEVCFSKYGSYPLRGKHCHEMALRILLACIESHAIRHKRYIVPIISVHMDFYIRVFVRIFTSASTVKSSPLKLAHVYQCTGCNSFYLQNIGRIHSKDKENIAVPNFRLTLPEVCSECGHQFVMGGPLWSYPIHDKVWAASILSDIHAMREAYPAYPKISAILSSVSEELLEAPLFVSLHNLCAILKCTTPTMVMLQCAIRNAGYQVSGSHVDPLALKTDAPMSVIWDIMRCWVKLHPVKHRPGNHPGNVILSQEPKFQAKFSRVLGASVTRKRARFMPNPEKYWGPGTKAGRNPRTFQMDNRN

SEQ ID NO: 183193 - protein, 353 aa, Zea Mays
MLTHPKEFDVVDLDPYGSPAAFLDSAVQCVADGGILMCSATDMAVLAGGNAEVCFSKYGSYPLRGKHCHEMALRILLACIESHAIRHKRYIVPIISVHMDFYIRVFVRIFTSASTVKSSPLKLAHVYQCTGCNSFYLQNIGRIHSKDKENIAVPNFRLTLPEVCSECGHQFVMGGPLWSYPIHDKVWAASILSDIHAMREAYPAYPKISAILSSVSEELLEAPLFVSLHNLCAILKCTTPTMVMLQCAIRNAGYQVSGSHVDPLALKTDAPMSVIWDIMRCWVKLHPVKHRPGNHPGNVILSQEPKFQAKFSRVLGASVTRKRARFMPNPEKYWGPGTKAGRNPRTFQMDNRN

SEQ ID NO: 183194 - protein, 309 aa, Zea Mays
MTLSLGLLRSGLLNRRINQPANQVLRLHLAFSSASPSPSDPSAAAAGPQTTIREGKVEIFLDESNSVFYNKTQVNNRDISIAVLRSFILKRHEEYAARSRKAGPGDTTLSAQAKYKEPKVLEALAASGLRAIRYAVEVDGIGEVTAVDNNEAAVEACKKNIQHNGSLASSKVVPHHADARVYMLTHPKEFDVVDLDPYGSPAAFLDSAVQCVADGGILMCSATDMAVLAGGNAEVCFSKYGSYPLRGKHCHEMALRILLACIESHAIRHKRYIVPIISVHMDFYIRVFVRIFTLSPASIFFLIHSFPYG

SEQ ID NO: 183195 - protein, 109 aa, Zea Mays
MWRGCLNLRLGDSMRQLSLRLTPATSISHLLSHSLFQTPLCKQCKTMFCTTICTLCCPHHCTKPAFLKLKTKLRYLNFSATCGRLIVPFAQVLLGLANGSLHNISRFKR

SEQ ID NO: 183196 - protein, 268 aa, Zea Mays
MASSISAAAKASAAFAHKKELAAPAPHRAGSSRRTKPCRVRAVASPARTPRAPSSTGSVKTAMTMTEKILARASERAALEPGENVWVDIDVLMTHDVCGPGTIGIFKKEFGEDAKVWDREKVVIIPDHYIFTSDERANRNVDILRDFCLEQNIKYFYDIKDLSDFRANPDYKGVCHIALAQEGHCRPGEVLLGTDSHTCNAGAFGQFATGIGNTDAGFVMGTGKALLQVPPTIRFVLDGEMPPYLLAKDLILQYLVQPTNRWSLLDQL

SEQ ID NO: 183197 - protein, 332 aa, Zea Mays
MQARSPRPLLLASGIWRHRWFQELALTKRSKRAGTMPAANQQPPRTPVRLTRQSAVMPSPGGCPPPKPRHPLPPKTTSKATPKRNAISSSTQQQVQASTTTTETTETTNPVSFPPKMTRSTQAMSSPVRNTMPGPTRHTMHSPPRFTRASAAMSSPGANPHHSPPRFTRASAAMSSPGANPHHSPPRFTRASAAMSSPSAKPHHSTPAATAIVSHQPSPTTSVNKIVPTDNSPGGHSSRQSNAIIESAKQFDVATSEGNPNEGEPVGDLVPALLAPKKNVRKKTMGHGLEKMLNRGNRLAIHEAEGKKRPEVPLQATYLQILEAGIGNWCCP

SEQ ID NO: 183198 - protein, 397 aa, Zea Mays
MQARSPRPLLLASGIWRHRWFQELALTKRSKRAGTMPAANQQPPRTPVRLTRQSAVMPSPGGCPPPKPRHPLPPKTTSKATPKRNAISSSTQQQVQASTTTTETTETTNPVSFPPKMTRSTQAMSSPVRNTMPGPTRHTMHSPPRFTRASAAMSSPGANPHHSPPRFTRASAAMSSPGANPHHSPPRFTRASAAMSSPSAKPHHSTPAATAIVSHQPSPTTSVNKIVPTDNSPGGHSSRQSNAIIESAKQFDVATSEGNPNEGEPVGDLVPALLAPKKNVRKKTMGHGLEKMLNRGNRLAIHEAEGKKRPESRLDVDVKNEGPSKDACTDIIKRGVRQTMYNLKRKYFDESLTKEQLLAMQPPPKMNKEDWTGLVEYWCDPKNQEKSAKNKANRGNV

SEQ ID NO: 183199 - protein, 206 aa, Zea Mays
MITEAGANRVLVCDLHSSQAMGYFDIPVDHVYGQPVILDYLASKTICSDDLVVVSPDVGGVARARAFAKKLSDAPLAIVDKRRQGHNVAEVMNLIGDVRGKVAVMMDDMIDTAGTISKGAELLHQEGAREVYACCTHGVFSPPAIERLSSGLFQEVIITNTIPLKEEKSFPQLTILSVANLLGETIWRVHDDCSVGHEPYSSLDID

SEQ ID NO: 183200 - protein, 431 aa, Zea Mays
MRIEEVQSTSKKQRIATHTHIKGLGLDANGMSMPLAAGFVGQAAAREAAGLAVDMIRQKKMAGRALLLAGPPATGKTALALGIAQELGSKVPFCPMVGSEVYSSEVKKTEVIELSPEEAESTTGGYAKSISHVIIGLKTVKGTKQLKLDPSIYDALIKEKVAVGDVIYIEANSGAVKRVGRCDSFATEYDLEAEEYVPIPKGEVHKKKEIVQDVTLHDLDAANAQPQGGQDILSLMGQMMKPRKTEITEKLRQEINKVVNRYIDEGIAELVPGVLFIDEVHMLDIECFSYLNRALESPLSPIVILATNRGICNVRGTDMTSPHGIPVDLLDRLVIIRTETYGPTEMIQILAIRAQVEEIDIDEESLAYLGEIGQQTSLRHAIQLLSPASVVAKTNGREKMCKADLEEVSGLYLDAKSSARLLQEQQERYIT

SEQ ID NO: 183201 - protein, 240 aa, Zea Mays
MAPGSSIVTVVPESDCGDDDGLSESLGGIMLDVDSASKPWSTSASLANVALSSLCGLNDLLECPVCTNSMRPPILQCPNGHTICSSCKHRVENHCPTCRQELGNIRCLALEKVAEQLQLPCKYQSTGCTEIHPYKSKLKHEELCRFRPYSCPYAGSECLIAGDVPFLVSHLINDHKVDLHEGCTFNHRFSSVSGSTSACTSRRSCWGWRRCTWRSCGSWARRARRRGSGTAWRWAGAGGS

SEQ ID NO: 183202 - protein, 65 aa, Zea Mays
MGTAAVFELCSARLEVSTITRHCNPMVIGDRELPCYCILILETFIMTMYEILSLISTGMMRCVLL

SEQ ID NO: 183203 - protein, 457 aa, Zea Mays
MMGVYICVGGSHCLSGWVDRLPQCGWLMPMTPATQRNYAMYGHGGDCLTGSHRQSSLDYQAFASAWKTACSLDNAVFLVPAGRRYKVGAIQFVGPCKDRRMIIQIQGTVVAPEEPSEWDPRSPRLWLLFSGLAGARIQGGGVIDGSGSKWWASSCKINRSNPCRPAPTAVTIDSCRGVRVRGLRVQNAQQMHVTVSRSRGVRVAGLRIDAPEDSPNTDGIHVAESTAVTIQSCRIGTGDDCISIVNGSFGVKMRDIDCGPGHGISIGSLGKGGAFAAVADVALDRARISRAQNGVRIKTWQGGAGYVRGVRFADVAVDGVDHPIVIDQFYCDVTRRQRDGGGGGACANQTSAVAVSDVSYRNISGTSRRAEAIRFACSDAVPCTGIVLSNINLRRADDDGEVQTVCNCAVGLDYGRVQPAADCLRSSTCGGTPDGHHHHDDDDEEQGKDDAVLHTEL

SEQ ID NO: 183204 - protein, 187 aa, Zea Mays
MDGEAIRMGGGNLAPAYLSGAATATAITMQDPNQNQNQNQNQNQSQFLFSANSTALQLFGSAAVPTVGPAGYINYTGNTHLPVMNQASTSNIGAGNENLLKLQVPLSDYHQQSAGRLARVGNPGAVSTGLRLSYEDDERNSSITSGSGSMASLPATMSCVDGFMAELDKESKEINFYLRLQTKSASG

SEQ ID NO: 183205 - protein, 217 aa, Zea Mays
MEVSLKFAPLPRMQLQLTVLLSVGMGIFFEVKKKFETALGVLKKEKITIDPDDPAAVSRYAQVMKTVREKADLLSDSQRIKYTIETFTKGIPDARTYLNTLQQLRIKSGLIDHLGIEPLMMEALEKIEKDIKKPLLRSDKKNMATLLAEFDKINKKLGFRKEDLPKIEEELELEIAKSELTELKKECVEAMETQLKREEFQDEEMPDVRKLDIRNFL

SEQ ID NO: 183206 - protein, 3044 aa, Zea Mays
MANIPDVDVITKASSGIQTPVEINRDISDAIPDATDGSTETTEPAKAHSIIHPEKKESFQEDTSTAEPTEEVIKVEDRQSQQAEAMDADVVQEDVPKSEHADEPTADALEVLNQESIEETNSPVNEETEEATNQSNMPASEETIPKYDAATRDQPVNIQAQNQEPVDEGEATVEEREVAEAVHTEAPVQQSSVAFEEAVPEDQHNLGVANNTVQEDMMEATGQTKEGQRYQDLGPENAIENTQPASTANIPEVEVITEAPSGFQTPVEINLDISDAIADTTDGNTGTDELVKAEGVIHPENKESFLEDTSTTEPLEEVANVEDQHSQQADAMDADVVQEEVPKSKADEPATDTLEVLNQEYAEETSGPANEKIEETANQSNMLTSEETVPEYDTATRDPPVNIQAQNQESLEEREATVAENEVAEAVDTEAPVQQSSVALEDAVPEDQHNLGATNNTAQEDTQDAIGQTKEGQQFHDLGPENATENTQPASMANIADVDVTTEAPSGIQTPVEINLDISDAIPDTTDGNTETDKLVKTEGVIHPEKKESFPEDTSTAEPTEEVANVEDQQSQRADAMDADVVDEEVPKSEHADEPATDALEVLNQDYAEETNDPVNEKTEETGNQSNMPPSEETTPEYDTTTREPPVNIQAQNQESLEEREATVEESEVAEAVDTEAPVQQSSVALEDAVPEDQYNLIATNNTVQEDTQEAIGQTKEGQQYHDLGPENATENTEPASTANTPDVDVITEAPSGIQTSIEINLDISDAIPDTTDGNAKTDELVKVDGVILPDHKESFSEDTCVVEPTEEMIEVDQLGQQADAIHAEVLQEEVPEMIEVDQLGQQADVIHAEVLQEEVHKSEQSDEPGVDAQEVLNQESAEETDGLVNVKTDETEHKSNMVVPDDTIPEHDAQTREPPVNIQEQSRESVGDAEAVNTEAEMQQNSVAFEETTPENHVATSEPCSEIQHAHHVEPEEINGPEDGKDDEITNMSSREYLVRDNVLQSGPIIDIQPVQELEQIKTDEASNQTHAVIFNDLAQEDATATSEPQVTETELKDIEATEAEEITKLDHVTHSKELAVENDSTADEPHKGEIHQTLEQDLVEVKDTGTYHEKTISTSEDTVQDNLTEDEPSFGSQEVDDAESTEETKQNIAENIAEVSDVAIVDDAIEQNVLQTEDIVEMHKQELEREETERIEPVESEEASDQRNDAPFDYSAREDNTKESEIQQTESATETNEIEPTEIEAVPRESNTCVSEEPSQEDHIKESETSFDNQEVNITESSEVNDSHKDIISGGISDPSNTASAGDSSEGSNVPEGEPPEQAVQELGSEEIKNTQIDEVNETSLEMNATVFQIPSQEENPDTTKLHESTEVSNIEATEMHGNPHQSDLAAQSEEQTTEGISSGLKPESIEGNDTEAKKCQSTSQEKTISASESVPEDATTEPDVDHQQLQDQESAKLKETEADKFQEIVSSNTLSSEEFTSTEPSSDTEADNSQLAEETEDTEIVKSNTALAEAAAPETDATADTSSFHETDLEENKDTGTIETEDGMVSSDYTSEKMDTETMETEAVPHDSSDANIKEHTEDDTSTPNAPHAGTEPVHELESVEVSADTTEHPGETHDSASDELTPTEENTAVTEPSFSTQEVQNLTSQEIKDSEDDKTDEFSDINSFPIPGEADQVPRSETTPDVQEVEELGLTEETRDIEAIEPGDQQEDIVSTLEKPEIDGEPSADNQQVHEDKLPEVEDNKAIEAEASKQSNIATPDNAAEERNELESDPDPYAQPAEQVELSKDNENSQLVKTEETSDQSNFVVLRRTTEDSVAREIDPPVAIKQEQPVEEIKGVDATEAEEDFRTTQAVAIEKLASVNKIATVEPTYDIQRMDDLEATEEKKHAEAINEGDQSNIAVSEEQTPTYNGETPEDHHVESNEGTMGNETDNIILAHGIKDEIQKSAELKDGPCDLSETVLTTRRSENMIDEDNVQTYGNDTVEASNSIHQVKEEPDAGTEHNSSQMISECSGENETHVQDRDVDMWILTEGVIAEASQALLENDPQAAQDTIEKDDTTKSSEPISDHDSRQHCDVEALQQQSCETEALSILEQDEALQKIDSDQKQKEVEEIESQNDELQVDEQKHEDKRDDLAKEPLVEYQNFENRASNNTKDNDAFKVEQTEAANSEILKNKALHISKESTPSIMAMKVENIKETSEGTEEDDAAKNDNKDEQENAENVDIVSKTSTNEQGQTTDEIRKEEDPVHIIQASEKEIADEIEESKEIHEDNAICHDKLQTNSEKEESPQPHSNEPYNVDAKIDDTTSLCEEIIHDNTSINPREIEEIGENKGPDFTSEPSVESSIQNNVEDSSSHHKVSGADGAPSNGSLKTFTDTGRDIDVPLVITTSKEESVNDTMENLNLDLPGHQAQDGNTAEKVLSLEEREREMPSSEKLLQTEPGENQIPNEQDEKDIRDENQTLKEKDEDDMQDTEFGEAKKEVQQELPVSHFLMNLILGKESSDANEDSESEAARKQGEATEDDSCTFISEQEESLGSLPTENKVDDNPTFVEQEKHEVKCSEETQEMVEEQSDDQLHTERSIEIDEDIKKNTRALEIPAYQDNPQDGISGELQTEEAAGVSTKMVTRDIDISSVVLDNRTVGTVCQEKMEVSTKNENGSLRSSLNDSTNTMAPQDDTLGEGQSRLVLEPLPEDKSVDVVSEQAPLLTESGMTDANDLSSDTTSAQNPVSTKPTESARVEATYSTDIQLENEEVDKKEEDQHANTTKDEVSKEIVESSHINLQKITRPEEKSNELETQITEPVCDSQAILAHEKEISEENFPTAVEIQADGPNMQINQDKQDEAADIETEMKPEKLGESNFQEHQDNGTEQKSPKETDEGDQQLVAKKEILTQEMDVHETVERPQQAVESPQQTVSITSNEDQELFDSKVQERDLNVVSPREASEAEENFVDVTKPEFSTDEEQSPKADAEEKIYDEKIKDIEGTKNLTDEAAIKTEAPGAAQKTRKKYSLLSGVGSKVKHQLAKVKKAIVGKPGHTKPVSPTA

SEQ ID NO: 183207 - protein, 3735 aa, Zea Mays
MDANMVQEEVPKSEHADEPATDAFEVLNQESVDEPAIQAPVTIQVQNQEPLEEIELAEAVDTEATVQQSSAAFEESVPEHQCNLGATHNTEQEDTLEASGQSKGGQEYQDLGPENATENTQQASMTNILDVEVITETPSGIQTPMEINLVISDAIPDATDGNTETDEPAKAHTFVHPEKNEVFPENTFTTKPTAEVVKVEDQQNQQDDAMDAEVVLEEVPKSERADEPATDALEVLESVEETDDPMNEKTEETTQQSNIPASEETTAEYDATREPPANNQVQNKEPVDERESTVEEREVAEAVDTEAPVQQSSVAFDEAVPEEHHNLGVANNTVQEDTMEATGQTQEGQQYQDLGPENAAENTQPASTENIPDVEVITKAPSEIQSPVEINLDISDAIPDTNDGNTETDEPAKANTVARPDTEESFAEDTSTGPTEEVVTLEDQQSQQVDAKDADVVQEEVPTSEHTDEPATDAVEALNQESDEETDGPVYENTEETTHQSNMPASEETLPENDVTTREPSVTIQAQNQESLEEREVHEAVDTEATVQPSSASFEESVPEHQHNLGATNDTVQQDTLEATKQTKGGQQYQDLGPENATENTQPASMANIPDVDVITKASSGIQTPVEINRDISDAIPDATDGSTETTEPAKAHSIIHPEKKESFQEDTSTAEPTEEVIKVEDRQSQQAEAMDADVVQEDVPKSEHADEPTADALEVLNQESIEETNSPVNEETEEATNQSNMPASEETIPKYDAATRDQPVNIQAQNQEPVDEGEATVEEREVAEAVHTEAPVQQSSVAFEEAVPEDQHNLGVANNTVQEDMMEATGQTKEGQRYQDLGPENAIENTQPASTANIPEVEVITEAPSGFQTPVEINLDISDAIADTTDGNTGTDELVKAEGVIHPENKESFLEDTSTTEPLEEVANVEDQHSQQADAMDADVVQEEVPKSKADEPATDTLEVLNQEYAEETSGPANEKIEETANQSNMLTSEETVPEYDTATRDPPVNIQAQNQESLEEREATVAENEVAEAVDTEAPVQQSSVALEDAVPEDQHNLGATNNTAQEDTQDAIGQTKEGQQFHDLGPENATENTQPASMANIADVDVTTEAPSGIQTPVEINLDISDAIPDTTDGNTETDKLVKTEGVIHPEKKESFPEDTSTAEPTEEVANVEDQQSQRADAMDADVVDEEVPKSEHADEPATDALEVLNQDYAEETNDPVNEKTEETGNQSNMPPSEETTPEYDTTTREPPVNIQAQNQESLEEREATVEESEVAEAVDTEAPVQQSSVALEDAVPEDQYNLIATNNTVQEDTQEAIGQTKEGQQYHDLGPENATENTEPASTANTPDVDVITEAPSGIQTSIEINLDISDAIPDTTDGNAKTDELVKVDGVILPDHKESFSEDTCVVEPTEEMIEVDQLGQQADAIHAEVLQEEVPEMIEVDQLGQQADVIHAEVLQEEVHKSEQSDEPGVDAQEVLNQESAEETDGLVNVKTDETEHKSNMVVPDDTIPEHDAQTREPPVNIQEQSRESVGDAEAVNTEAEMQQNSVAFEETTPENHVATSEPCSEIQHAHHVEPEEINGPEDGKDDEITNMSSREYLVRDNVLQSGPIIDIQPVQELEQIKTDEASNQTHAVIFNDLAQEDATATSEPQVTETELKDIEATEAEEITKLDHVTHSKELAVENDSTADEPHKGEIHQTLEQDLVEVKDTGTYHEKTISTSEDTVQDNLTEDEPSFGSQEVDDAESTEETKQNIAENIAEVSDVAIVDDAIEQNVLQTEDIVEMHKQELEREETERIEPVESEEASDQRNDAPFDYSAREDNTKESEIQQTESATETNEIEPTEIEAVPRESNTCVSEEPSQEDHIKESETSFDNQEVNITESSEVNDSHKDIISGGISDPSNTASAGDSSEGSNVPEGEPPEQAVQELGSEEIKNTQIDEVNETSLEMNATVFQIPSQEENPDTTKLHESTEVSNIEATEMHGNPHQSDLAAQSEEQTTEGISSGLKPESIEGNDTEAKKCQSTSQEKTISASESVPEDATTEPDVDHQQLQDQESAKLKETEADKFQEIVSSNTLSSEEFTSTEPSSDTEADNSQLAEETEDTEIVKSNTALAEAAAPETDATADTSSFHETDLEENKDTGTIETEDGMVSSDYTSEKMDTETMETEAVPHDSSDANIKEHTEDDTSTPNAPHAGTEPVHELESVEVSADTTEHPGETHDSASDELTPTEENTAVTEPSFSTQEVQNLTSQEIKDSEDDKTDEFSDINSFPIPGEADQVPRSETTPDVQEVEELGLTEETRDIEAIEPGDQQEDIVSTLEKPEIDGEPSADNQQVHEDKLPEVEDNKAIEAEASKQSNIATPDNAAEERNELESDPDPYAQPAEQVELSKDNENSQLVKTEETSDQSNFVVLRRTTEDSVAREIDPPVAIKQEQPVEEIKGVDATEAEEDFRTTQAVAIEKLASVNKIATVEPTYDIQRMDDLEATEEKKHAEAINEGDQSNIAVSEEQTPTYNGETPEDHHVESNEGTMGNETDNIILAHGIKDEIQKSAELKDGPCDLSETVLTTRRSENMIDEDNVQTYGNDTVEASNSIHQVKEEPDAGTEHNSSQMISECSGENETHVQDRDVDMWILTEGVIAEASQALLENDPQAAQDTIEKDDTTKSSEPISDHDSRQHCDVEALQQQSCETEALSILEQDEALQKIDSDQKQKEVEEIESQNDELQVDEQKHEDKRDDLAKEPLVEYQNFENRASNNTKDNDAFKVEQTEAANSEILKNKALHISKESTPSIMAMKVENIKETSEGTEEDDAAKNDNKDEQENAENVDIVSKTSTNEQGQTTDEIRKEEDPVHIIQASEKEIADEIEESKEIHEDNAICHDKLQTNSEKEESPQPHSNEPYNVDAKIDDTTSLCEEIIHDNTSINPREIEEIGENKGPDFTSEPSVESSIQNNVEDSSSHHKVEDEKLSMSEKNDVDTEAMQEINDESGADINQTEQCQEEITADDVLQLETEGNSFDKIEETASNEETETSTAATEAVTFNEDITDKVSGADGAPSNGSLKTFTDTGRDIDVPLVITTSKEESVNDTMENLNLDLPGHQAQDGNTAEKVLSLEEREREMPSSEKLLQTEPGENQIPNEQDEKDIRDENQTLKEKDEDDMQDTEFGEAKKEVQQELPVSHFLMNLILGKESSDANEDSESEAARKQGEATEDDSCTFISEQEESLGSLPTENKVDDNPTFVEQEKHEVKCSEETQEMVEEQSDDQLHTERSIEIDEDIKKNTRALEIPAYQDNPQDGISGELQTEEAAGVSTKMVTRDIDISSVVLDNRTVGTVCQEKMEVSTKNENGSLRSSLNDSTNTMAPQDDTLGEGQSRLVLEPLPEDKSVDVVSEQAPLLTESGMTDANDLSSDTTSAQNPVSTKPTESARVEATYSTDIQLENEEVDKKEEDQHANTTKDEVSKEIVESSHINLQKITRPEEKSNELETQITEPVCDSQAILAHEKEISEENFPTAVEIQADGPNMQINQDKQDEAADIETEMKPEKLGESNFQEHQDNGTEQKSPKETDEGDQQLVAKKEILTQEMDVHETVERPQQAVESPQQTVSITSNEDQELFDSKVQERDLNVVSPREASEAEENFVDVTKPEFSTDEEQSPKADAEEKIYDEKIKDIEGTKNLTDEAAIKTEAPGAAQKTRKKYSLLSGVGSKVKHQLAKVKKAIVGKPGHTKPVSPTA

SEQ ID NO: 183208 - protein, 3130 aa, Zea Mays
MANIPDVDVITKASSGIQTPVEINRDISDAIPDATDGSTETTEPAKAHSIIHPEKKESFQEDTSTAEPTEEVIKVEDRQSQQAEAMDADVVQEDVPKSEHADEPTADALEVLNQESIEETNSPVNEETEEATNQSNMPASEETIPKYDAATRDQPVNIQAQNQEPVDEGEATVEEREVAEAVHTEAPVQQSSVAFEEAVPEDQHNLGVANNTVQEDMMEATGQTKEGQRYQDLGPENAIENTQPASTANIPEVEVITEAPSGFQTPVEINLDISDAIADTTDGNTGTDELVKAEGVIHPENKESFLEDTSTTEPLEEVANVEDQHSQQADAMDADVVQEEVPKSKADEPATDTLEVLNQEYAEETSGPANEKIEETANQSNMLTSEETVPEYDTATRDPPVNIQAQNQESLEEREATVAENEVAEAVDTEAPVQQSSVALEDAVPEDQHNLGATNNTAQEDTQDAIGQTKEGQQFHDLGPENATENTQPASMANIADVDVTTEAPSGIQTPVEINLDISDAIPDTTDGNTETDKLVKTEGVIHPEKKESFPEDTSTAEPTEEVANVEDQQSQRADAMDADVVDEEVPKSEHADEPATDALEVLNQDYAEETNDPVNEKTEETGNQSNMPPSEETTPEYDTTTREPPVNIQAQNQESLEEREATVEESEVAEAVDTEAPVQQSSVALEDAVPEDQYNLIATNNTVQEDTQEAIGQTKEGQQYHDLGPENATENTEPASTANTPDVDVITEAPSGIQTSIEINLDISDAIPDTTDGNAKTDELVKVDGVILPDHKESFSEDTCVVEPTEEMIEVDQLGQQADAIHAEVLQEEVPEMIEVDQLGQQADVIHAEVLQEEVHKSEQSDEPGVDAQEVLNQESAEETDGLVNVKTDETEHKSNMVVPDDTIPEHDAQTREPPVNIQEQSRESVGDAEAVNTEAEMQQNSVAFEETTPENHVATSEPCSEIQHAHHVEPEEINGPEDGKDDEITNMSSREYLVRDNVLQSGPIIDIQPVQELEQIKTDEASNQTHAVIFNDLAQEDATATSEPQVTETELKDIEATEAEEITKLDHVTHSKELAVENDSTADEPHKGEIHQTLEQDLVEVKDTGTYHEKTISTSEDTVQDNLTEDEPSFGSQEVDDAESTEETKQNIAENIAEVSDVAIVDDAIEQNVLQTEDIVEMHKQELEREETERIEPVESEEASDQRNDAPFDYSAREDNTKESEIQQTESATETNEIEPTEIEAVPRESNTCVSEEPSQEDHIKESETSFDNQEVNITESSEVNDSHKDIISGGISDPSNTASAGDSSEGSNVPEGEPPEQAVQELGSEEIKNTQIDEVNETSLEMNATVFQIPSQEENPDTTKLHESTEVSNIEATEMHGNPHQSDLAAQSEEQTTEGISSGLKPESIEGNDTEAKKCQSTSQEKTISASESVPEDATTEPDVDHQQLQDQESAKLKETEADKFQEIVSSNTLSSEEFTSTEPSSDTEADNSQLAEETEDTEIVKSNTALAEAAAPETDATADTSSFHETDLEENKDTGTIETEDGMVSSDYTSEKMDTETMETEAVPHDSSDANIKEHTEDDTSTPNAPHAGTEPVHELESVEVSADTTEHPGETHDSASDELTPTEENTAVTEPSFSTQEVQNLTSQEIKDSEDDKTDEFSDINSFPIPGEADQVPRSETTPDVQEVEELGLTEETRDIEAIEPGDQQEDIVSTLEKPEIDGEPSADNQQVHEDKLPEVEDNKAIEAEASKQSNIATPDNAAEERNELESDPDPYAQPAEQVELSKDNENSQLVKTEETSDQSNFVVLRRTTEDSVAREIDPPVAIKQEQPVEEIKGVDATEAEEDFRTTQAVAIEKLASVNKIATVEPTYDIQRMDDLEATEEKKHAEAINEGDQSNIAVSEEQTPTYNGETPEDHHVESNEGTMGNETDNIILAHGIKDEIQKSAELKDGPCDLSETVLTTRRSENMIDEDNVQTYGNDTVEASNSIHQVKEEPDAGTEHNSSQMISECSGENETHVQDRDVDMWILTEGVIAEASQALLENDPQAAQDTIEKDDTTKSSEPISDHDSRQHCDVEALQQQSCETEALSILEQDEALQKIDSDQKQKEVEEIESQNDELQVDEQKHEDKRDDLAKEPLVEYQNFENRASNNTKDNDAFKVEQTEAANSEILKNKALHISKESTPSIMAMKVENIKETSEGTEEDDAAKNDNKDEQENAENVDIVSKTSTNEQGQTTDEIRKEEDPVHIIQASEKEIADEIEESKEIHEDNAICHDKLQTNSEKEESPQPHSNEPYNVDAKIDDTTSLCEEIIHDNTSINPREIEEIGENKGPDFTSEPSVESSIQNNVEDSSSHHKVEDEKLSMSEKNDVDTEAMQEINDESGADINQTEQCQEEITADDVLQLETEGNSFDKIEETASNEETETSTAATEAVTFNEDITDKVSGADGAPSNGSLKTFTDTGRDIDVPLVITTSKEESVNDTMENLNLDLPGHQAQDGNTAEKVLSLEEREREMPSSEKLLQTEPGENQIPNEQDEKDIRDENQTLKEKDEDDMQDTEFGEAKKEVQQELPVSHFLMNLILGKESSDANEDSESEAARKQGEATEDDSCTFISEQEESLGSLPTENKVDDNPTFVEQEKHEVKCSEETQEMVEEQSDDQLHTERSIEIDEDIKKNTRALEIPAYQDNPQDGISGELQTEEAAGVSTKMVTRDIDISSVVLDNRTVGTVCQEKMEVSTKNENGSLRSSLNDSTNTMAPQDDTLGEGQSRLVLEPLPEDKSVDVVSEQAPLLTESGMTDANDLSSDTTSAQNPVSTKPTESARVEATYSTDIQLENEEVDKKEEDQHANTTKDEVSKEIVESSHINLQKITRPEEKSNELETQITEPVCDSQAILAHEKEISEENFPTAVEIQADGPNMQINQDKQDEAADIETEMKPEKLGESNFQEHQDNGTEQKSPKETDEGDQQLVAKKEILTQEMDVHETVERPQQAVESPQQTVSITSNEDQELFDSKVQERDLNVVSPREASEAEENFVDVTKPEFSTDEEQSPKADAEEKIYDEKIKDIEGTKNLTDEAAIKTEAPGAAQKTRKKYSLLSGVGSKVKHQLAKVKKAIVGKPGHTKPVSPTA

SEQ ID NO: 183209 - protein, 4027 aa, Zea Mays
MATEDEEREAADGTEVPVEAVVLGTFHLHAHPEGKLSSLMDIKSMGETIDSTEGTLKIPEDQVLVEAPSDVQLPPEHNLNGEASSLNGHTDKEEKVSVEQPHDNDQEEAELDQNNRINKEDAADGLSHGESTTEDSCLLKHKKDEESKGDEQQDLGVTVDDDLVQEDTLKTDNAIEQTDDGQQDQDQEPEKANENTEPASIANNDDVEIVAETPTGLQAPVESRMNDSDGIPETIDEETETDEPAQADGVVHPEDVAKVEDQQSQQDDTVDADVAPEEVKCEETDQQEEKPKSEAHEPTIDTREALNQEPAEETDDSMNKKIEETAHQRNMAAPKETTLEHEATMSATPVNTQVQDQEPLEEIEDTEKGIQPSSGSGDAIPEDQSNLSVTIDNDTVNEDTVIGIEQQDDGQQDEDLEPEKATEDTQPASMTNIPQVEVVTEASSGVQTPGDLNLNNSDAVPDTIDANTETDEPSKAHSVVHPEKKERFLEDATTEEPTEEVVKVEAQQSQQADVMDANMVQEEVPKSEHADEPATDAFEVLNQESVDEPAIQAPVTIQVQNQEPLEEIELAEAVDTEATVQQSSAAFEESVPEHQCNLGATHNTEQEDTLEASGQSKGGQEYQDLGPENATENTQQASMTNILDVEVITETPSGIQTPMEINLVISDAIPDATDGNTETDEPAKAHTFVHPEKNEVFPENTFTTKPTAEVVKVEDQQNQQDDAMDAEVVLEEVPKSERADEPATDALEVLESVEETDDPMNEKTEETTQQSNIPASEETTAEYDATREPPANNQVQNKEPVDERESTVEEREVAEAVDTEAPVQQSSVAFDEAVPEEHHNLGVANNTVQEDTMEATGQTQEGQQYQDLGPENAAENTQPASTENIPDVEVITKAPSEIQSPVEINLDISDAIPDTNDGNTETDEPAKANTVARPDTEESFAEDTSTGPTEEVVTLEDQQSQQVDAKDADVVQEEVPTSEHTDEPATDAVEALNQESDEETDGPVYENTEETTHQSNMPASEETLPENDVTTREPSVTIQAQNQESLEEREVHEAVDTEATVQPSSASFEESVPEHQHNLGATNDTVQQDTLEATKQTKGGQQYQDLGPENATENTQPASMANIPDVDVITKASSGIQTPVEINRDISDAIPDATDGSTETTEPAKAHSIIHPEKKESFQEDTSTAEPTEEVIKVEDRQSQQAEAMDADVVQEDVPKSEHADEPTADALEVLNQESIEETNSPVNEETEEATNQSNMPASEETIPKYDAATRDQPVNIQAQNQEPVDEGEATVEEREVAEAVHTEAPVQQSSVAFEEAVPEDQHNLGVANNTVQEDMMEATGQTKEGQRYQDLGPENAIENTQPASTANIPEVEVITEAPSGFQTPVEINLDISDAIADTTDGNTGTDELVKAEGVIHPENKESFLEDTSTTEPLEEVANVEDQHSQQADAMDADVVQEEVANVEDQQSQRADAMDADVVDEEVPKSEHADEPATDALEVLNQDYAEETNDPVNEKTEETGNQSNMPPSEETTPEYDTTTREPPVNIQAQNQESLEEREATVEESEVAEAVDTEAPVQQSSVALEDAVPEDQYNLIATNNTVQEDTQEAIGQTKEGQQYHDLGPENATENTEPASTANTPDVDVITEAPSGIQTSIEINLDISDAIPDTTDGNAKTDELVKVDGVILPDHKESFSEDTCVVEPTEEMIEVDQLGQQADAIHAEVLQEEVPEMIEVDQLGQQADVIHAEVLQEEVHKSEQSDEPGVDAQEVLNQESAEETDGLVNVKTDETEHKSNMVVPDDTIPEHDAQTREPPVNIQEQSRESVGDAEAVNTEAEMQQNSVAFEETTPENHVATSEPCSEIQHAHHVEPEEINGPEDGKDDEITNMSSREYLVRDNVLQSGPIIDIQPVQELEQIKTDEASNQTHAVIFNDLAQEDATATSEPQVTETELKDIEATEAEEITKLDHVTHSKELAVENDSTADEPHKGEIHQTLEQDLVEVKDTGTYHEKTISTSEDTVQDNLTEDEPSFGSQEVDDAESTEETKQNIAENIAEVSDVAIVDDAIEQNVLQTEDIVEMHKQELEREETERIEPVESEEASDQRNDAPFDYSAREDNTKESEIQQTESATETNEIEPTEIEAVPRESNTCVSEEPSQEDHIKESETSFDNQEVNITESSEVNDSHKDIISGGISDPSNTASAGDSSEGSNVPEGEPPEQAVQELGSEEIKNTQIDEVNETSLEMNATVFQIPSQEENPDTTKLHESTEVSNIEATEMHGNPHQSDLAAQSEEQTTEGISSGLKPESIEGNDTEAKKCQSTSQEKTISASESVPEDATTEPDVDHQQLQDQESAKLKETEADKFQEIVSSNTLSSEEFTSTEPSSDTEADNSQLAEETEDTEIVKSNTALAEAAAPETDATADTSSFHETDLEENKDTGTIETEDGMVSSDYTSEKMDTETMETEAVPHDSSDANIKEHTEDDTSTPNAPHAGTEPVHELESVEVSADTTEHPGETHDSASDELTPTEENTAVTEPSFSTQEVQNLTSQEIKDSEDDKTDEFSDINSFPIPGEADQVPRSETTPDVQEVEELGLTEETRDIEAIEPGDQQEDIVSTLEKPEIDGEPSADNQQVHEDKLPEVEDNKAIEAEASKQSNIATPDNAAEERNELESDPDPYAQPAEQVELSKDNENSQLVKTEETSDQSNFVVLRRTTEDSVAREIDPPVAIKQEQPVEEIKGVDATEAEEDFRTTQAVAIEKLASVNKIATVEPTYDIQRMDDLEATEEKKHAEAINEGDQSNIAVSEEQTPTYNGETPEDHHVESNEGTMGNETDNIILAHGIKDEIQKSAELKDGPCDLSETVLTTRRSENMIDEDNVQTYGNDTVEASNSIHQVKEEPDAGTEHNSSQMISECSGENETHVQDRDVDMWILTEGVIAEASQALLENDPQAAQDTIEKDDTTKSSEPISDHDSRQHCDVEALQQQSCETEALSILEQDEALQKIDSDQKQKEVEEIESQNDELQVDEQKHEDKRDDLAKEPLVEYQNFENRASNNTKDNDAFKVEQTEAANSEILKNKALHISKESTPSIMAMKVENIKETSEGTEEDDAAKNDNKDEQENAENVDIVSKTSTNEQGQTTDEIRKEEDPVHIIQASEKEIADEIEESKEIHEDNAICHDKLQTNSEKEESPQPHSNEPYNVDAKIDDTTSLCEEIIHDNTSINPREIEEIGENKGPDFTSEPSVESSIQNNVEDSSSHHKVEDEKLSMSEKNDVDTEAMQEINDESGADINQTEQCQEEITADDVLQLETEGNSFDKIEETASNEETETSTAATEAVTFNEDITDKVSGADGAPSNGSLKTFTDTGRDIDVPLVITTSKEESVNDTMENLNLDLPGHQAQDGNTAEKVLSLEEREREMPSSEKLLQTEPGENQIPNEQDEKDIRDENQTLKEKDEDDMQDTEFGEAKKEVQQELPVSHFLMNLILGKESSDANEDSESEAARKQGEATEDDSCTFISEQEESLGSLPTENKVDDNPTFVEQEKHEVKCSEETQEMVEEQSDDQLHTERSIEIDEDIKKNTRALEIPAYQDNPQDGISGELQTEEAAGVSTKMVTRDIDISSVVLDNRTVGTVCQEKMEVSTKNENGSLRSSLNDSTNTMAPQDDTLGEGQSRLVLEPLPEDKSVDVVSEQAPLLTESGMTDANDLSSDTTSAQNPVSTKPTESARVEATYSTDIQLENEEVDKKEEDQHANTTKDEVSKEIVESSHINLQKITRPEEKSNELETQITEPVCDSQAILAHEKEISEENFPTAVEIQADGPNMQINQDKQDEAADIETEMKPEKLGESNFQEHQDNGTEQKSPKETDEGDQQLVAKKEILTQEMDVHETVERPQQAVESPQQTVSITSNEDQELFDSKVQERDLNVVSPREASEAEENFVDVTKPEFSTDEEQSPKADAEEKIYDEKIKDIEGTKNLTDEAAIKTEAPGAAQKTRKKYSLLSGVGSKVKHQLAKVKKAIVGKPGHTKPVSPTA

SEQ ID NO: 183210 - protein, 3981 aa, Zea Mays
MATEDEEREAADGTEVPVEAVVLGTFHLHAHPEGKLSSLMDIKSMGETIDSTEGTLKIPEDQVLVEAPSDVQLPPEHNLNGEASSLNGHTDKEEKVSVEQPHDNDQEEAELDQNNRINKEDAADGLSHGESTTEDSCLLKHKKDEESKGDEQQDLGVTVDDDLVQEDTLKTDNAIEQTDDGQQDQDQEPEKANENTEPASIANNDDVEIVAETPTGLQAPVESRMNDSDGIPETIDEETETDEPAQADGVVHPEDVAKVEDQQSQQDDTVDADVAPEEVKCEETDQQEEKPKSEAHEPTIDTREALNQEPAEETDDSMNKKIEETAHQRNMAAPKETTLEHEATMSATPVNTQVQDQEPLEEIEDTEKGIQPSSGSGDAIPEDQSNLSVTIDNDTVNEDTVIGIEQQDDGQQDEDLEPEKATEDTQPASMTNIPQVEVVTEASSGVQTPGDLNLNNSDAVPDTIDANTETDEPSKAHSVVHPEKKERFLEDATTEEPTEEVVKVEAQQSQQADVMDANMVQEEVPKSEHADEPATDAFEVLNQESVDEPAIQAPVTIQVQNQEPLEEIELAEAVDTEATVQQSSAAFEESVPEHQCNLGATHNTEQEDTLEASGQSKGGQEYQDLGPENATENTQQASMTNILDVEVITETPSGIQTPMEINLVISDAIPDATDGNTETDEPAKAHTFVHPEKNEVFPENTFTTKPTAEVVKVEDQQNQQDDAMDAEVVLEEVPKSERADEPATDALEVLESVEETDDPMNEKTEETTQQSNIPASEETTAEYDATREPPANNQVQNKEPVDERESTVEEREVAEAVDTEAPVQQSSVAFDEAVPEEHHNLGVANNTVQEDTMEATGQTQEGQQYQDLGPENAAENTQPASTENIPDVEVITKAPSEIQSPVEINLDISDAIPDTNDGNTETDEPAKANTVARPDTEESFAEDTSTGPTEEVVTLEDQQSQQVDAKDADVVQEEVPTSEHTDEPATDAVEALNQESDEETDGPVYENTEETTHQSNMPASEETLPENDVTTREPSVTIQAQNQESLEEREVHEAVDTEATVQPSSASFEESVPEHQHNLGATNDTVQQDTLEATKQTKGGQQYQDLGPENATENTQPASMANIPDVDVITKASSGIQTPVEINRDISDAIPDATDGSTETTEPAKAHSIIHPEKKESFQEDTSTAEPTEEVIKVEDRQSQQAEAMDADVVQEDVPKSEHADEPTADALEVLNQESIEETNSPVNEETEEATNQSNMPASEETIPKYDAATRDQPVNIQAQNQEPVDEGEATVEEREVAEAVHTEAPVQQSSVAFEEAVPEDQHNLGVANNTVQEDMMEATGQTKEGQRYQDLGPENAIENTQPASTANIPEVEVITEAPSGFQTPVEINLDISDAIADTTDGNTGTDELVKAEGVIHPENKESFLEDTSTTEPLEEVPKSEHADEPATDALEVLNQDYAEETNDPVNEKTEETGNQSNMPPSEETTPEYDTTTREPPVNIQAQNQESLEEREATVEESEVAEAVDTEAPVQQSSVALEDAVPEDQYNLIATNNTVQEDTQEAIGQTKEGQQYHDLGPENATENTEPASTANTPDVDVITEAPSGIQTSIEINLDISDAIPDTTDGNAKTDELVKVDGVILPDHKESFSEDTCVVEPTEEMIEVDQLGQQADAIHAEVLQEEVPEMIEVDQLGQQADVIHAEVLQEEVHKSEQSDEPGVDAQEVLNQESAEETDGLVNVKTDETEHKSNMVVPDDTIPEHDAQTREPPVNIQEQSRESVGDAEAVNTEAEMQQNSVAFEETTPENHVATSEPCSEIQHAHHVEPEEINGPEDGKDDEITNMSSREYLVRDNVLQSGPIIDIQPVQELEQIKTDEASNQTHAVIFNDLAQEDATATSEPQVTETELKDIEATEAEEITKLDHVTHSKELAVENDSTADEPHKGEIHQTLEQDLVEVKDTGTYHEKTISTSEDTVQDNLTEDEPSFGSQEVDDAESTEETKQNIAENIAEVSDVAIVDDAIEQNVLQTEDIVEMHKQELEREETERIEPVESEEASDQRNDAPFDYSAREDNTKESEIQQTESATETNEIEPTEIEAVPRESNTCVSEEPSQEDHIKESETSFDNQEVNITESSEVNDSHKDIISGGISDPSNTASAGDSSEGSNVPEGEPPEQAVQELGSEEIKNTQIDEVNETSLEMNATVFQIPSQEENPDTTKLHESTEVSNIEATEMHGNPHQSDLAAQSEEQTTEGISSGLKPESIEGNDTEAKKCQSTSQEKTISASESVPEDATTEPDVDHQQLQDQESAKLKETEADKFQEIVSSNTLSSEEFTSTEPSSDTEADNSQLAEETEDTEIVKSNTALAEAAAPETDATADTSSFHETDLEENKDTGTIETEDGMVSSDYTSEKMDTETMETEAVPHDSSDANIKEHTEDDTSTPNAPHAGTEPVHELESVEVSADTTEHPGETHDSASDELTPTEENTAVTEPSFSTQEVQNLTSQEIKDSEDDKTDEFSDINSFPIPGEADQVPRSETTPDVQEVEELGLTEETRDIEAIEPGDQQEDIVSTLEKPEIDGEPSADNQQVHEDKLPEVEDNKAIEAEASKQSNIATPDNAAEERNELESDPDPYAQPAEQVELSKDNENSQLVKTEETSDQSNFVVLRRTTEDSVAREIDPPVAIKQEQPVEEIKGVDATEAEEDFRTTQAVAIEKLASVNKIATVEPTYDIQRMDDLEATEEKKHAEAINEGDQSNIAVSEEQTPTYNGETPEDHHVESNEGTMGNETDNIILAHGIKDEIQKSAELKDGPCDLSETVLTTRRSENMIDEDNVQTYGNDTVEASNSIHQVKEEPDAGTEHNSSQMISECSGENETHVQDRDVDMWILTEGVIAEASQALLENDPQAAQDTIEKDDTTKSSEPISDHDSRQHCDVEALQQQSCETEALSILEQDEALQKIDSDQKQKEVEEIESQNDELQVDEQKHEDKRDDLAKEPLVEYQNFENRASNNTKDNDAFKVEQTEAANSEILKNKALHISKESTPSIMAMKVENIKETSEGTEEDDAAKNDNKDEQENAENVDIVSKTSTNEQGQTTDEIRKEEDPVHIIQASEKEIADEIEESKEIHEDNAICHDKLQTNSEKEESPQPHSNEPYNVDAKIDDTTSLCEEIIHDNTSINPREIEEIGENKGPDFTSEPSVESSIQNNVEDSSSHHKVEDEKLSMSEKNDVDTEAMQEINDESGADINQTEQCQEEITADDVLQLETEGNSFDKIEETASNEETETSTAATEAVTFNEDITDKVSGADGAPSNGSLKTFTDTGRDIDVPLVITTSKEESVNDTMENLNLDLPGHQAQDGNTAEKVLSLEEREREMPSSEKLLQTEPGENQIPNEQDEKDIRDENQTLKEKDEDDMQDTEFGEAKKEVQQELPVSHFLMNLILGKESSDANEDSESEAARKQGEATEDDSCTFISEQEESLGSLPTENKVDDNPTFVEQEKHEVKCSEETQEMVEEQSDDQLHTERSIEIDEDIKKNTRALEIPAYQDNPQDGISGELQTEEAAGVSTKMVTRDIDISSVVLDNRTVGTVCQEKMEVSTKNENGSLRSSLNDSTNTMAPQDDTLGEGQSRLVLEPLPEDKSVDVVSEQAPLLTESGMTDANDLSSDTTSAQNPVSTKPTESARVEATYSTDIQLENEEVDKKEEDQHANTTKDEVSKEIVESSHINLQKITRPEEKSNELETQITEPVCDSQAILAHEKEISEENFPTAVEIQADGPNMQINQDKQDEAADIETEMKPEKLGESNFQEHQDNGTEQKSPKETDEGDQQLVAKKEILTQEMDVHETVERPQQAVESPQQTVSITSNEDQELFDSKVQERDLNVVSPREASEAEENFVDVTKPEFSTDEEQSPKADAEEKIYDEKIKDIEGTKNLTDEAAIKTEAPGAAQKTRKKYSLLSGVGSKVKHQLAKVKKAIVGKPGHTKPVSPTA

SEQ ID NO: 183211 - protein, 3084 aa, Zea Mays
MATEDEEREAADGTEVPVEAVVLGTFHLHAHPEGKLSSLMDIKSMGETIDSTEGTLKIPEDQVLVEAPSDVQLPPEHNLNGEASSLNGHTDKEEKVSVEQPHDNDQEEAELDQNNRINKEDAADGLSHGESTTEDSCLLKHKKDEESKGDEQQDLGVTVDDDLVQEDTLKTDNAIEQTDDGQQDQDQEPEKANENTEPASIANNDDVEIVAETPTGLQAPVESRMNDSDGIPETIDEETETDEPAQADGVVHPEDVAKVEDQQSQQDDTVDADVAPEEVKCEETDQQEEKPKSEAHEPTIDTREALNQEPAEETDDSMNKKIEETAHQRNMAAPKETTLEHEATMSATPVNTQVQDQEPLEEIEDTEKGIQPSSGSGDAIPEDQSNLSVTIDNDTVNEDTVIGIEQQDDGQQDEDLEPEKATEDTQPASMTNIPQVEVVTEASSGVQTPGDLNLNNSDAVPDTIDANTETDEPSKAHSVVHPEKKERFLEDATTEEPTEEVVKVEAQQSQQADVMDANMVQEEVPKSEHADEPATDAFEVPKSEHADEPATDALEVLNQDYAEETNDPVNEKTEETGNQSNMPPSEETTPEYDTTTREPPVNIQAQNQESLEEREATVEESEVAEAVDTEAPVQQSSVALEDAVPEDQYNLIATNNTVQEDTQEAIGQTKEGQQYHDLGPENATENTEPASTANTPDVDVITEAPSGIQTSIEINLDISDAIPDTTDGNAKTDELVKVDGVILPDHKESFSEDTCVVEPTEEMIEVDQLGQQADAIHAEVLQEEVPEMIEVDQLGQQADVIHAEVLQEEVHKSEQSDEPGVDAQEVLNQESAEETDGLVNVKTDETEHKSNMVVPDDTIPEHDAQTREPPVNIQEQSRESVGDAEAVNTEAEMQQNSVAFEETTPENHVATSEPCSEIQHAHHVEPEEINGPEDGKDDEITNMSSREYLVRDNVLQSGPIIDIQPVQELEQIKTDEASNQTHAVIFNDLAQEDATATSEPQVTETELKDIEATEAEEITKLDHVTHSKELAVENDSTADEPHKGEIHQTLEQDLVEVKDTGTYHEKTISTSEDTVQDNLTEDEPSFGSQEVDDAESTEETKQNIAENIAEVSDVAIVDDAIEQNVLQTEDIVEMHKQELEREETERIEPVESEEASDQRNDAPFDYSAREDNTKESEIQQTESATETNEIEPTEIEAVPRESNTCVSEEPSQEDHIKESETSFDNQEVNITESSEVNDSHKDIISGGISDPSNTASAGDSSEGSNVPEGEPPEQAVQELGSEEIKNTQIDEVNETSLEMNATVFQIPSQEENPDTTKLHESTEVSNIEATEMHGNPHQSDLAAQSEEQTTEGISSGLKPESIEGNDTEAKKCQSTSQEKTISASESVPEDATTEPDVDHQQLQDQESAKLKETEADKFQEIVSSNTLSSEEFTSTEPSSDTEADNSQLAEETEDTEIVKSNTALAEAAAPETDATADTSSFHETDLEENKDTGTIETEDGMVSSDYTSEKMDTETMETEAVPHDSSDANIKEHTEDDTSTPNAPHAGTEPVHELESVEVSADTTEHPGETHDSASDELTPTEENTAVTEPSFSTQEVQNLTSQEIKDSEDDKTDEFSDINSFPIPGEADQVPRSETTPDVQEVEELGLTEETRDIEAIEPGDQQEDIVSTLEKPEIDGEPSADNQQVHEDKLPEVEDNKAIEAEASKQSNIATPDNAAEERNELESDPDPYAQPAEQVELSKDNENSQLVKTEETSDQSNFVVLRRTTEDSVAREIDPPVAIKQEQPVEEIKGVDATEAEEDFRTTQAVAIEKLASVNKIATVEPTYDIQRMDDLEATEEKKHAEAINEGDQSNIAVSEEQTPTYNGETPEDHHVESNEGTMGNETDNIILAHGIKDEIQKSAELKDGPCDLSETVLTTRRSENMIDEDNVQTYGNDTVEASNSIHQVKEEPDAGTEHNSSQMISECSGENETHVQDRDVDMWILTEGVIAEASQALLENDPQAAQDTIEKDDTTKSSEPISDHDSRQHCDVEALQQQSCETEALSILEQDEALQKIDSDQKQKEVEEIESQNDELQVDEQKHEDKRDDLAKEPLVEYQNFENRASNNTKDNDAFKVEQTEAANSEILKNKALHISKESTPSIMAMKVENIKETSEGTEEDDAAKNDNKDEQENAENVDIVSKTSTNEQGQTTDEIRKEEDPVHIIQASEKEIADEIEESKEIHEDNAICHDKLQTNSEKEESPQPHSNEPYNVDAKIDDTTSLCEEIIHDNTSINPREIEEIGENKGPDFTSEPSVESSIQNNVEDSSSHHKVEDEKLSMSEKNDVDTEAMQEINDESGADINQTEQCQEEITADDVLQLETEGNSFDKIEETASNEETETSTAATEAVTFNEDITDKVSGADGAPSNGSLKTFTDTGRDIDVPLVITTSKEESVNDTMENLNLDLPGHQAQDGNTAEKVLSLEEREREMPSSEKLLQTEPGENQIPNEQDEKDIRDENQTLKEKDEDDMQDTEFGEAKKEVQQELPVSHFLMNLILGKESSDANEDSESEAARKQGEATEDDSCTFISEQEESLGSLPTENKVDDNPTFVEQEKHEVKCSEETQEMVEEQSDDQLHTERSIEIDEDIKKNTRALEIPAYQDNPQDGISGELQTEEAAGVSTKMVTRDIDISSVVLDNRTVGTVCQEKMEVSTKNENGSLRSSLNDSTNTMAPQDDTLGEGQSRLVLEPLPEDKSVDVVSEQAPLLTESGMTDANDLSSDTTSAQNPVSTKPTESARVEATYSTDIQLENEEVDKKEEDQHANTTKDEVSKEIVESSHINLQKITRPEEKSNELETQITEPVCDSQAILAHEKEISEENFPTAVEIQADGPNMQINQDKQDEAADIETEMKPEKLGESNFQEHQDNGTEQKSPKETDEGDQQLVAKKEILTQEMDVHETVERPQQAVESPQQTVSITSNEDQELFDSKVQERDLNVVSPREASEAEENFVDVTKPEFSTDEEQSPKADAEEKIYDEKIKDIEGTKNLTDEAAIKTEAPGAAQKTRKKYSLLSGVGSKVKHQLAKVKKAIVGKPGHTKPVSPTA

SEQ ID NO: 183212 - protein, 328 aa, Zea Mays
MAGAVSVSAHRRQWRYTKIMEMPSVDWVDVADNWVGGCCTSFGGAGEKLVSQFIRAYGRLEGTSLLDATSITVETDNLETDLVSQVACSALSRHFVAIKEDIFNVSVEKDHTTGKIKLKNSEEQANITATHAQPPIILEEGPSVSCSETNGVTQTNQPGISQTEADTDAYFEKSENDCCVEKVGKSKKEVDLLLVDPCRCCCVNGYSEKAEDNPSQLSLVNEKKQNMLEIKRDYKLTKTISLGSSFIVKASNLLNDFEWVELLCGQCSSPLGSYPSQCSLGPADGRLRLFKCYTSTEIPVTGPHDVFRYSTPIAKKSIPSLIHGHTLF

SEQ ID NO: 183213 - protein, 182 aa, Zea Mays
MDIAGLPSDILVEVTASIATRSPTPLSDVVSFRRSCKVFRDCTGGTRRGSCRCSGGARPAATPRRPTSLGWSCSATGRGEKPAGSAAPRSAATPPRPTWSRCSRCTTRTRRLAAPSGRCNAWTTARPPALDTAQGRLRPQRGRVVRAQADAASVEDGRASHALLESSVVRQGGGGRGQGRPS

SEQ ID NO: 183214 - protein, 401 aa, Zea Mays
MDPAGPRVATDPAGSGAAPPREELDRRGGACSGAAAAEGSASRLAGAGLGDPRAGILESSGQAEAYLHTCTMDVSQLTAEESMEKLHGSESLPCCKENIGTVRQPKPDPEHVDNRMSVARLGLDLNTVDSSDAAELNPFFPYKKLGQSKVSDPSECGSTTAATAESESHRKWREMKRNGFLSSSHGNAVVPRPRGRPPKRKKDDEFKRSTSTQHGQANKSVKVAAPSGLLSGLNPGIINHVRNSKQVYSIIKAMVHSERLENEKQPAFTSQTGGRGREASEGIQDEKYGAGFKKCHMLMKDNNAVFHQALPTTSQFLAQDGDRLKLQLSSAVTMSSDRACSTSADDPATNHDYMTVLSVKVVGITASGHQGTPCCFKAQQEESQKCSSYRIALPNLDRIFI

SEQ ID NO: 183215 - protein, 76 aa, Zea Mays
MYRHCNPTTLNDMSTHNNCTRHDMVQLKIAAGENGSILETTICTHHLGFKGGKKNTICTHRLHPLLPKAPCLASYL

SEQ ID NO: 183216 - protein, 296 aa, Zea Mays
MRYCDQLRQDLIPMTRNIYVALIVAYARLGNFDMAKQVLLDKEIPCKFLSDIKSALVGALALNGQVSDALRLHDEIMQSGGSLEPKAAIALIEHIRTEGELDRMHQLLDGLNDSNSWFDGCGRVLLYCVQHNYPDAAIDLLKQIREKDEMSTYMVVDQVFCQIWDMETTNLDFGMVFLDAVKELGLNVSRTSLDFLLSACVKAKDLRRAQQIWTEYESAGLPHNVLSSLRMYQAFLSSGGRKAAKKLLKKIQKEDAHVRYITYACRATYCSKDFKPSATVRLSSKGRARSKPTNEG

SEQ ID NO: 183217 - protein, 420 aa, Zea Mays
MWKRLLETTKQVVSSKQAIPYAAVTPKPATPAAAPSASKRGAPVAAPKLSTLKSPSYRRRAAAGPATTVTQASLLRLKQAAASKKTNLPSSPPLNDAHALDEDDPPEALTKALMFVIDAPEEVECTTSPEALPEGSEDVGEVARGNKILDFEWFQAEPSRDPLMLWRREVAREKKKHYIFKNVESHHYTNLMRICANKLGMESTIEFLGNLGRETGVKEFNSMIKVCLGKAKACRDIDSAVEYIYRAYHLFNTMKDKGFTIEKDIYDPFLLYLMDTGMFEEFEVFSAFFKEANPKSFSRIAYYEMLLCIRVQDEEKIQELCHSVEDYDEKVHYDLAESYMLAFAESGRKEDLVALLDLVDLSKVSGSKYITNIFKSLGKLELENYVEKLLERMMSKGCADHDISSLILEYTANIPNIMTC

SEQ ID NO: 183218 - protein, 460 aa, Zea Mays
MWKRLLETTKQVVSSKQAIPYAAVTPKPATPAAAPSASKRGAPVAAPKLSTLKSPSYRRRAAAGPATTVTQASLLRLKQAAASKKTNLPSSPPLNDAHALDEDDPPEALTKALMFVIDAPEEVECTTSPEALPEGSEDVGEVARGNKILDFEWFQAEPSRDPLMLWRREVAREKKKHYIFKNVESHHYTNLMRICANKLGMESTIEFLGNLGRETGVKEFNSMIKVCLGKAKACRDIDSAVEYIYRAYHLFNTMKDKGFTIEKDIYDPFLLYLMDTGMFEEFEVFSAFFKEANPKSFSRIAYYEMLLCIRVQDEEKIQELCHSVEDYDEKVHYDLAESYMLAFAESGRKEDLVALLDLVDLSKVSGSKYITNIFKSLGKLELENYVEKLLERMMSKGCADHDISSLILEYTANIPNIMVEDMLVAFHKWHEKFEVAPSIDAYDKIVSICCDSSKDRKTGD

SEQ ID NO: 183219 - protein, 395 aa, Zea Mays
MYHKNPDAAKRIHQEHEVLAKQKALILVGETLLLSTIRFDFNIHHPYEPLKLALKKLGIAETELRQSAMSLINDTLPSTLVIQFKPQYIAAASLWFAAKFHNVNLSQNGTIWWHVFDVAPDPLRVVVQQMSELFEKRAPCSVGPVTKPVPASSATDKHQIKPAPTHTPMDKHQIKQVPAPMNRHHIKPVPTPIPTPMDKQQNKLAPTPMDKQQNKLAPTPMDKQQNKPAAAPAPTDRCQRVSTPVPAPRDTQSSRRSFSSSSNTEAPRRVPAGRSSNEKPRDRSPRHEGHWCRGKDGENQHCQKHRDHNSEQRPEERSNQRALKSGLAYLVRSGGPKDTGAATEIRNLTRRKRRIQEVGGLPTPVYTSDTDAWRQVSAVVLFGTKGQKRPRGDEP

SEQ ID NO: 183220 - protein, 516 aa, Zea Mays
MGAARGEEDGEGRCGERCPSWYVSREEIESGSPSRRDGVSAAKEAELRATYCSFIRDVCIRLRLPQITMATAIMLCHRFYLRQSHAKNEWQTIATVCIFLGSKIEDTPCQLKHVVIVSYETMYHKNPDAAKRIHQEHEVLAKQKALILVGETLLLSTIRFDFNIHHPYEPLKLALKKLGIAETELRQSAMSLINDTLPSTLVIQFKPQYIAAASLWFAAKFHNVNLSQNGTIWWHVFDVAPDPLRVVVQQMSELFEKRAPCSVGPVTKPVPASSATDKHQIKPAPTHTPMDKHQIKQVPAPMNRHHIKPVPTPIPTPMDKQQNKLAPTPMDKQQNKLAPTPMDKQQNKPAAAPAPTDRCQRVSTPVPAPRDTQSSRRSFSSSSNTEAPRRVPAGRSSNEKPRDRSPRHEGHWCRGKDGENQHCQKHRDHNSEQRPEERSNQRALKSGLAYLVRSGGPKDTGAATEIRNLTRRKRRIQEVGGLPTPVYTSDTDAWRQVSAVVLFGTKGQKRPRGDEP

SEQ ID NO: 183221 - protein, 553 aa, Zea Mays
MSSEPPPASSAAAGEELAADLSAATLSKKQQKKDARKAEKAEQRQRQQQQQQQPADAEDPFAANYGEVPVEEIQSKAISGRSWSHVGDLDDSAAGRSVLIRGAAQAIRPVSKKMAFVVLRQSMSTVQCVLVASADAGVSTQMVRFATALSKESIVDVEGVVSLPKEPLKATTQQVEIQVRKIYCINRAIPTLPINLEDAARSEADFEKAELAGEKLVRVGQDTRLNYRAIDLRTPSNQAIFRIQCQVENKFRDFLLSKNFVGIHTPKLISGSSEGGAAVFKLLYNGQPACLAQSPQLYKQMAISGGFERVFEVGPVFRAENSNTHRHLCEFVGLDAEMEIKEHYFEVCDIIDGLFVSIFKHLSENCKKELESINRQYPFEPLKYLDKTLKLTYEEGIQMLKEAGTEIEPMGDLNTEAEKKLGRLVREKYDTDFFILYRYPLAVRPFYTMPCYDNPAYTNSFDVFIRGEEIISGAQRIHTPELLAKRATECGIDVSTISAYIESFSYGVPPHGGFGVGLERVVMLFCALNNIRKTSLFPRDPQRLVPVADVSAT

SEQ ID NO: 183222 - protein, 157 aa, Zea Mays
MFCTPTGVPTAVSSCLFCCCSALSASIFLNAVELILSPVDSSGTSSITSICKILINHMRRVLPATSPCCSKVRIRSAPLLKSRRREGAKQEHPRPDNDGLKALVNDGWAERVDDGLHTNIKVGLYELQMERAEFFFVKLERGSCIIRTTLFHLIYKF

SEQ ID NO: 183223 - protein, 100 aa, Zea Mays
MRRVLPATSPCCSKVRIRSAPLLKSRRREGAKQEHPRPDNDGLKALVNDGWAERVDDGLHTNIKVGLYELQMERAEFFFVKLERGSCIIRTTLFHLIYKF

SEQ ID NO: 183224 - protein, 553 aa, Zea Mays
MQAVALRGSEICRRPAPEACNDDGAAAQVAMSEVADILNQVGEAHKLPLAQAWTRCRRCSTDTEHASLTAAGAPFYLTGADPNPNLLGFHEACVEHHLRLRSGRGGLVEEAAAARRPLFCADVTKYSMDAYPLAHHARFCELSGCLAVCARLRRGGDESMDTDGGGGAGWDECVLEFFLPPDCRDGAAQKAAAGAVAATIMERSGGGGLKAVVISGLQDLVFDIAADGECVLRPDPVAMADDVPQLELNGHGGDEWDSDEEGLHLVVAMGTTTTDIEASKMHHDEHHGGEDPRSQVGKKAAKRKGEKTVSLEELQRYFSGSLKDAAKSLGVCPTTMKRICRQHGISRWPFRKLAKANRSLDKIKRVFESVQGSSQAMAAAPAPPPAAAAASYSQQAPAVAAAPRAPALSPCLSSAPRVASSQASCQAPPPPLKEAAWHKPLRGGDASVVTVKASYRGDIVRFRVPSSAGVATVKGEVAMRLGLAPGEFDVKYLDDDNEWVLLSCDADFQECLDVIPALSGASASSGSGTAQPVVRLMVHEVAEVHGSSCGSSD

SEQ ID NO: 183225 - protein, 1147 aa, Zea Mays
MQANKPPKVNWPHHENAVQGYSSRDDFLSSSFLFSLPTQRPNPEARERMLSLRSSACKIQGPERLQAPLIEKAWRSLCNTQAACKSYLRPGLSAKARDCDRGHARTYGEGSYNTNKMSTVPGNRILSMESTGQPSERVSLQNNSSHQTVGICSSMRSHQNNHVVQEDMRATNQYNFARTNAALHQSMAADNMCSYDKFDAMDDDILATIDVDQIVMEHYQATNAPRGSASHNMSTPPGNKCSVNGMDEANLPRELSELCNHQCKLAFCREAMTHLQEMKDELLAVANELLDDDGELNPQHSQELHKRRLHLKKLVQLLEDHMTRSAQDEERQISHSMASTTSTQQHLPPMTPGSTFTMDSNRFQSQVYVGNGPRDSDLCYSPAPYSCSDNLSTPLNSVWKSYTPKVIDINYTEGSGDRKWSSTNFPWTKELEAKNRNKFGNHSFRPNQREIINATMSGHDVFVLMPTGGGKSLTYQLPALISSGLTLVVCPLVSLIQDQIMHLSQANIPATYLSGNLDWSEQQEIMKDLMSCRYKLLYVTPEKIAKSGALSRLLDNLNSQGHLSRIVIDEAHCVSQWGHDFRPDYKSLGVLKQNFPKTPVLALTATATARVKEDVVQALALENCIVFKQSFNRANLRYYLRPKTKKCVEDIDLFIRTNHSKECGIIYCLSRMDCEKVAEKLRDCGHKVSHYHGSMDPMDRTHIQKLWSKDKINIICATVAFGMGINKPDVRFVIHHSLPKSIEGYHQECGRAGRDGQPSSCVLYYQYSDYIRVRHMITQGVTEQTGAPRDLSSHEQALKTHKDNLLRMVSYCENDVDCRRLLQLIHFGEKFDPSLCARTCDNCLKESGWVEKDVTNIARQLVELVTRTGHSHSSTYILEVYRGSMSQNVKKQRHDALALHGAGRHLAKGEAARIMRHLVTEEILNEDVKKSDMFPASDKASKMRNLDASLLPQTNKNVQQQSEVDVKLASMLYEALLSLREQIMEECNEGFNAYHIFKTDTLKEMSIRVPRTKEELLDINGLGKTKVKKYGDRLLATIEDFLSKHPNPRRNSGGGGGGNEHSDAAKKRRGSTAISAASYGDYDFDERTGQQSKKRAAKTRTVSAHGPRCTDADLDGPEVVEVDGELRSVRKPVAYGNGRVLPKWAPL

SEQ ID NO: 183226 - protein, 1137 aa, Zea Mays
MQANKPPKVNWPHHENAVQGYSSRDDFLSSSFLFSLPTQRPNPEARERMLSLRSSACKIQGPERLQAPLIEKAWRSLCNTQAACKSYLRPGLSAKARDCDRGHARTYGEGSYNTNKMSTVPGNRILSMESTGQPSERVSLQNNSSHQTVGICSSMRSHQNNHVVQEDMRATNQYNFARTNAALHQSMAADNMCSYDKFDAMDDDILATIDVDQIVMEHYQATNAPRGSASHNMSTPPGNKCSVNGMDEANLPRELSELCNHQCKLAFCREAMTHLQEMKDELLAVANELLDDDGELNPQHSQELHKRRLHLKKLVQLLEDHMTRSAQDEERQISHSMASTTSTQQHLPPMTPGSTFTMDSNRFQSQVYVGNGPRDSDLCYSPAPYSCSDNLSTPLNSVWKSYTPKVIDINYTEGSGDRKWSSTNFPWTKELEAKNRNKFGNHSFRPNQREIINATMSGHDVFVLMPTGGGKSLTYQLPALISSGLTLVVCPLVSLIQDQIMHLSQANIPATYLSGNLDWSEQQEIMKDLMSCRYKLLYVTPEKIAKSGALSRLLDNLNSQGHLSRIVIDEAHCVSQWGHDFRPDYKSLGVLKQNFPKTPVLALTATATARVKEDVVQALALENCIVFKQSFNRANLRYYLRPKTKKCVEDIDLFIRTNHSKECGIIYCLSRMDCEKVAEKLRDCGHKVSHYHGSMDPMDRTHIQKLWSKDKINIICATVAFGMGINKPDVRFVIHHSLPKSIEGYHQECGRAGRDGQPSSCVLYYQYSDYVSYCENDVDCRRLLQLIHFGEKFDPSLCARTCDNCLKESGWVEKDVTNIARQLVELVTRTGHSHSSTYILEVYRGSMSQNVKKQRHDALALHGAGRHLAKGEAARIMRHLVTEEILNEDVKKSDMYGSISSVLKVNHLKASGLLSGKHNIVLKFPASDKASKMRNLDASLLPQTNKNVQQQSEVDVKLASMLYEALLSLREQIMEECNEGFNAYHIFKTDTLKEMSIRVPRTKEELLDINGLGKTKVKKYGDRLLATIEDFLSKHPNPRRNSGGGGGGNEHSDAAKKRRGSTAISAASYGDYDFDERTGQQSKKRAAKTRTVSAHGPRCTDADLDGPEVVEVDGELRSVRKPVAYGNGRVLPKWAPL

SEQ ID NO: 183227 - protein, 265 aa, Zea Mays
MSKPKKVKVLTHRPKRFETAEVPGPIEGSSSISEPSRSAIAEARTESAEELELKMSSEQPKALSPLRETELSRASKIPTSTPKRRRMASLLDVVMESVKVQTPASAPDSGSEALKKSGEDDIAQVTSETGPSGAAEACPLGLLLYPWKKESVSEKIKSPSPEESTKEMEFIVRHASGKQLSKEHIAKARQYARDLKYPQGSLIYNDTDEDDFLYCLSDNKEISVCREMMKNIGFPKLELGLSTMSKDDLADSLAYNSLKVYILLL

SEQ ID NO: 183228 - protein, 68 aa, Zea Mays
MIIASKAIHLTGFRFPFMDSETKSLTLGEVKQLHDLYKRVVTRYTLLSKALRKLSIDEDQLLNSVHDP

SEQ ID NO: 183229 - protein, 64 aa, Zea Mays
MPNAASPSSASTALPGPTRASSWRSVLSCSHMHLLQRSSRPIKISRLWLTFVIIDEWVVTSICR

SEQ ID NO: 183230 - protein, 418 aa, Zea Mays
MSRQSMVAVEQLTGPASARPAHTCAAQPHAHQLLSARYDHRGACASQVELPDRISPSNASTFCTSMYSSSSSSSAAADSSKSCRRAGALPFLPHPPKREQQQQQQSSSSPSLLVCTDLGNGGQDEAEAEHPAELKDFLNLSGEASWRGGFHGESSGVAFRFGEQVEFQFLSEQLGIAITDHDESPRLDDIYDRPPQTSSCPVLSCSDQEEGLQRAGSPVKAQPSSSRAASCNNKPRLRWTLELHELFVKAVNKLGGPEKATPKGVLRLMKVEGLTIYHVKSHLQKYRFAKYLPETKEDMKSSSEDKISKSEMPGSNAGRKKILRSLQVAEALRMQMEVQKQLHEQLEVQRQLQVRIEEHAKYLHKILEQQKARNSLSATTSSIETELSESTKEEKPETQADTSSAQLPNKKNSDTDME

SEQ ID NO: 183231 - protein, 628 aa, Zea Mays
MPLGQRSGDKSDSRYCGVEVLDFPAGEGLPAVLNHSLASAFDFILAPLVDPNYRPAPGAVLPVSASDLVLGPSQWSNHVVGKISEWIDLDAEDERLRLDSELTLKQEIAWASHVSLQACVIPAPRRSFCGNYARVVNQILQGLTNMNLWLRLPLEKSEPMDGDLDKIKNNNHTSEIADSWELWNSFRLLCDHSSQLCVALDISGTLPSMNSLGRWFGEPVRAAILQTNAFLTNARGYPCLSKRHQRLLTGLFNHSVQAIISGRSNHNVFPASEGVLSGDEGNAEDSYVRHALAPYLEYIAYLYQKMDPLPEQERFEINYRDFLQSPLQPLMDNLEAQTYETFEKDVVKYTQVLMVVGAGRGPLVRASLQAAEETGRKLKVYAVEKNPNAVITLHSLIKLEGWESLVTVISSDMRCWDAPEKADILVSELLGSFGDNELSPECLDGAQRFLKPDGISIPSSYTSFIQPITASKLHDDIKAHKDIAHFETAYVVKLHRIATLAPPQQVFTFTHPNFSPNASNQRYTKLQFEMLPDMGSCLVHGFAGYFDSVLYKDVHLGIEPNTATPNMFSWFPIFFPLRKPIYVPEGSPIEVHFWRCCAPTKVWYEWAVTTPTPSPIHNSNGRSYWVGL

SEQ ID NO: 183232 - protein, 60 aa, Zea Mays
MLSRRMTLISYLLISPATREKRGEIDGCNLLHNVANFRTSHGCHSAIYFAIRQIWEPTLI

SEQ ID NO: 183233 - protein, 508 aa, Zea Mays
MWCHCRMVYLPMCYIYGKRFVGRITPLLLELRKELFKDPYSKIDWDKARNLCAKEDLYYPHPFVQDVLWATLHKFVEPVMMHWPGSKLREKALETVMQHVHYEDENTRYICIGPVNKVLNMLACWIEDPNSEAFKLHIPRVYDYLWLAEDGMKMQGYNGSQLWDTAFTVQAIVATNLIEEFGPTLKLAHNYIKNSQVLDDCPGDLNDWYRHTSKGAWPFSTADHGWPISDCTAEGLKASLLLSRISPKIVGEPMEANRFYDAVSCLMSYMNDNGGFATYELTRSYPWLELINPAETFGDIVIDYPYVECTSAAIQALTSFKKLYPGHRRKEVDNCISKASNFIESIQKSDGSWYGSWAVCFTYGTWFGVKGLIAAGRTFENSPAIRKACDFLLSKELPSGGWGESYLSSQDQVYTNLKGNRPHAVNTSWAMLALIDAGQAERDPTPLHRAAKVLINLQSEDGEFPQQEIIGVFNKNCMISYSQYRNIFPIWALGEYRCRVLGAGKPWR

SEQ ID NO: 183234 - protein, 515 aa, Zea Mays
MWRLRIAEGGGDPWLRTKNAHVGRQVWEFDAAADPDPAVDAARRAFVATRGHLKHSADLLMRIQFAKENSIELHLPGIKLGEHEDVTEEAVLTTLKRAISRFSTLQAHDGHWPGDYGGPMFLMPGLIITLYVTGALNTVLSLEHQKEIRRYLYNHQNEDGGWGLHIEGPSTMFGSALTYVILRLLGEGPDSGDGAMEKGRNWILDHGGATYITSWGKFWLSVLGVFEWSGNNPVPPEVWLLPYLLPFHPGRMWCHCRMVYLPMCYIYGKRFVGRITPLLLELRKELFKDPYSKIDWDKARNLCAKEDLYYPHPFVQDVLWATLHKFVEPVMMHWPGSKLREKALETVMQHVHYEDENTRYICIGPVNKVLNMLACWIEDPNSEAFKLHIPRVYDYLWLAEDGMKMQGYNGSQLWDTAFTVQAIVATNLIEEFGPTLKLAHNYIKNSQVLDDCPGDLNDWYRHTSKGAWPFSTADHGWPISDCTAEGLKHSEEERDLWVLAGAKNLDLLTAPIPGL

SEQ ID NO: 183235 - protein, 344 aa, Zea Mays
MFGSALTYVILRLLGEGPDSGDGAMEKGRNWILDHGGATYITSWGKFWLSVLGVFEWSGNNPVPPEVWLLPYLLPFHPGRMWCHCRMVYLPMCYIYGKRFVGRITPLLLELRKELFKDPYSKIDWDKARNLCAKEDLYYPHPFVQDVLWATLHKFVEPVMMHWPGSKLREKALETVMQHVHYEDENTRYICIGPVNKVLNMLACWIEDPNSEAFKLHIPRVYDYLWLAEDGMKMQGYNGSQLWDTAFTVQAIVATNLIEEFGPTLKLAHNYIKNSQVLDDCPGDLNDWYRHTSKGAWPFSTADHGWPISDCTAEGLKHSEEERDLWVLAGAKNLDLLTAPIPGL

SEQ ID NO: 183236 - protein, 140 aa, Zea Mays
MPRCHATSTTDPPWPLHALAGERPRPPGPVSSFPLLLVHGRTVGRRYPAPLAASPTPSHGRRHRRGPSPGQQLTCLNAPCGCRGGRERKINRTRHAWVQEGKRHASRNAREPHVACRIPLLLACDQGKQSSKDPRWMQNP

SEQ ID NO: 183237 - protein, 774 aa, Zea Mays
MWEIEPIAAPFFICPQPFFGVKRPRQIDDESSEMENLFKRAMPWLGEEICIKDAQTHNTTMPGLSLVQWMNMNRPQSSTLNTGIQSEYLRSLSNPAMQNLGAAELARQLYVQNHLLQQNSVQLNASKLPQQVQPINELAKGSLSCNQLDVIINQQELKQEVGNQQRQQQPVNQAIPLSQAQTNLVQAQVIIQNQMQQQQQQQQQSPTRCQKGTSVQQLLLSQQQQDQNFQLQQQQQLLLQQLQQQNQQQQQQQQNQQQLNKLPAQLVNLAGQQAQLSDQELQLQLLQKLQQQSLVSQPTVTLSPLQVIQEQQKLLLDMQQLSSSHSLAQQRILPQQDSDVSLQASQAPPPMKQEQQKPSQKQFVLADVSDVVYPQISSTNVLSKAGTQLMTPGATQSVLTEEIPSCSTSPSTATGNHLAYPIIGRNEHCKVTIEKVPQSSSLMSIPTAGEAVTTPIMAKELSKLNHNLKENVTTSKSPIVGTGHENLLNIVPSTDNLETASSATSLWPTQTDGLLHQGFPTNFNQQQMFKDALPDVEIQEVDPTNNAFFGINSDGPLGFPMETEGLLVSAINPVKCQPNLSTDVEINYRIQKDAQQEISTSMVSQSFGQSDIAFNSIDSAINDGVMLNRNSCPPAPPQRMRTFTKVYKRGAVGRSIDIGRFSGYEELKHAVARMFGIEGQLEDRQRIGWKLVYTDHEDDVLLLGDDPWEEFVNCVKCIRILSPQEVQQMSLDGDLGNNVLSNQACSSSDGGNAWKPRRDQNPGNPSIGFYDQFE

SEQ ID NO: 183238 - protein, 831 aa, Zea Mays
MRFRMMFETEELGMRRYMGTITGITDLDPVRWKNSQWRNLQVGWDESAAGERRNRVSMWEIEPIAAPFFICPQPFFGVKRPRQIDDESSEMENLFKRAMPWLGEEICIKDAQTHNTTMPGLSLVQWMNMNRPQSSTLNTGIQSEYLRSLSNPAMQNLGAAELARQLYVQNHLLQQNSVQLNASKLPQQVQPINELAKGSLSCNQLDVIINQQELKQEVGNQQRQQQPVNQAIPLSQAQTNLVQAQVIIQNQMQQQQQQQQQSPTRCQKGTSVQQLLLSQQQQDQNFQLQQQQQLLLQQLQQQNQQQQQQQQNQQQLNKLPAQLVNLAGQQAQLSDQELQLQLLQKLQQQSLVSQPTVTLSPLQVIQEQQKLLLDMQQLSSSHSLAQQRILPQQDSDVSLQASQAPPPMKQEQQKPSQKQFVLADVSDVVYPQISSTNVLSKAGTQLMTPGATQSVLTEEIPSCSTSPSTATGNHLAYPIIGRNEHCKVTIEKVPQSSSLMSIPTAGEAVTTPIMAKELSKLNHNLKENVTTSKSPIVGTGHENLLNIVPSTDNLETASSATSLWPTQTDGLLHQGFPTNFNQQQMFKDALPDVEIQEVDPTNNAFFGINSDGPLGFPMETEGLLVSAINPVKCQPNLSTDVEINYRIQKDAQQEISTSMVSQSFGQSDIAFNSIDSAINDGVMLNRNSCPPAPPQRMRTFTKVYKRGAVGRSIDIGRFSGYEELKHAVARMFGIEGQLEDRQRIGWKLVYTDHEDDVLLLGDDPWEEFVNCVKCIRILSPQEVQQMSLDGDLGNNVLSNQACSSSDGGNAWKPRRDQNPGNPSIGFYDQFE

SEQ ID NO: 183239 - protein, 71 aa, Zea Mays
MTYTSLWPNGKVYCKVRKAPYIAALFLVFFTVEFDNLHAHTRPRILEELCSSIHAVEVGIMINTIVIRTYV

SEQ ID NO: 183240 - protein, 105 aa, Zea Mays
MSESLACDDKGQCNAVIVSKRESSHSSVSELQMACKLRYSGGTLQGCYYTVVVNEKSLMETTCLVCPYYIKSWLSCMSDRLQIRMHVATEQIAERPRPPSQPSWG

SEQ ID NO: 183241 - protein, 233 aa, Zea Mays
MICQLLRGLKYLHSAEILHRDLKPGNLLVNANCDLKICDFGLARTNSSKGQFMTEYVVTRWYRAPELLLCCDNYGTSIDVWSVGCIFAELLGRKPIFPGTECLNQLKLIVNVLGTMSEADLEFIDNPKARRYIKSLPYTPGVPLVSMYPHAHPLAIDLLQKMLIFDPTKRISVTEALEHPYMSPLYDPSANPPAQVPIDLDIDENISSEMIREMMWQEMLHYHPEVATAISMS

SEQ ID NO: 183242 - protein, 147 aa, Zea Mays
MEVASGDEDLESLLQNFHRVSQGYKDALMQVQVLRVNCSTEFKRREALESHITDLKKDNERLRRQYTETLFKVTNQVKFRAEAQSLKEELDKANSRLLSMEEEHKRETEQLKHSSEMNINALENKLSYRLSLQSATPLYSKQEMKLQ

SEQ ID NO: 183243 - protein, 2677 aa, Zea Mays
MDHRGGGGGGGNKNRTDLLAAGRKKLQQFRKKKGKRGPGNKADADADAEAGEGAPKAAEESVPEPKSPVGLKLLAGEGGGGSTPFEEAERSQAEQCNGEGPGTAESSSVESSNAVQEQETVQEQETDDVSDAHHVGPSEQGISEHPESQTAGGRDLSLQATSGDSIGDDNVGRAQLGDVDSMELNASSEGNGADGDCNQLGEHQQVEMDAVERPTSSSFEEFTELPIHSQGIEADNIHGEGAQEMVMDVSGRPLDGDIQHDIEPTASAEIDAETALEESTVAASIVIPESTARGTEYERDTGYETDGVDKEALLEDPSMVHVSDEAVTIDDLSVQAKPTASADMPLCEQKGDPALSRSAVLQGIMPLHFEDIQNHMFSATLSRDFLQLQLDEAAGLYSDFTQQSSDNTTQLRVLLKETEESKLAVDRELHQCRHELSKVNIEKGQLELTMASLKEEINTSNTRCTYLESELHSSKESTEQIHSELANSRLLLEALQKENMELTASLAFEKEAKKEVEEQRDHLSSDNRKLLSELSGLELSLASVKEEMDASSSRCNVFECELRSSNENMNHTLTELANCQALLETLQKDNLELSANSASEREAKMKLQEDNLYLCNEKGKLSSNLRELNDKLEVSYAKHKQLESHVKDTETYFGQLTEQLIEENLYTSISIDIYQSTTKDLDTKYNIVLGQFQNIMRQELHLDSSEVTTENAERAIMTPRHDSHGNNQCLLNLVNANDSCNSTALLSLKGHLEVAKSDLHNLEKLLERISSRSDGRVLVSKLIKSFESKGSDDDTGLSEGEHDNLQKSTREMLSCLGEKFIAMSSDITKTEEYLAELCNKIELYVKSTVQHDRDRQCTVVLEAKMDELAGKLSNYKETIDNLHNQVAIVQQDANSNAGKLIDQAELLQKDAVERISILENERMSLSDLLSEVTNKLTSLGDAVFPSGSSEIEGLNFCTLSCVDLVARSFQSLQEKLEAAQIDNAQLNSSLVELRKAIGVAQERSEHADGIVKKLYDSLQELLCDSLGSSNEFGARYSVEEPIESQYGRLIAHLKNLLHDHHSALSTNAELELSLLSKCEEVEELNMRCSSLLKKLDEVCILNEELKSASSSKNVTLDKLHSRCLTVAEMLASCSANHSSTVQLISDIGEGSSKEDHILTTLLPCIEADVASCIEKFENAAEEIRLSKICLQEISIFDQISFEKWSYPLPTLIKEEVLPKICDLQDRFDQLNALNIQLETEVAVLKDGMKELDEDLGTSRSELQKKVSELEQLDQKFSSVKEKLSIAVAKGKGLIVQRDSLKQSLLEKSGEIEKLTQELQLKETLLKELEAKLKSYTEADRIEALESELSYIRNSATALRDSFLLKDSVLQRIEEVLEELDLPEQFHSRDIVEKIELLSKMAIGTPFTLPDGDKGSSVDGHSESGVAMNVIDDEQNSNSNSVSDEVKSKYEELNRRFCELAEQNNMLEQSLVERNSLIQKWEEVLGQISIPPQFRMLEAEDKLAWLGNRFLEVEQERDSLQLKIEHLEDSSEMLIADLEESHKRISELSAEVVAIKAEKDFFSQSLEKLRFEFLGLSEKVVQDEFVRDKLRMDLSELRDKFAEKTEESRHYHEMDTEVHKLLNLVQNTLQDSTNSEISSGGISAVLCLGKMLKKLLDDYGTLLYKSTEGNFAERDIQLEDIKPSKDASKSDTGAYEKEMELNSLNNELDHAHNNLALAQQECDEAVEKAQSLMMEIETLHAQISKLQESDAEQMQKKEMELNSLNNELDHARNNLALVEQERDEAVEKAQSLMMEIETLHAQISKLQESDAEQMQKYQSLVLELESVGKQRDNLQERLNQEEQKCASLREKLNVAVRKGKGLVQHRDSLKQTMEEMNVVIEKLKSERKQHIESLETEKSSLMDRLAENEKSLHETNQYLSGLLNALNRVDVAREFDMDPITKVEKMAKFFLDLQSTVASSQNEVMKSKRATELLLAELNEAHERADNLQEELVKAEAALSESSKQYIVTESARADAVRQLELIMHAQSQTRRRQADHLLELNSTSSQLREVCFELSHCLVNTFSKDVDLICYVVNFMRSSGKLMDDTNTMDIPIASKHVLSNRTNNKKAHIPNAPLEIKTDDTDDSQFLHHLAIACHALSDCVKDCNDLKRNIDEHDFSVEQKATELFDVMSTLKNRFTSQHNELESLRAKFVELQSEMEERDKEIIFAQRNMSLLYEACASSVAEIEGISDIYPGKHSYAVEHSADECIKSIVEQLVMAVKTSQNSNEGSTKELKAIVLELQQELQAKDVQISTISSDLSYQLRVAESSAKQFSVDLEDARMELQNLEKQVDVLQNQKKDLETQLNELKNMESMASEQHGRIEKLTDELSRKDQEIEGLVQALDEEEKELEILENKSLQLEQMLQEKEFALKTSEVSRTKALAKLATTVDKFDELHSLSENLLAEVENLQLQLQERDSEISFLRKEVTKSTNELLTTEESNKNYSSQLNGFMKWLERELLQFGFHSESANDYDYTQFPVYMDMLDKKIGSLIAESDDLRVTVQSKDSLLQVERAKIEELMRKSDGLEASLSQKDSQIGLLRRDRASNQQSRSINLPGTSEIEQMNDKVSPAAVVTQIRGARKVINDQVAIDVEMEKDKPFDDEDDDKGDRLLMRQPTLRLGVLIYWIALHALLASFI

SEQ ID NO: 183244 - protein, 631 aa, Zea Mays
MKLSAAVLFFSILLQYCTSSGQPDSRGFISIDCGIPENSTYQDLTSTILYVSDRGFVTSGENRNISAGYISPSLAQRYYTVRAFASGVRNCYTLPSLVAGNKYLVRAAFYYADYDGLSTPPVFDLYLGASLWHEVRFRDAAAINWMDVVAVAPTDFLQVCLVNKGTGTPFISGLDLRPLRSTLYPEANASQSLVMVNANRCNVGPTDKSVVRPTKAHFSGPTSRYPLDPHDRIWLAYGAVPAWTEASATSVVRNYLADPYDAPSAVMQSAATPSDGSVLSFSWDTSDDRSVDASSATYLLVLYFAELQRVSASGELRRQFDIAVDGTAWNREPYSPPYLFADSFSGTVQGQARHSVSLTATRNATLPPLLNAMEVYLVRPVDEAATDPGDAKAMIAIQEAYVVSKNWMGDPCAPKAFAWEGLDCTTDPPTGTPRITAFLLFPELGHEIKLTNSTTETFELFLTRTVTYTRDLSHNNLSGSIPDCLGQLPFLVFLDLSSNDLRGPVPYTLLQKSHNGTLSLRLSNNPNLSGNGSGPKKLNGAALLSAIIIPTVAATALSVTFIALLLRALKEQARRRAVDPTPRDETALLENREFSYRELKHITKNFSLEIGRGSTSDEGTPQEPGILDWLL

SEQ ID NO: 183245 - protein, 907 aa, Zea Mays
MKLSAAVLFFSILLQYCTSSGQPDSRGFISIDCGIPENSTYQDLTSTILYVSDRGFVTSGENRNISAGYISPSLAQRYYTVRAFASGVRNCYTLPSLVAGNKYLVRAAFYYADYDGLSTPPVFDLYLGASLWHEVRFRDAAAINWMDVVAVAPTDFLQVCLVNKGTGTPFISGLDLRPLRSTLYPEANASQSLVMVNANRCNVGPTDKSVVRPTKAHFSGPTSRYPLDPHDRIWLAYGAVPAWTEASATSVVRNYLADPYDAPSAVMQSAATPSDGSVLSFSWDTSDDRSVDASSATYLLVLYFAELQRVSASGELRRQFDIAVDGTAWNREPYSPPYLFADSFSGTVQGQARHSVSLTATRNATLPPLLNAMEVYLVRPVDEAATDPGDAKAMIAIQEAYVVSKNWMGDPCAPKAFAWEGLDCTTDPPTGTPRITALNLSSSGLTGPITTYFGDLKALQYLDLSHNNLSGSIPDCLGQLPFLVFLDLSSNDLRGPVPYTLLQKSHNGTLSLRLSNNPNLSGNGSGPKKLNGAALLSAIIIPTVAATALSVTFIALLLRALKEQARRRAVDPTPRDETALLENREFSYRELKHITKNFSLEIGRGGFGAVFLGYLGNGNPVAVKIRSESSSQGGKEFLAEAQHLTRVHHKNLVSLIGYCKDKDHFALVYEYMPEGNLQDHLRLRDTCTHRPLTWQQRLQIALDAAQGLEYLHVACKPALIHRDVKSRNILLTTGLGAKIADFGLTKAFSDSETHITTEPAGTMGYLDPEYVSGQSPVVPVDDSVSVHVGEWVQQSLDRGGGVESVVDPSMGRCERGDYDVNSVWKVADLALRCRREASRERPTMTDVVAQIRESVELEAARRSSASGAAAAGGGGGLRSCAGERDAFEVVEGSVGETAGAAPGPAMI

SEQ ID NO: 183246 - protein, 432 aa, Zea Mays
MLWNHCSRVYLLLVQKFSVRGPCMMRPNFVKFEAITQTSVMVFLDLVDCPMLAQEATSFNIWHRVAVTESYPSNPTGIILAPLKKLLVTWLAPATSYIFKVVAFKNSIELGSWEIRMKTSWQKDDPRGSMPGGTGLGQNSESPKANSDGQSDPSSEGVDSNNNTAVYADLNKSPESDFEYCENPEILDSNKASHHPSERINDLQNIQMAADGVTEVTELEEAPGLSASALDEEPNACVQTVLLRDSNPLEHNQRTVVPRSHDTSNILAGHELVIVGPRYSGSVPPTAPRSVENSKDNGGRASKPKPCDIVVQNGSSKPEREPGNSSNKRATDKMDDFGHKDSFSEVSYEYCVRVVRWLECEGYIETNFRMKFLTWFSLRATLQERKIVSVYVDTLIEDPVSLSGQLVDSFSERIYSKKRPSMPSGFCMDLWH

SEQ ID NO: 183247 - protein, 260 aa, Zea Mays
MMLSDPKDCTLCKGREIIIGEHVTNMMQIFSLKLAKIDVDGGPIELYGYIATRDVLEPLLNYIVNVSRNDPITIEQGSLIEMTGPKRGIELCGEIMLEFDMRIKRGGEEKDDPQLIDGVAIVLDEMSMPRSTYAFTKRIHGDCGAVDITVSRLDFAVEATIQLHVSEVEGSFSLRAGCFTSGLCEEIQIFKGTISEPRALRRCVVAAVHDTWMDVKLKVDDSGHSYSSDDNPEHWCSFKTTSHGWTCQQVTVHCKVAADI

SEQ ID NO: 183248 - protein, 121 aa, Zea Mays
MLSLLRLRSSVAPTLSSAQYAASAHLPAVLWRSLPPALAWRAPPSYPPARRVFRFRIGSRSSMATTTITTSGIKGDDGTSSLAKACNDEQDGRTAAVHGDKHTRKKIGHDIFLRCGDGPSR

SEQ ID NO: 183249 - protein, 1125 aa, Zea Mays
MEKYSVQFDDLFKIAWEEDTANKLLKDGVVQQSAEGEGINEIGEQKVDALQDEFESITTLDDEKQEVDVIRNVPETQTDLDQMLSSEVQDTGREPGASGDKKPTQDGMVWALVGGDEDIVTNFSKLVPDMAIEFPFELDKFQKEAIYYLEKGESVFVAAHTSAGKTVVAEYAFALATKHCTRSVYTAPIKTISNQKYRDFSGKFDVGLLTGDVSIRPEATCLIMTTEILRSMLYRGADIIRDIEWVIFDEVHYVNDAERGVVWEEVIIMLPKHINIVLLSATVPNTVEFADWIGRTKQKKIRVTSTNKRPVPLEHCLFYSGEVYKICERDMFLAQGFKEAKDAFKKKNLNKFGVKPGSKSGTPAVRAGTQGKNPDTSNKGRDQKYPKHRNSNSGVATVQQSSSGPKRFESLFWMPLVNNLLKKSLVPVVIFCFSKNRCDKSADSMFGTDLTSSSEKSEIRVFCDKAFSRLKGSDRNLPQVVGIQSLLRRGIGVHHAGLLPIVKEVVEMLFCRGVIKVLFSTETFAMGVNAPARTVVFDSLRKFDGKEHRKLLPGEYIQMAGRAGRRGLDNIGTVIIMCRDEIPEESDLKNLIVGKPTRLESQFRLTYTMILHLLRVEELKVEDMLKRSFAEFHAQKNLPEKEKLLLQMLRQPTRTIECIKGEPSIEEYYEMTLDAEAHREYITEAIMQLPNSQQFLTPGRLVVVKSDSDDDHLLGVILKNPSALLKKYVVLVLTGDCSSSALAPEFNKNEKGPVDFQGGQFIVLKGKRGMDDEYFSSVSSRKASGVININLPYKGDASGMGFEVRAIENKEIISICSSKIKIDQVRLLEEPNKTAYSRTVQQLIKEQPDGTKYPPALDAIKDLKMKDMYLVESYRAYHILLQKMSENKCHGCIKLKEHISLMREQKMYKDQLNELKFQMSDEALQQMPEFQGRIDVLKVIHYIDSDLVVQLKGRVACEMNSGEELISTECLFENQLDDLEPEEAVAIMSAFVFQQRNASEPSLTPKLAEAKKRLYDTAIKLGKLQSEFKVPVDPEEYARDNLKFGLVEVVYEWAKGTPFADICELTDVSEGIIVRTIVRLDETCREFRNAASIMGNSALFKKMEVASNAIKRDIVFAASLYVTGI

SEQ ID NO: 183250 - protein, 1316 aa, Zea Mays
MSMDGPATSPASEVPFRISFSGHSGHLRLDPTPHTPSPIPDFVLPPAYPAESPSSVKEYLERNYLDPELHLPTAADSGRVWDVDWFALARPPLEPSAPRTMLAPVWVPPFRRGQEKLQSAAESRVWDPESVQMEMVDVFDSGTGGIAPRMPGPAKDFVRGSINNRPFRPGGLQDDAAEAAALEKAFPEGARTGDWVRELMSGGPAQVAPPGFRKGLELGQLKGYESHWKCFRDGELVEEQPASSSNDTMEKYSVQFDDLFKIAWEEDTANKLLKDGVVQQSAEEIGEQKVDALQDEFESITTLDDEKQEVDVIRNVPETQTDLDQMLSSEVQDTGREPGASGDKKPTQDGMVWALVGGDEDIVTNFSKLVPDMAIEFPFELDKFQKEAIYYLEKGESVFVAAHTSAGKTVVAEYAFALATKHCTRSVYTAPIKTISNQKYRDFSGKFDVGLLTGDVSIRPEATCLIMTTEILRSMLYRGADIIRDIEWVIFDEVHYVNDAERGVVWEEVIIMLPKHINIVLLSATVPNTVEFADWIGRTKQKKIRVTSTNKRPVPLEHCLFYSGEVYKICERDMFLAQGFKEAKDAFKKKNLNKFGVKPGSKSGTPAVRAGTQGKNPDTSNKGRDQKYPKHRNSNSGVATVQQSSSGPKRFESLFWMPLVNNLLKKSLVPVVGIQSLLRRGIGVHHAGLLPIVKEVVEMLFCRGVIKVLFSTETFAMGVNAPARTVVFDSLRKFDGKEHRKLLPGEYIQMAGRAGRRGLDNIGTVIIMCRDEIPEESDLKNLIVGKPTRLESQFRLTYTMILHLLRVEELKVEDMLKRSFAEFHAQKNLPEKEKLLLQMLRQPTRTIECIKGEPSIEEYYEMTLDAEAHREYITEAIMQLPNSQQFLTPGRLVVVKSDSDDDHLLGVILKNPSALLKKYVVLVLTGDCSSSALAPEFNKNEKGPVDFQGGQFIVLKGKRGMDDEYFSSVSSRKASGVININLPYKGDASGMGFEVRAIENKEIISICSSKIKIDQVRLLEEPNKTAYSRTVQQLIKEQPDGTKYPPALDAIKDLKMKDMYLVESYRAYHILLQKMSENKCHGCIKLKEHISLMREQKMYKDQLNELKFQMSDEALQQMPEFQGRIDVLKVIHYIDSDLVVQLKGRVACEMNSGEELISTECLFENQLDDLEPEEAVAIMSAFVFQQRNASEPSLTPKLAEAKKRLYDTAIKLGKLQSEFKVPVDPEEYARDNLKFGLVEVVYEWAKGTPFADICELTDVSEGIIVRTIVRLDETCREFRNAASIMGNSALFKKMEVASNAIKRDIVFAASLYVTGI

SEQ ID NO: 183251 - protein, 421 aa, Zea Mays
MDERRTILMDRYEIGRQLGQGNFAKLFEVMASKSKIYFVLEYAKGGELFNKVSKAKLSEDAARRYFHQLVNAVDYCHSRGVYHRDLKPENLLLDENENLRVSDFGLSALSESRRHDGLLHTTCGTPAYVAPEVLGRRGYDGTKADIWSCGVILFVLVAGYLPFHDPNLIEMYRKISRAEYRCPRSFSGELKDLLFRMLDPDPSTRISISRIKRSTWYRKPIEANAAKIKHGTARDTTVRDGEAATASSSIECSNRPEEDQGSSSLPNLNAFDIISLSTGFDLSNLFEERHGRREERFTTRQPVGAVFGRLKELAERLKLKIQKKESGVLKLAAQKEGMKGFLELDAEVFELAPSFLLVELKKASGDTIEYQRLVREEVRPALKDMVWAWQSDRHQQQQQRCEQSVQGEDQQQPLSSLPTQQ

SEQ ID NO: 183252 - protein, 366 aa, Zea Mays
MQIFVKTLTGKTITLEVESSDTIDNVKAKIQDKEGIPPDQQRLIFAGKQLEDGRTLADYNIQKESTLHLVLRLRGGMQIFVKTLTGKTITLEVESSDTIDNVKTITLEVESSDTIDNVKAKIQDKEGIPPDQQRLIFAGKQLEDGRTLADYNIQKESTLHLVLRLRGGMQIFVKTLTGKTITLEVESSDTIDNVKAKIQKESTLHLVLRLRGGMQIFVKTLTGKTITLEVESSDTIDNVKAKIQDKEGIPPDQQRLIFAGKQLEDGRTLADYNIQKESTLHLVLRLRGGMQIFVKTLTGKTITLEVESSDTIDNVKAKIQDKEGIPPDQQRLIFAGKQLEDGRTLADYNIQKESTLHLVLRLRGGQ

SEQ ID NO: 183253 - protein, 321 aa, Zea Mays
MSPAARRILLAVAARRRRFSTDAAASDPSRASQQLPRGKRWDAVVIGGGHNGLVAAAYLARAGRSVAVLERRGVLGGAAVSESDLVPGFRFSRCSYLLSLLRPAILRDLELERHGLKLLPRSPSSFTPCLDGRYLLLGPDAELNYSEISKFSRKDAVAYPRYEEKLENFCKLMDFVIDSAPPELRQEAHFSMVDRMKHRVEKSAFWGHLLRHVMQQGQKNMVEFFDLLLSPASKILNTWFESEVLKATLATDAVIGAMAGVHTPGSGYVLLHHVMGETGGQRGVWAYVQGGMGSVSSAISKAALEAGVQIVTNAEVTSQFL

SEQ ID NO: 183254 - protein, 457 aa, Zea Mays
MSPAARRILLAVAARRRRFSTDAAASDPSRASQQLPRGKRWDAVVIGGGHNGLVAAAYLARAGRSVAVLERRGVLGGAAVSESDLVPGFRFSRCSYLLSLLRPAILRDLELERHGLKLLPRSPSSFTPCLDGRYLLLGPDAELNYSEISKFSRKDAVAYPRYEEKLENFCKLMDFVIDSAPPELRQEAHFSMVDRMKHRVEKSAFWGHLLRHVMQQGQKNMVEFFDLLLSPASKILNTWFESEVLKATLATDAVIGAMAGVHTPGSGYVLLHHVMGETGGQRGVWAYVQGGMGSVSSAISKAALEAGVQIVTNAEVSQVMVNETSGMVEGVALVDGTEVHSPVVLSNATPYKTFVDLVPSSVLPEDFLCAIKAADYSSATTKINVAVDRLPQFQCCNTNLEGGPEHMGTIHIGSESMEEIDVAYREAADGISSKRPVIEMTIPSVLDKTISPPESLC

SEQ ID NO: 183255 - protein, 438 aa, Zea Mays
MQWHTQGSVCECRYEEKLENFCKLMDFVIDSAPPELRQEAHFSMVDRMKHRVEKSAFWGHLLRHVMQQGQKNMVEFFDLLLSPASKILNTWFESEVLKATLATDAVIGAMAGVHTPGSGYVLLHHVMGETGGQRGVWAYVQGGMGSVSSAISKAALEAGVQIVTNAEVSQVMVNETSGMVEGVALVDGTEVHSPVVLSNATPYKTFVDLVPSSVLPEDFLCAIKAADYSSATTKINVAVDRLPQFQCCNTNLEGGPEHMGTIHIGSESMEEIDVAYREAADGISSKRPVIEMTIPSVLDKTISPPGQHVINLFVQYTPYKLSEGSWQDSNVRKAFAERCFSLIDEYAPGFSSSVVGYDMLTPPDLEREFGLTGGNIFHGAMGLDSLFLMRPAKGWSDYRTPVKGLYLCGSGAHPGGGVMGAPGRNAAAVVLEDHVKTK

SEQ ID NO: 183256 - protein, 254 aa, Zea Mays
MSPAARRILLAVAARRRRFSTDAAASDPSRASQQLPRGKRWDAVVIGGGHNGLVAAAYLARAGRSVAVLERRGVLGGAAVSESDLVPGFRFSRCSYLLSLLRPAILRDLELERHGLKLLPRSPSSFTPCLDGRYLLLGPDAELNYSEISKFSRKDAVAYPRYEEKLENFCKLMDFVIDSAPPELRQEAHFSMVDRMKHRVEKSAFWGHLLRHVMQQGQKNMVEFFDLLLSPASKILNTWFEGLPLTTVYCRVRF

SEQ ID NO: 183257 - protein, 543 aa, Zea Mays
MSPAARRILLAVAARRRRFSTDAAASDPSRASQQLPRGKRWDAVVIGGGHNGLVAAAYLARAGRSVAVLERRGVLGGAAVSESDLVPGFRFSRCSYLLSLLRPAILRDLELERHGLKLLPRSPSSFTPCLDGRYLLLGPDAELNYSEISKFSRKDAVAYPRYEEKLENFCKLMDFVIDSAPPELRQEAHFSMVDRMKHRVEKSAFWGHLLRHVMQQGQKNMVEFFDLLLSPASKILNTWFESEVLKATLATDAVIGAMAGVHTPGSGYVLLHHVMGETGGQRGVWAYVQGGMGSVSSAISKAALEAGVQIVTNAEVSQVMVNETSGMVEGVALVDGTEVHSPVVLSNATPYKTFVDLVPSSVLPEDFLCAIKAADYSSATTKINVAVDRLPQFQCCNTNLEGGPEHMGTIHIGSESMEEIDVAYREAADGISSKRPVIEMTIPSVLDKTISPPGFSSSVVGYDMLTPPDLEREFGLTGGNIFHGAMGLDSLFLMRPAKGWSDYRTPVKGLYLCGSGAHPGGGVMGAPGRNAAAVVLEDHVKTK

SEQ ID NO: 183258 - protein, 456 aa, Zea Mays
MSPAARRILLAVAARRRRFSTDAAASDPSRASQQLPRGKRWDAVVIGGGHNGLVAAAYLARAGRSVAVLERRGVLGGAAVSESDLVPGFRFSRCSYLLSLLRPAILRDLELERHGLKLLPRSPSSFTPCLDGRYLLLGPDAELNYSEISKFSRKDAVAYPRYEEKLENFCKLMDFVIDSAPPELRQEAHFSMVDRMKHRVEKSAFWGHLLRHVMQQGQKNMVEFFDLLLSPASKILNTWFESEVLKATLATDAVIGAMAGVHTPGSGYVLLHHVMGETGGQRGVWAYVQGGMGSVSSAISKAALEAGVQIVTNAEVSQVMVNETSGMVEGVALVDGTEVHSPVVLSNATPYKTFVDLVPSSVLPEDFLCAIKAADYSSATTKINVAVDRLPQFQCCNTNLEGGPEHMGTIHIGSESMEEIDVAYREAADGISSKRPVIEMTIPSVLDKTISPPACY

SEQ ID NO: 183259 - protein, 86 aa, Zea Mays
MLKSWPGVGCLFDTYVSLCSAGAQGVLHYVVNKFRVLAHILSALGLGFSGTFSLSRALVKVHSECAVVFVPTLVLTLSPTSSVGLP

SEQ ID NO: 183260 - protein, 87 aa, Zea Mays
MTEQQEGVSKSSSSSISSSTQESEEELTIGTLITEATNTTNSAKSLGKRLSHLDSIPHTPRVNGKIPDFNNATIDHESLLERHLWLS

SEQ ID NO: 183261 - protein, 105 aa, Zea Mays
MLCFLLLQFRALADQIFRNPDYHKHVRKAVVKQLKEFRKHYEGYVPMEYKVYLKKMKRSGEWGDHVTLQAAADRFAAKICLLTSFRDTCLVEIVPRDATPTREFC

SEQ ID NO: 183262 - protein, 190 aa, Zea Mays
MEPATPPAPAAGVTATIDLSLVAADLGGAHLLPCGIRQNGGAPVSDYFKPRATGPDGYRGFVLEKRHGHNSNAEVNNFTSQAEFQSITYWNHDTTSSTEDSLPSFVKLSEEIQTAMTFAHPAVLCDLHIQLFFGQQPAVHWRWQVVQLLLMTIVIRRLIQQGRQRTHVILVGNMGTGQTILVGNMGTGQT

SEQ ID NO: 183263 - protein, 153 aa, Zea Mays
MGGGEGKSKKRRSSTSSGGERKRRDKKESKRRSRDDREDDDDRHKKKGKHIDRNKGKERDSKDRHSKEKTSKRKDKDAAFKEISKDDYFAKNNEFATWLKEEKGKYFSDLSSESARDLFLKFVKQWNKGKLPSQYYEGITSGPRSAHNWNIKA

SEQ ID NO: 183264 - protein, 145 aa, Zea Mays
MSLLLPLLTLPFKQAPHKVCTHSLALSLSLSLATSIISISTPLIISRKKGKDLLAASQLQPTARDRRVDCLDRPTGRGGRHGTREDRDQADRELDEPAGHLLQAPGRAAQEGQRARRAVRRARRRRHLLQHQQDVRVLQPCLQVG

SEQ ID NO: 183265 - protein, 217 aa, Zea Mays
MFSANCYVRDQVRRYVYHDVVRLGDLEKLIDCSCVQTYTINSAKVIFLKPRPQSRPFKGSGNICLTCDRILQEPFHFCSLSCKVALVDHVMTQGGDLSNILQHYGAGGGGGGGTADPDRLAFPRFENLRVVDGSDLDDDVQVVTPDSTLEDPTNNAGGGSSDNGTDDARRQVVVHGGGEAAKRKKGGGFLPQIVLSLGGGGGGGNRRKGAPHRSPLA

SEQ ID NO: 183266 - protein, 184 aa, Zea Mays
MFSANCYVRDQVRRYVYHDVVRLGDLEKLIDCSCVQTYTINSAKVIFLKPRPQSRPFKGSGNICLTCDRILQEPFHFCSLSCKVDHVMTQGGDLSNILQHYGAGGGGGGGTADPDRLAFPRFENLRVVDGSDLDDDVQVVVHGGGEAAKRKKGGGFLPQIVLSLGGGGGGGNRRKGAPHRSPLA

SEQ ID NO: 183267 - protein, 146 aa, Zea Mays
MATPTPMGAVRVERVRGRSALTRCFARYPLKLIAPSRVGPSSCDAVWLYALTYGGGIVSVSPRTPPPAHNPPLPILSVLARCAVAGHSRFGDACCSVTVSCPGAALAPAPALAGGHRVVHGQRRRRLYGGDHHAGLDQGVQGCGSK

SEQ ID NO: 183268 - protein, 95 aa, Zea Mays
MATPTPMGAVRVERVRGRSALTRCFARYPLKLIAPSRVGPSSCDAVWLYALTYGGGIVSGDTVSCTVSVGDGCTAAITTQASTKYFCRCTRLWVK

SEQ ID NO: 183269 - protein, 86 aa, Zea Mays
MATPTPMGAVRVERVRGRSALTRCFARYPLKLIAPSRVGPSSCDAVWLYALTYGGGIVSGDTVSCTVSVGDGCTAAITTQASTKVR

SEQ ID NO: 183270 - protein, 299 aa, Zea Mays
MVFVLVGVIFVPIGIVSLRASHQVVEIVDRYDDACIPANVTEKLAYIQNDSIPKTCTRNLTITKDMKQPIFVYYQLDNFYQNHRRYVKSRNDAQLRDKSKASDTTNCDPEAKTVDGKPIVPCGLIAWSLFNDTYTLIHNNKTLRVDKKDISWKSDRDHKFGSDVFPTNFQKGPLQGGKILNPKIPLSEQEDLIVWMRTAALPTFRKLYGRIHVDLKENDTITVQLENNYNTYSFSGKKKLVLSTATWIGGKNDFLGLAYLTVGGICFVLAFAFTLLYLIKPRKMGDNNYLSWNRPTLGR

SEQ ID NO: 183271 - protein, 334 aa, Zea Mays
MAPRSPGGTPGSPNSKFTQQELPACKPILTPKWVISVFVLVGVIFVPIGIVSLRASHQVVEIVDRYDDACIPANVTEKLAYIQNDSIPKTCTRNLTITKDMKQPIFVYYQLDNFYQNHRRYVKSRNDAQLRDKSKASDTTNCDPEAKTVDGKPIVPCGLIAWSLFNDTYTLIHNNKTLRVDKKDISWKSDRDHKFGSDVFPTNFQKGPLQGGKILNPKIPLSEQEDLIVWMRTAALPTFRKLYGRIHVDLKENDTITVQLENNYNTYSFSGKKKLVLSTATWIGGKNDFLGLAYLTVGGICFVLAFAFTLLYLIKPRKMGDNNYLSWNRPTLGR

SEQ ID NO: 183272 - protein, 61 aa, Zea Mays
MDLHVIGGSCSNYLLMRYRHLLPKRPFSRFKRYVVVHCLHFISHLSHLRLNTCFAHLNDFS

SEQ ID NO: 183273 - protein, 373 aa, Zea Mays
MFPSKKATSSAAAAAAAVSSNDSRQQAMCVQADSGSGLVLTTDPKPRLRWTVELHERFVDAVTQLGGPDKATPKTIMRVMGVKGLTLYHLKSHLQKFRLGKQPHKEFNEHSVKDAMEMQRNAASSSGMMGRSMNDRSVHMNEAIRMQMEVQRRLHEQLEVQRHLQMRIEAQGKYMQSILEKAYQTIATGDLAACSPVAAGYKSLLGNPQAMLDVCSLKDMAPSMGFPSLQDLHMYGGGGGHCLDLQQQMERPMEAFFASCDIGSLAKKRPVSPYADDDGGKSPMLWGEDDEGKGIVDHFQMAPPMMDAAGIDVMDSIADVYGDAKHMTMSSDSTGSKGGGFDVRLERPSLRRPHMGGSPSVLGGGQTRNLSYG

SEQ ID NO: 183274 - protein, 208 aa, Zea Mays
MRIEAQGKYMQSILEKAYQTIATGDLAACSPVAAGYKSLLGNPQAMLDVCSLKDMAPSMGFPSLQDLHMYGGGGGHCLDLQQQMERPMEAFFASCDIGSLAKKRPVSPYADDDGGKSPMLWGEDDEGKGIVDHFQMAPPMMDAAGIDVMDSIADVYGDAKHMTMSSDSTGSKGGGFDVRLERPSLRRPHMGGSPSVLGGGQTRNLSYG

SEQ ID NO: 183275 - protein, 259 aa, Zea Mays
MKIDNANGRIPVDDFLELVARISDIRHPNILELVGYCAEYEQRLLVYNYFSRKTLHDVLHEGEDLDEPLSWNARLHIVLHAAKALEYLHDTCEPPVVHQNFEPANVLLDNRCSVRVAECGLAQLMASGSVTQLSGRMRALLNYEAPEIHESEPFTRQSDVYSLGVVMLELLTGRKPYDSSRPRDEQHLVRWANSQLHDMESLSKMVDPSIRGECSVILLSRFADIISQCIQPGPEFRPAMSQIVQDLARIVGASGAVSE

SEQ ID NO: 183276 - protein, 792 aa, Zea Mays
MGAAGGGRCVRLGAAPVLVLLLIAAATLPRLARAVTDAGDVSAINGLYVALGSPKLPGWSASAGDPCGESWQGVTCTGSSITSIVFNAANLGGQLGSLGNFTSITEINLSNNNIGGTIPEDLPVTLQNLFLSDNQLTGSIPMSLSELHSLTAISSFTRSLNDNHLDGKLPDAFDSLTGLVNLDISSNNFSGPLPPSLGSLTSLTTLHMQDNQLSGTLNVLQDLPLKDLNVENNMFSGPVPPKLLNIPNFKNDGNPFNTSIAPSTSPSSTPTGSRPTQTPSSSSSPSGSPPPSSAASNSSSGSTARNSNSPSSKKNKSSPLRTVGYVLLAIVLFIVLVLLVIFCLSKYQERQSRRDYSTSQLGRVHQRVEEPKSKQASVQSKHEAKKGSSEVPERKKPREINLAVPVAIEKPPEKRKERVINLERTESEIFAAAPPPPPPPPPPPPPPTPPPPPPPPRLPSPPPVEKVTVNPIVLPEKRVSTPPRTGPSTSATSFSVASLQQYTNSFQEQNLIRESRLGKVYLAELPEGKLLEVMKIDNANGRIPVDDFLELVARISDIRHPNILELVGYCAEYEQRLLVYNYFSRKTLHDVLHEGEDLDEPLSWNARLHIVLHAAKALEYLHDTCEPPVVHQNFEPANVLLDNRCSVRVAECGLAQLMASGSVTQLSGRMRALLNYEAPEIHESEPFTRQSDVYSLGVVMLELLTGRKPYDSSRPRDEQHLVRWANSQLHDMESLSKMVDPSIRGECSVILLSRFADIISQCIQPGPEFRPAMSQIVQDLARIVGASGAVSE

SEQ ID NO: 183277 - protein, 646 aa, Zea Mays
MSLSELHSLTAMSLNDNHLDGKLPDAFDSLTGLVNLDISSNNFSGPLPPSLGSLTSLTTLHMQDNQLSGTLNVLQDLPLKDLNVENNMFSGPVPPKLLNIPNFKNDGNPFNTSIAPSTSPSSTPTGSRPTQTPSSSSSPSGSPPPSSAASNSSSGSTARNSNSPSSKKNKSSPLRTVGYVLLAIVLFIVLVLLVIFCLSKYQERQSRRDYSTSQLGRVHQRVEEPKSKQASVQSKHEAKKGSSEVPERKKPREINLAVPVAIEKPPEKRKERVINLERTESEIFAAAPPPPPPPPPPPPPPTPPPPPPPPRLPSPPPVEKVTVNPIVLPEKRVSTPPRTGPSTSATSFSVASLQQYTNSFQEQNLIRESRLGKVYLAELPEGKLLEVMKIDNANGRIPVDDFLELVARISDIRHPNILELVGYCAEYEQRLLVYNYFSRKTLHDVLHEGEDLDEPLSWNARLHIVLHAAKALEYLHDTCEPPVVHQNFEPANVLLDNRCSVRVAECGLAQLMASGSVTQLSGRMRALLNYEAPEIHESEPFTRQSDVYSLGVVMLELLTGRKPYDSSRPRDEQHLVRWANSQLHDMESLSKMVDPSIRGECSVILLSRFADIISQCIQPGPEFRPAMSQIVQDLARIVGASGAVSE

SEQ ID NO: 183278 - protein, 702 aa, Zea Mays
MYRLKYNLNLGSLGNFTSITEINLSNNNIGGTIPEDLPVTLQNLFLSDNQLTGSIPMSLSELHSLTAMSLNDNHLDGKLPDAFDSLTGLVNLDISSNNFSGPLPPSLGSLTSLTTLHMQDNQLSGTLNVLQDLPLKDLNVENNMFSGPVPPKLLNIPNFKNDGNPFNTSIAPSTSPSSTPTGSRPTQTPSSSSSPSGSPPPSSAASNSSSGSTARNSNSPSSKKNKSSPLRTVGYVLLAIVLFIVLVLLVIFCLSKYQERQSRRDYSTSQLGRVHQRVEEPKSKQASVQSKHEAKKGSSEVPERKKPREINLAVPVAIEKPPEKRKERVINLERTESEIFAAAPPPPPPPPPPPPPPTPPPPPPPPRLPSPPPVEKVTVNPIVLPEKRVSTPPRTGPSTSATSFSVASLQQYTNSFQEQNLIRESRLGKVYLAELPEGKLLEVMKIDNANGRIPVDDFLELVARISDIRHPNILELVGYCAEYEQRLLVYNYFSRKTLHDVLHEGEDLDEPLSWNARLHIVLHAAKALEYLHDTCEPPVVHQNFEPANVLLDNRCSVRVAECGLAQLMASGSVTQLSGRMRALLNYEAPEIHESEPFTRQSDVYSLGVVMLELLTGRKPYDSSRPRDEQHLVRWANSQLHDMESLSKMVDPSIRGECSVILLSRFADIISQCIQPGPEFRPAMSQIVQDLARIVGASGAVSE

SEQ ID NO: 183279 - protein, 585 aa, Zea Mays
MQDNQLSGTLNVLQDLPLKDLNVENNMFSGPVPPKLLNIPNFKNDGNPFNTSIAPSTSPSSTPTGSRPTQTPSSSSSPSGSPPPSSAASNSSSGSTARNSNSPSSKKNKSSPLRTVGYVLLAIVLFIVLVLLVIFCLSKYQERQSRRDYSTSQLGRVHQRVEEPKSKQASVQSKHEAKKGSSEVPERKKPREINLAVPVAIEKPPEKRKERVINLERTESEIFAAAPPPPPPPPPPPPPPTPPPPPPPPRLPSPPPVEKVTVNPIVLPEKRVSTPPRTGPSTSATSFSVASLQQYTNSFQEQNLIRESRLGKVYLAELPEGKLLEVMKIDNANGRIPVDDFLELVARISDIRHPNILELVGYCAEYEQRLLVYNYFSRKTLHDVLHEGEDLDEPLSWNARLHIVLHAAKALEYLHDTCEPPVVHQNFEPANVLLDNRCSVRVAECGLAQLMASGSVTQLSGRMRALLNYEAPEIHESEPFTRQSDVYSLGVVMLELLTGRKPYDSSRPRDEQHLVRWANSQLHDMESLSKMVDPSIRGECSVILLSRFADIISQCIQPGPEFRPAMSQIVQDLARIVGASGAVSE

SEQ ID NO: 183280 - protein, 382 aa, Zea Mays
MGAAGGGRCVRLGAAPVLVLLLIAAATLPRLARAVTDAGDVSAINGLYVALGSPKLPGWSASAGDPCGESWQGVTCTGSSITSIVFNAANLGGQLGSLGNFTSITEINLSNNNIGGTIPEDLPVTLQNLFLSDNQLTGSIPMSLSELHSLTAMSLNDNHLDGKLPDAFDSLTGLVNLDISSNNFSGPLPPSLGSLTSLTTLHMQDNQLSGTLNVLQDLPLKDLNVENNMFSGPVPPKLLNIPNFKNDGNPFNTSIAPSTSPSSTPTGSRPTQTPSSSSSPSGSPPPSSAASNSSSGSTARNSNSPSSKKNKSSPLRTVGYVLLAIVLFIVLVLLVIFCLSKYQERQSRRDYSTSQLGRVHQRVEEPKSKQASVQSKHEAKKV

SEQ ID NO: 183281 - protein, 1090 aa, Zea Mays
MAGGQAPEASPGRYQRRRDEIDDDDCADVLGIDVRGPDADPFDIPAKRAPVERLRRWRQAALVLNASRRFRYTLDLKKEEEKEQIRRKIRAHAQVIRAALLFKEAGEKQTHETELPEILPRDFGIGEEQLTVMTRDHNYSALQEYGGVIGLANLLKTNLEKGIHGDEADLSCRANAFGPNRYPRKKGRSFWVFLWEACQDMTLVILIIAAVISLVLGIATEGTKEGWYDGTSIAFAVFLVIVVTAVSDYKQSLQFQHLNEEKQNIQVEVIRGGRRIQVSIFDIVVGDIVALKIGDQVSADGVVISGHSLAIDESSMTGESKIVMKDQKSPFLMAGSKVADGYGTMLVTAVGLNTEWGLLMASISEDNNEETPLQVRLNGVATFIGIAGLSVAAMVLVVLFARYFTGHTTDSDGSVQFVKRHTSVKSAIFGSIKILTVAVTIVVVAVPEGLPLAVTLTLAYSMRKMMADKALVRRLSACETMGSATTICSDKTGTLTLNQMTVMQSIVGEVKLQPPANVDKLSSTVASLLLEGIAQNTSGSVFEAQDGSVEVTGSPTEKAILSWGLDLRMKFAEERSRSSIIHVSPFNSEKKRAGVAVVARDSNVHVHWKGAAEIVLALCTSWLNVDGSTHEMTPDKANQLKKLIEDMAEQSLRCIAFAYRNLDMKDVPSEEQRINWQLPDNELTLIGIIGMKDPCRPEVRDAVELCKKAGVKVRMVTGDNLKTAKAIALECGILDDSEASAQAIIEGRVFRAYDDTERENVADKISVMARSSPNDKLLLVKALKKIGHVVAVTGDGTNDAPALHEADIGLSMGIQGTEVAKESSDIIILDDNFSSVVKVVRWGRSVYANIQKFIQFQLTVNVAALVINVVAAVSSGNVPLNAVQLLWVNLIMDTLGALALATEPPTDQLMRRPPVGRREPLVTNIMWRNLFIQAVFQVAVLLTLNFRGRDLLHLTHDTLGHSSKVKNTLIFNTFVLCQVFNEVNSRKPEELNIFSGVSRNHLFLAVVSITVVMQVIIIEFLGKFTSTVRLNWKLWLVSVVIAFLSWPLAFVGKFIPVPRTELKDLIVRCWPKRGESAAQQTQDDRMEVPV

SEQ ID NO: 183282 - protein, 240 aa, Zea Mays
MKDPCRPEVRDAVELCKKAGVKVRMVTGDNLKTAKAIALECGILDDSEASAQAIIEGRVFRAYDDTERENVADKISVMARSSPNDKLLLVKALKKIGHVVAVTGDGTNDAPALHEADIGLSMGIQGTEVAKESSDIIILDDNFSSVVKVVRWGRSVYANIQKFIQFQLTVNVAALVINVVAAVSSGNVPLNAVQLLWVNLIMDTLGALALATEPPTDQLMRRPPVGRRCLMRSILVNQKN

SEQ ID NO: 183283 - protein, 833 aa, Zea Mays
MPAGGAIVVVEVVQVVVPGAVAKPPGSKEEAAASTGMKSGLARLVRRTGGAERPTSAWSVAGGRVLWARAAIPLPATQIPMGGGWLDNGGTQIRHGAAPRPGGGGRRAAHWRVHDRGGGEPVEAEDEWRFARVTWRLTVTAVGLNTEWGLLMASISEDNNEETPLQVRLNGVATFIGIAGLSVAAMVLVVLFARNFFFASRYFTGHTTDSDGSVQFVKRHTSVKSAIFGSIKILTVAVTIVVVAVPEGLPLAVTLTLAYSMRKMMADKALVRRLSACETMGSATTICSDKTGTLTLNQMTVMQSIVGEVKLQPPANVDKLSSTVASLLLEGIAQNTSGSVFEAQDGSVEVTGSPTEKAILSWGLDLRMKFAEERSRSSIIHVSPFNSEKKRAGVAVVARDSNVHVHWKGAAEIVLALCTSWLNVDGSTHEMTPDKDPCRPEVRDAVELCKKAGVKVRMVTGDNLKTAKAIALECGILDDSEASAQAIIEGRVFRAYDDTERENVADKISVMARSSPNDKLLLVKALKKIGHVVAVTGDGTNDAPALHEADIGLSMGIQGTEVAKESSDIIILDDNFSSVVKVVRWGRSVYANIQKFIQFQLTVNVAALVINVVAAVSSGNVPLNAVQLLWVNLIMDTLGALALATEPPTDQLMRRPPVGRREPLVTNIMWRNLFIQAVFQVAVLLTLNFRGRDLLHLTHDTLGHSSKVKNTLIFNTFVLCQVFNEVNSRKPEELNIFSGVSRNHLFLAVVSITVVMQVIIIEFLGKFTSTVRLNWKLWLVSVVIAFLSWPLAFVGKFIPVPRTELKDLIVRCWPKRGESAAQQTQDDRMEVPV

SEQ ID NO: 183284 - protein, 446 aa, Zea Mays
MPAGGAIVVVEVVQVVVPGAVAKPPGSKEEAAASTGMKSGLARLVRRTGGAERPTSAWSVAGGRVLWARAAIPLPATQIPMGGGWLDNGGTQIRHGAAPRPGGGGRRAAHWRVHDRGGGEPVEAEDEWRFARVTWRLTVTAVGLNTEWGLLMASISEDNNEETPLQVRLNGVATFIGIAGLSVAAMVLVVLFARYFTGHTTDSDGSVQFVKRHTSVKSAIFGSIKILTVAVTIVVVAVPEGLPLAVTLTLAYSMRKMMADKALVRRLSACETMGSATTICSDKTGTLTLNQMTVMQSIVGEVKLQPPANVDKLSSTVASLLLEGIAQNTSGSVFEAQDGSVEVTGSPTEKAILSWGLDLRMKFAEERSRSSIIHVSPFNSEKKRAGVAVVARDSNVHVHWKGAAEIVLALCTSWLNVDGSTHEMTPDKDPVEEQQQGTHIEDYNFT

SEQ ID NO: 183285 - protein, 621 aa, Zea Mays
MAGGQAPEASPGRYQRRRDEIDDDDCADVLGIDVRGPDADPFDIPAKRAPVERLRRWRQAALVLNASRRFRYTLDLKKEEEKEQIRRKIRAHAQVIRAALLFKEAGEKQTHETELPEILPRDFGIGEEQLTVMTRDHNYSALQEYGGVIGLANLLKTNLEKGIHGDEADLSCRANAFGPNRYPRKKGRSFWVFLWEACQDMTLVILIIAAVISLVLGIATEGTKEGWYDGTSIAFAVFLVIVVTAVSDYKQSLQFQHLNEEKQNIQVEVIRGGRRIQVSIFDIVVGDIVALKIGDQVSADGVVISGHSLAIDESSMTGESKIVMKDQKSPFLMAGSKVADGYGTMLVTAVGLNTEWGLLMASISEDNNEETPLQVRLNGVATFIGIAGLSVAAMVLVVLFARYFTGHTTDSDGSVQFVKRHTSVKSAIFGSIKILTVAVTIVVVAVPEGLPLAVTLTLAYSMRKMMADKALVRRLSACETMGSATTICSDKTGTLTLNQMTVMQSIVGEVKLQPPANVDKLSSTVASLLLEGIAQNTSGSVFEAQDGSVEVTGSPTEKAILSWGLDRDSNVHVHWKGAAEIVLALCTSWLNVDGSTHEMTPDKDPVEEQQQGTHIEDYNFT

SEQ ID NO: 183286 - protein, 378 aa, Zea Mays
METRGHKDIYEQTFGRIQNSMAGPAPYSQDSHGNMQMQLFLTLAVNPSSLYASESNPTRNRQPPRSRRIISVARLENSKFSPLRHQQRNRKSATPHSPSAVGSRQRHSSPRFHSPMKASAAAASPPPPPPRGWLSGLVSGAGRLLAAILDPESSASDTTSSSPESSQSPPRRDQATAGHGIGKCFPSDSHQLNLSGKEIVLKDSGEGSLAIVSEVHPKDAVKQLLMQETYSWSECDALIKIIQERVVDSDDEPAAILPIAWHANTQLHPVAHSSNPNTTAVPAVSNPACRLEFDNIVEKEWLKKSSAVAENRCTNSHDQIQHAMKRSYSNTGDTIEESRRIRPKRNRSNSLRNQGASSKEAATNASSARREFPEGSVR

SEQ ID NO: 183287 - protein, 163 aa, Zea Mays
MWCSCARAPPRGAPRGLGTGYLNDPESTKNTIDKDGWLHTGDIGYVDDDDEIFIVDRLKEIIKYKGFQVPPAELEALLITHPEIKDAAVVSMNDDLAGEIPVAFIVRTEGSQVTEDEIKQFVAKEVVFYKKIHKVFFTESIPKNPSGKILRKDLRARLAAGVH

SEQ ID NO: 183288 - protein, 122 aa, Zea Mays
MHALLVALQPAGGQSGTCQFCRRRWLTHSCSCNCIGCGRAVDARTWCSRRRWRRCRRASWGCSASTPCSGASSATSTPASASRRPPAWSAACWPPPAWPSSPRSRLGTSSAAPAPRSIDEFQ

SEQ ID NO: 183289 - protein, 317 aa, Zea Mays
MSNKMWDALVEHAKTCVLSGKYYIYYSDESRSIGAIFNNIYAFCGLISGEQFYSSESLDDSQKLFADALVKKAYDNWMYVIEYDGKGLLNLKPKKKAASTGQAETHASAGGSTSYQQHLSSTSMPGSSPSGGTDSVGYGVDQSATHLSQLQSSSTNLQTPYDDTFSFLPPNLLTGSANDAMGLELGQLHQVISQGQPIQPANVGYVDWPRNRDSQYADDFTEDIRVKSHQMLESEDMQQLLRVFSMGGASGSLSDDTFNFQPYMPSPLPNPGFESERSHSSGKAVVGWLKIKAAMRWGIFVRKKAAERRAQLVELED

SEQ ID NO: 183290 - protein, 322 aa, Zea Mays
MKEKRGLEDAGGGAGDGRPDAKRSRPPALASVIVEALKMDSLQRLCSSLEPILRRVVSEEVERALGRLGPATIGGRSSPKRIEGPDGRALQLQFRTRLSLPLFTGGKVEGEQGAAIHVVLLDAGTGGVVSSGPESSAKLDIVVLEGDFNNEDEEGWTGEEFDSHVVKEREGKRPILTGDLQVTLKEGVGTIGELTFTDNSSWIRSRKFRLGLKLASGFCEGVRIREAKTEAFMVKDHRGELYKKHYPPTLKDEVWRLEKIGKDGSFHKRLNKSGISTVEDFLRLVVRDPQKLRSWYVQQNVGCPCGTCKDLCLKWEILHILF

SEQ ID NO: 183291 - protein, 295 aa, Zea Mays
MATVPNPKTTRARREPALRPRSNNVAAAPAPAPAVASVRRGPAASAEKENQPPKSLGHGKAAAAATAAEPPKPAEPAPVVAPPPPPLRPSSLQLRMKDEAAAAALPAFVVGPRGRELLPPPSSNYEAWDLSDSESAPASSWATLPNRALLCRPLPQDVGRCTCVIAREAATGARGVALYSLYTNEGQGRQDRKLAVARHRRRRGRSEFVVAQNQDGIFCTADTSFLGAVRANLVGSKYRIWGQVCPHHHHAHREFQELEGMDPQEPVHAAQGKQFCSDPACQWAPKGLAGEEEQS

SEQ ID NO: 183292 - protein, 891 aa, Zea Mays
MSSGSAVTGGGAEEAAAVPLGQKLMVHVAENGHTLEFQCGGDTLVEAIQHSIHHLCVIPPSDQLLLCGNTSLDGANALAYYKLPRDDREVFLYNKARLLADSRPPAPESIYIPEPNIPPPPPRPQDSSPVGASADPALKALVSYETRFRYHFQVANAVYQSSLAKFELCRRLLREGQVQERALDTARSNLEHTFRKLSQRYSEFLRCFTQQHRSHVEMLANFERDVQKLRAVRLHPALQSEGRHCLMDLLKENDLRKLADGCLSSHKKFEVKVSQLKANFLELKKRVEGLFNAMNSGGCKDVEKLIKEHQGVIGDQKIIMQALSKDVDTSKKLVDDCSSCQLSASLRPHDAVSAVGRIYEIHENDNLPSIQNFDHSLTKLLEKCKDKKNEMNTLVHVCMQRVKSSQISIKGMMSELIAFQEVMGHQEDFDNLKIVSGLGYAYRACVAEVARRKSYFKLYTGFAGKHAEKLAIECQNEKTRREDFHRTWSRYIPDGVMCSMGLFDSPSQCDVKVAPFDCDLLPIDVDDVEKLAPQSILGSFLKSERSQIAKPLLSNSSISGNLNKSEQNSLSADDKMDFQDFLGGYDTIDIAGTSKLEVENARLKAELASAIAVLCNISAEYGYESIDEGQIDAALKKAREKTAEALAAKDEFAYQLQSLLTAKQEKCLAYEKRIQDLEERLANQYIKGHMVSGSKDTSGSLLSAFKSNDCNLDVSGGRQTQIRDESSVAMDEASSTSEQPSKQAEGGDENMTDISGALNLQLLDSAACTNLDAFMTELPRDNEHKIVNIDKEGHMLTQLTMADTSDVRIEDPLSILNSRTNEHHTLELRNKELLVSELQSTLDQKSKQLGETEIKLSAMMDEVNSLMKELEQIRGLLDESQRRGPNKQMLI

SEQ ID NO: 183293 - protein, 907 aa, Zea Mays
MSSGSAVTGGGAEEAAAVPLGQKLMVHVAENGHTLEFQCGGDTLVEAIQHSIHHLCVIPPSDQLLLCGNTSLDGANALAYYKLPRDDREVFLYNKARLLADSRPPAPESIYIPEPNIPPPPPRPQDSSPVGASADPALKALVSYETRFRYHFQVANAVYQSSLAKFELCRRLLREGQVQERALDTARSNLEHTFRKLSQRYSEFLRCFTQQHRSHVEMLANFERDVQKLRAVRLHPALQSEGRHCLMDLLKENDLRKLADGCLSSHKKFEVKVSQLKANFLELKKRVEGLFNAMNSGGCKDVEKLIKEHQGVIGDQKIIMQALSKDVDTSKKLVDDCSSCQLSASLRPHDAVSAVGRIYEIHENDNLPSIQNFDHSLTKLLEKCKDKKNEMNTLVHVCMQRVKSSQISIKGMMSELIAFQEVMGHQEDFDNLKIVSGLGYAYRACVAEVARRKSYFKLYTGFAGKHAEKLAIECQNEKTRREDFHRTWSRYIPDGVMCSMGLFDSPSQCDVKVAPFDCDLLPIDVDDVEKLAPQSILGSFLKSERSQIAKPLLSNSSISGNLNKSEQNSLSADDKMDFQDFLGGYDTIDIAGTSKLEVENARLKAELASAIAVLCNISAEYGYESIDEGQIDAALKKAREKTAEALAAKDEFAYQLQSLLTAKQEKCLAYEKRIQDLEERLANQYIKGHMVSGSKDTSGSLLSAFKSNDCNLDVSGGRQTQIRDESSVAMDEASSTSEQPSKQAEGGDENMTDISGALNLQLLDSAACTNLDAFMTELPRDNEHKIVNIDKEGHMLTQLTMADTSDVRIEDPLSILNSRTNEHHTLELRNKELLVSELQSTLDQKSKQLGETEIKLSAMMDEVNSLMKELEQIRGLLDESQQEKRPEQTNAHLTEGLLSMMLCGHLL

SEQ ID NO: 183294 - protein, 222 aa, Zea Mays
MIEAYLRANKMFVDKHEPETERVFSSYLELDLSEVEPCVSGPKRPHDRVPLKEMKSDWHACLDNEVGFKVKPWVKTSLTPGSVVATEYLKHRYRCCCGAVSYYLLNLGDSITTDHISYSGKIPEGTPAAKYLLEYGVEPKNFSSYGGRRGNNEVVMRGAFANMRIVNKLLNGEAGPWTIHVPTGEKLYVYDAAMKWKEMLSVLPNYRVKEYMKKLYKTSVQP

SEQ ID NO: 183295 - protein, 237 aa, Zea Mays
MSPEYGATMGFFLVSMIEAYLRANKMFVDKHEPETERVFSSYLELDLSEVEPCVSGPKRPHDRVPLKEMKSDWHACLDNEVGFKVKPWVKTSLTPGSVVATEYLKHRYRCCCGAVSYYLLNLGDSITTDHISYSGKIPEGTPAAKYLLEYGVEPKNFSSYGGRRGNNEVVMRGAFANMRIVNKLLNGEAGPWTIHVPTGEKLYVYDAAMKWKEMLSVLPNYRVKEYMKKLYKTSVQP

SEQ ID NO: 183296 - protein, 260 aa, Zea Mays
MIEAYLRANKMFVDKHEPETERVFSSYLELDLSEVEPCVSGPKRPHDRVPLKEMKSDWHACLDNEVGFKVKPWVKTSLTPGSVVATEYLKHRYRCCCGAVSYYLLNLGDSITTDHISYSGKIPEGTPAAKYLLEYGVEPKNFSSYGGRRGNNEVVMRGAFANMRIVNKLLNGEAGPWTIHVPTGEKLYVYDAAMVEKMVLLACGWRYTITVCDSSNLYTYGWRKYVQLGHIDFEDDLVPHKLEALKDSTISQVIPFTNIP

SEQ ID NO: 183297 - protein, 145 aa, Zea Mays
MKLKVVYIALNVIQVSMIEAYLRANKMFVDKHEPETERVFSSYLELDLSEVEPCVSGPKRPHDRVPLKEMKSDWHACLDNEVGFKGYAVPKEQQGKVVKFNFHGRPAEIKHGSVVLAAICSSTNTSNPSFMIGAGLVEESMRIGP

SEQ ID NO: 183298 - protein, 89 aa, Zea Mays
MLEYGPTALLTYSTTTAIPRKLDCPVIWLTYCEQFFRGQHTLASDRDWLASYHLHGAMQTWYYILEQDVNMTAFLVALHRALQLTLRYR

SEQ ID NO: 183299 - protein, 199 aa, Zea Mays
MDAAGGDQLSLAAVRDALVRLEDSVVFALIERARHPRNAPAYAPAATAGEHSLVEFFVREAEALNAKAGHYQKPEDVPFFPQDLPSPLFPTKPSPKVLHPFASLVTVNDAIWKMYFDELLPLFTVDGDDGSYAQTVALDLACLQVLSQRIHIGKYVAEVKFKDAPQEYSRLIKEKQFSDGYADIQGCGREGQEESREEG

SEQ ID NO: 183300 - protein, 98 aa, Zea Mays
MSFEAGSCVVQAPGTTKKGNMLLPWRQMSSGGTPCLEGTSLLRTGTPRVVHPCAAFKGKNRHCFAFKESSKAPVSRSHLPLQFISITFAIASQAQLLN

SEQ ID NO: 183301 - protein, 84 aa, Zea Mays
MIGATSFFPYPQIFHLAVVPFALGAESMGRCCRPAGQYTATLRGHGRGRLMVVGGVDQVLVVGSKMEHGDEPYLARKASTDKQD

SEQ ID NO: 183302 - protein, 95 aa, Zea Mays
MGPTFFLFLFLATHLGRVVEHATPPLTTTAPHLCFKSGLRTLLLSPLPSPPSAATRKRKAPPPEIAIDSKSGESSWVEISPRLKSRGRIQELWSR

SEQ ID NO: 183303 - protein, 881 aa, Zea Mays
MAWEGIVGAVDAARLSKQQIVESEHLMKALLEQKDGLARRIFSKAGVDNTSVLQATDDFISRQPKVVGDTTGPIIGSSFVLILDNAKKHKKEHGDEFVSVEHILQAFTSDKRFGQQLFKDLKIVENDLKEAISAVRGSQRVTDQNPEGKYQALEKYGIDLTESARRGKLDPVIGRDDEVRRCIQILCRRTKNNPVIIGEPGVGKTAIAEGLAQRIVRGDVPEPLMNRRLISLDMGALLAGAKFRGDFEERLKAVLKEVTASNGQIILFIDEIHTVVGAGAAGGAMDAGNLLKPMLGRGELRCIGATTLDEYRKYIEKDAALERRFQQVYCGEPAVEDTISILRGLRERYELHHGVKISDGALVAAAVLSDRYITGRFLPDKAIDLVDEAAAKLKMEITSKPIELDEVDREIIRLEMEKLSLKNDTDKASKERLSKLEAELESLKQKQKSLSEHWEYEKSLMTRIRSIKEETDRVNLEIEAAEREYDLNRAAELKYGTLLSLQKQLEEAENKLVEFQQSGKSMLREEVTDVDIAEIVSKWTGIPVSNLQQSEREKLLLLEDVLHKRVIGQDIAVKSVANAIRRSRAGLSDPNRPIASFMFMGPTGVGKTELGKTLAEFLFNTENALIRIDMSEYMEKHAVSRLVGAPPGYVGYEEGGQLTESVRRRPYSVVLFDEIEKAHQEVFNILLQLLDDGRITDSQGRTVSFTNCVIIMTSNIGSPLILDTLRNTTDSKEAVYEIMKKQVIEMARQTFRPEFLNRIDEYIVFQPLDTTEINHIVEIQLNRVQNRLRQQKIHLQYTAEAVELLGSLGFDPNYGARPVKRVIQQMVENEIALGVLKGDFKEDDTVLVDVSSAAIAKGLAPQKKLVLQRVENGNDELVAND

SEQ ID NO: 183304 - protein, 474 aa, Zea Mays
MSCQAQFHLLSSANNNNCDAKNSGNDNDDSGKKLQVVSAEGDNGGVNRNKRISRKGRDDNGDDGDDSDDNSNENGDSSSQKKPRVVWSVELHRKFVAAVNQLGIDKAVPKKILDLMNVENITRENVASHLQKYRLYLKRLSADASRQANLTAAFGGRNPAYVNMGLDAFRQYNAYGRYRPVPTTNHSQPNNLLARMNSPAFGMHGLLPSQPLQIGHNQNNLSTSLGNVGGMNNGNLIRGAHMPLQDTSKCFPTGPSGNSFANISNSTQLVTTNNLPLQSLEPSNQQHLGRLHSSADPFNSFVGEPPQFADLGRCNTTWPTAVSSSNVQEIGQKDRIVNRPKLEPLSSFTEASSQIPLLGSEMQSHQVASLASNGLPMPFTQEAVPFAYGSSTNSREMLNNNLALSNSGVNSTLPNLRIDGSVVPGQTLGGSNSGGCVVPPLQDGRIDHQAVSSHLNYNNELMGTGPRRRWRLLH

SEQ ID NO: 183305 - protein, 324 aa, Zea Mays
MLNSFGSYKTTKKSAAAMMDYTSLEAATENFSESNVLGFGGFGSVYKANFDGRFAAAVKRLDGGAHDCKKEFENELDLLGKIRHPNIVSLVGFCIHEENRFVVYELMESGSLDSQLHGPSHGSALSWHIRMKIALDTARGLEYLHEHCNPPVIHRDLKSSNILLDSDFSAKISDFGLAVTSGNHSKGNLKLSGTMGYVAPEYLLDGKLTEKSDVYAFGVVLLELLLGRKPVEKMAQSQCRSIVTWAMPQLTDRSKLPNIIDPMIKNTMDLKHLYQVAAVAVLCVQPEPSYRPLITDVLHSLVPLVPTELGGTLRIGPESPYLRY

SEQ ID NO: 183306 - protein, 239 aa, Zea Mays
MSFHYPDHGLSMDAAAAAAAAAAASSPNPSGFSPGVGGEREKAAIAAHPLYERLLEAHVACLRVATPVDQLPRIDAQIAARPPPLAAAAGAAAAGGPSGGEELDLFMTHYVLLLCSFKEQLQQHVRVHAMEAVMGCWELEQSLQSLTGASPGEGTGATMSDDEDNQVDSEANMFDGNDGSDGMGFGPLMLTEGERSLVERVRQELKNELKVTKKSLLISGKRLCASAELGNFLEILHLC

SEQ ID NO: 183307 - protein, 539 aa, Zea Mays
MAAAARRAIPLVLIFLVSAPLYAADASAAAAGAGANSSSFLLAAEQTQRKDPLDGLRYYTGGWNISDEHYWASVGFTAAPVFAAAAVWFVVFGIGLFIAGCCFCCCPGAGDAYSRACLCVSLVLLLVATAAAAVGCAVLYDGQGRFHGSTVATVDYVVRQSGDTVANLQRFTGFLETAKAAGVGPVALPDDVKGRIDDVVRKVGAASDELAARTASNAAKIRAALETKEGSDSCCGGDANPRFSWPCVLAVWVGIDCLRVGVPGVDPGCRDACTVRYFPPPAQRGGRHVRGDGRVGAAPAGAHGAGRHPAVRRHGRGQGGAEPEQGGELPAGGRAQRRAHQRLQPRLPAAGPAAAQLQPVGPARAAALQPLRGGPPRPRVRAGRGAPRRHHAAAGVAAIRVPWRLRGRRVGGRGVHVPGARHAVHVRAAHRRGRRQLRAVPLRPRPGGAGGLHLRQGDVPVHRRRPLPGPQPVQRPGVPGLARRRRRRAAGSAALGRALAGAPAAERGHGDPVSGLVALQVSSGGEGVSQEPREAVHVI

SEQ ID NO: 183308 - protein, 514 aa, Zea Mays
MAAAARRAIPLVLIFLVSAPLYAADASAAAAGAGANSSSFLLAAEQTQRKDPLDGLRYYTGGWNISDEHYWASVGFTAAPVFAAAAVWFVVFGIGLFIAGCCFCCCPGAGDAYSRACLCVSLVLLLVATAAAAVGCAVLYDGQGRFHGSTVATVDYVVRQSGDTVANLQRFTGFLETAKAAGVGPVALPDDVKGRIDDVVRKVGAASDELAARTASNAAKIRAALETVRKVLIVVAAAMLILAFLGLVFSLCGLESIVYVLVFLGWILVAGTLVLCGTFLLLHNVVDDTCVAMGEWVQHPQARTALDDILPCVDTAAAKEALNRSKEVPPPLNYNQSGPPVPLLCSPYAADLRDRACAPGEVPLDATTPRQAWQRYVCRGVSADAGSGAEVCTSPGRVTPSMYAQLTGAADVSYGLYHYGPALVALADCTFVRETFRSIGDDHCPGLSRYSGQVFRGLLAAAVAVLLAVLLWVVHSRERRRRSEAMEILCLASSPYKYPLEERAFLKSPARPYM

SEQ ID NO: 183309 - protein, 677 aa, Zea Mays
MVYILPRFGATSFLFTEYKYVGLFMGIFAILIFLFLGSVEGFSTKSQPCHYIKDQTCKPALANAIFSTIAFVLGAVTSLVSGFLGMKIATYANARTTLEARKGVGKAFITAFRAGAVMGFLLAASGLLVLYIAINLFGIYYGDDWEGLFEAITGYGLGGSSMALFGRVGGGIYTKAADVGADLVGKVIADNVGDNVGDIAGMGSDLFGSYAESSCAALVVASISSFGINHEFTPMVYPLLVSSVGIIACLITTLFATDFFEIKAVDEIEPALKKQLIISTIVMTIGIALISWLGLPYTFTIFNFGVQKTVQSWQLFLCVAVGLWAGLVIGFVTEYYTSNAYSPVQDVADSCRTGAATNVIFGLALGYKSVIIPIFAIAFSIFLSFSLAAMYGVAVAALGMLSTIATGLAIDAYGPISDNAGGIAEMAGMSHRIRERTDALDAAGNTTAAIGKGFAIGSAALVSLALFGAFVSRAAISTVDVLTPKVFIGLIVGAMLPYWFSAMTMKSVGSAALKMVEEVRRQFNNIPGLMEGTTKPDYATCVKISTDASIKEMIPPGALVMLTPLIVGILFGVETLSGVLAGALVSGVQIAISASNTGGAWDNAKKYIEAGVSEHARTLGPKGSDPHKAAVIGDTIGDPLKDTSGPSLNILIKLMAVESLVFAPFFAAHGGILFKWL

SEQ ID NO: 183310 - protein, 288 aa, Zea Mays
MYGVAVAALGMLSTIATGLAIDAYGPISDNAGGIAEMAGMSHRIRERTDALDAAGNTTAAIGKGFAIGSAALVSLALFGAFVSRAAISTVDVLTPKVFIGLIVGAMLPYWFSAMTMKSVGSAALKMVEEVRRQFNNIPGLMEGTTKPDYATCVKISTDASIKEMIPPGALVMLTPLIVGILFGVETLSGVLAGALVSGVQIAISASNTGGAWDNAKKYIEAGVSEHARTLGPKGSDPHKAAVIGDTIGDPLKDTSGPSLNILIKLMAVESLVFAPFFAAHGGILFKWL

SEQ ID NO: 183311 - protein, 222 aa, Zea Mays
MAKSMRGGMRRGARKKTAGSESTSREVSRIPRCTIGCGGERTFAVAVGTVDLRSPRRCRRVSAVRHIFFFLFCFLQQDGSIETLDAFRPQRRPLRQRLLCFPCRWAAQKKSEEGTTERSTMRQNNTRSLCLVGVRDGQEHAWRDETRREKEDSWVGEHQPGSVEDTEVHDRMWRRTYLRRGCGDCGPAVAEKMPESICCPSYIFFFFVSSSRTDLSKHSTLL

SEQ ID NO: 183312 - protein, 67 aa, Zea Mays
MGCLCMNFWECFYLPSFVISYVARVEMKLVVTCVAAHIGPVCFGFWQLLATKSCCGLPNAQLFSQLL

SEQ ID NO: 183313 - protein, 237 aa, Zea Mays
MYLRLGEVPVVVATSRDAAREVLRTNDVTFATRPWSPTMKIMMQDGLGMVFAPYGDHWRQLRKISILELLSARRVQSFRHVREDEVARLVAAVAATAPGQPVNVSHRIAVLVADSAVRAMIGDRFSRRDEFLVSLEEGLKLVSGFSLGDLFPSSPFMNFLSGTARRAHANHRKNFELMECAIKQHEERRAQAAVNGAAVQEEEAEDLVDVLLRIQKDGGLDMPLTMGIIKAVILRWK

SEQ ID NO: 183314 - protein, 163 aa, Zea Mays
MGVAKHEETSKVEKDSVLRVTREGKERRKRWAQRRTSSKPDKKAPKEVEDEDTKKSEEHEETNTMPGMLPTSVIEILAAREKQTFASDSEEENVKQKVQRRKKRMKTDGPETILLKDVRSTQHVKNALDFLEHRKNRVPRSNAVLKNASKALRLLSSKGNFLS

SEQ ID NO: 183315 - protein, 53 aa, Zea Mays
MRGPAVSWTCRLNVITTDWRTGPHVKQLYCSSRARRRNLPHEIRTRLRPSHQL

SEQ ID NO: 183316 - protein, 53 aa, Zea Mays
MIGGKFFTDIWDNGGREMAQEIIQKSEKGIHDARKVAEAAEKSTEPEGQIGIN

SEQ ID NO: 183317 - protein, 55 aa, Zea Mays
MGSSLGIKSITEPAEASPGPHPKGDDEIRKMAEAIMDKVVDQLLNEAAEIVLKED

SEQ ID NO: 183318 - protein, 80 aa, Zea Mays
MTSNAGILSRTLPSRHSPSHIVVGNGNLIPVTSTGTTHLSHNLPLNNVLVLPSLIKDLIYVRQFTTDNNCFVEFDPFGCS

SEQ ID NO: 183319 - protein, 58 aa, Zea Mays
MEGPDDMPAHIKSSMFGCSLTIPITDGRLNTGTWQGIWLCEHRDHASPRKIVITLNGV

SEQ ID NO: 183320 - protein, 117 aa, Zea Mays
MAAPATTSLLSTLLNLPLAPLSGKSSPPSVVHVARRGPMVVVAAKGYNVQILVDENEGEESIFRRFRREVMRAGVLQEIKRRRRYESKTDEKKRKAREAGRRNRRRNELGSLILIHT

SEQ ID NO: 183321 - protein, 63 aa, Zea Mays
MRPPVPPCLVWSPRSPPPVIRTAEGCCFPGLLIPYQDTAMVSSTGITVVHLSLLRWFSTSDDS

SEQ ID NO: 183322 - protein, 307 aa, Zea Mays
MVKKKNRSSSQSTIAFHTRNFPFSNATANSIHSGERLFLLPLPLSTTPKETENHRRAPSTLPYPASSSPTPPSPAAKPNPRWAPSPLRSRRALPFSRRARRRTGSSSRRRFRPLPHPSLRPRPHPSRRLRPRPHPSRRQRGRRRAVARWWSSRASRGGLTWRRGGCGRSGARRWSRCTCARRGPSSRCSTPTATPPTSARCTSSSSSSAPTSTSTSWGMTILVMGNLLGRCLIETYGASEDNIILYGQSVGSGPTLDLASRLTRLRAVVLHSPILSGLRVMYPVKHTYWFDIYKVINIPMFLILLII

SEQ ID NO: 183323 - protein, 399 aa, Zea Mays
MRSHLFSRSKLRRMQFMSSTELLSLARSSICQQPLCSHQGKITSYGWLMGDTFGQWGRIALQASVVINNVGVLIVYMIIIGDVLSGTSSTGVHHSGVLEGWFGPHMWNSRPIVLLATTLLVFAPLVSFKRLDSLRYTSALSVALAVVFVVITAGVAIVRLIQGTVEIPKLFPEIDGVSSVWKLFTAVPVLVTAYICHYNVHSIDNELEDKTQIKPIVQTSLGLCSSVYIATSFFAYLLFGEATLADVLANFDSDLRIPLSSAFNDIVRVSYVVHIMLVFPIVFFALRLNLDGLLFPTARHISGDNKRFTIITISLIAVIYLAAIFIPSIWDAFQFTGATAAVLIGFIFPAMIILRDPYGVSTKRDKVLAEAGGLEPIPQGKRTSLYRSRVIVELQVSYY

SEQ ID NO: 183324 - protein, 180 aa, Zea Mays
MGSSRNVPHKVMQDEITPLLPIKAEEDAVHEFDGASFSGAVFNLSTTIVGAGIMALPASIKMLGLIPGILMIILVALLTETSIDMLVRCSHQGKITSYGWLMGDTFGQWGRIALQASVVINNVGVLIVYMIIIGDVLSGTSSTGVHHSGVLEGWFGPHMWNSRPIVLLATTLLVFAPLIH

SEQ ID NO: 183325 - protein, 191 aa, Zea Mays
MGSSRNVPHKVMQDEITPLLPIKAEEDAVHEFDGASFSGAVFNLSTTIVGAGIMALPASIKMLGLIPGILMIILVALLTETSIDMLVRCSHQGKITSYGWLMGDTFGQWGRIALQASVVINNVGVLIVYMIIIGDVLSGTSSTGVHHSGVLEGWFGPHMWNSRPIVLLATTLLVFAPLTHPRNCGDPQTVS

SEQ ID NO: 183326 - protein, 65 aa, Zea Mays
MPPPAAHATPPAGQLASRPATAPLCSSRCSIVCRRWCRPTSPSTRLMPCLRHSTIREALSLYRFM

SEQ ID NO: 183327 - protein, 90 aa, Zea Mays
MPPPAAHATPPAGQLASRPATAPLCSSRCSIVCRRWCRPTSPSTRLMPCLRHSTIREGSCSMITTLARGTTCSLCGHWNQNGKPPMQNVL

SEQ ID NO: 183328 - protein, 775 aa, Zea Mays
MELASIPLNRALTVRLLGCLFFLPLPTSARSDGSASNGALLPVNLAALPTRTPTPWRASAAMAADREKEREAELEGAMYTNCLLLGLDPAVLGSPSSPAGRVGLFRHSNPRLGEQLLYFLLSSLRGPAQSAKDFDKVWPIFDSAQSREFRKIVQGIISELEQHGALPRSNSRVSSLATCCGPRFVELLWQLSVHALREVHKRTFAADVVSNPLPAALTDVSYLHAASLLPVTKARIALERRKFLKNANIAVQRQMTWSNLAHEMTAEFRSLCAEEAYLQQELEKLQDMRNKAKLEGELWDERLSGSSGQNSHLVSKATRLWESILARKGQHEVLASGPIEDLIAHREHRYRISGSQLLAAMDMSSSVPHSELLSSKAGETSIILEKQEEFSQLFQEKEEALTRSDDRNGRTQQTVDVAEILRRWTHALQRIHKQSLHLAKANDGEGPELLRSASSGEASTHSDSLTATLAEHRQHLVSIQGLINQLKEAIPAMQQSIDELSEEVNSVSINSMDQLNSRLPLPVQIAGFGTSEESSSEVSEINSKLSSTHLDKPGGSPALKLPPLFSLTPSSSGKGIQTQKRSALARQRSQDITSEQKTLTIPSTKDQMNGSMHENDDYSAHDIRRSVREAALSKPLKNTERPQDKNSDDGSEHFFIPLSISAAKKEMDSVANRCNQRLGLSPQMKFPKSTSYNADTPINKSPILLSELNGHDSISAMSFLDPAGGLAHQSFITDDALDQVFSPLLMESSLFHDADEDLLGDTDTSLYTAMKIGRS

SEQ ID NO: 183329 - protein, 62 aa, Zea Mays
MVHPCTTRGLAHGVTVSETGCLVVDVKRSGAPPVSVDNYTGASKTVMRSTLVVPVAGGRFQF

SEQ ID NO: 183330 - protein, 90 aa, Zea Mays
MIKDYLNWPHALDMGQGKLEPGYSIHEKTIAHWEWRDGESGTYPPGKGPPKKDGVLLGGADLFMQWRIRGNGRHMQELQETYVVWLEILS

SEQ ID NO: 183331 - protein, 156 aa, Zea Mays
MDLNLILKVGLIPNSGGNSSLYALSLIFSKILNGPAARLGKLAPGIKSIWCSIPRMGGSSGGNSEGKTSRNCYKRLVTNVDKMLAISSIEKKSIFANQGIATSISSMSFKKIRFSSKHDRRFQFNLLLNFCLISWFLMGTCSSIFISLYNFSKSQR

SEQ ID NO: 183332 - protein, 205 aa, Zea Mays
MNPSPLLRLWFAVSRTHFLCRRQSLAQFRAHPRSRLRLRCIPKARMGNEMSRIALCLPLSPATTRARRMRSPPRRFMWRKTPRGGTLPSSCRLHPIWTSLAPREIRTQLEVEAASWGQAPPKDRYGEEGDRGGNESAGPAPMLILPLCFYLICFFFCPRHIAGLRPRGYPPSKGSSGEECGRGCNGSAGTSSTLIISFVFCLINF

SEQ ID NO: 183333 - protein, 213 aa, Zea Mays
MNPSPLLRLWFAVSRTHFLCRRQSLAQFRAHPRSRLRLRCIPKARMGNEMSRIALCLPLSPATTRARRMRSPPRRFMWRKTPRGGTLPSSCRLHPIWTSLAPREIRTQLEVEAASWGQAPPKDRYGEEGDRGGNESAGPAPMLILPLCFYLICFFFCPRHIAGLRPRGYPPSKGSSGEECGRGCNGSAGNCVLYKLTLVPHPEHPFFLQVWFN

SEQ ID NO: 183334 - protein, 267 aa, Zea Mays
MNPSPLLRLWFAVSRTHFLCRRQSLAQFRAHPRSRLRLRCIPKARMGNEMSRIALCLPLSPATTRARRMRSPPRRFMWRKTPRGGTLPSSCRLHPIWTSLAPREIRTQLEVEAASWGQAPPKDRYGEEGDRGGNESAGPAPMLILPLCFYLICFFFCPRHIAGLRPRGYPPSKGSSGEECGRGCNGSAGFVQFTKFILLDCKGTVSSISSRSCRTRSTPSSCKSGSIKFFCSVMLQSTWRAMICHYLSEKTASNISVFFSCADHVII

SEQ ID NO: 183335 - protein, 121 aa, Zea Mays
MLNLHFTTCSCHQICFPAWQLISNSIHNRLHLILGEIFQGQRQPQVFTRKGRDATREKILLEVFTRKGRDATRSRCPSNSIKNYEWNINRSRDVEDKSWINLKVMLMNEAKVDESNKCQDG

SEQ ID NO: 183336 - protein, 72 aa, Zea Mays
MFIRCSIERLNQRSSLFSIFWLMFVLGQRQPQVFTRKGRDATREKILLEVFTRKGRDATRSRCPSNSIKNYE

SEQ ID NO: 183337 - protein, 361 aa, Zea Mays
MEAATAATAAMMWFRKGLRVHDNPALDAARRHGAGAASARLYPVFVLDPRYLRPDAVAASPGSARAGVARIRFLLESLSDLDARLRRLGSRLLLLRARDDVADAVCAALKDWNIGKLCFESDTEPYALARDKKVTDFALASGIEVLTPVSHTLFDPEEIIKKNGGRPPLTYQSFVSIAGEPPAPAMEEYSELPPLGDTGEYELLPVPTVEELGYGDISQEEIPPFHGGETEALRRMKESLQNKEWVAKFEKPKGDPSAFVKPSTTVLSPYLKFGCLSSRYFYHCIQDVHRSVRNHTKPPVSLTGQLLWRDFFYTVSYGTPNFDRMKGNKICKQFRFRGARTKIYLLHGEMARQDIRGSMLS

SEQ ID NO: 183338 - protein, 313 aa, Zea Mays
MEAATAATAAMMWFRKGLRVHDNPALDAARRHGAGAASARLYPVFVLDPRYLRPDAVAASPGSARAGVARIRFLLESLSDLDARLRRLGSRLLLLRARDDVADAVCAALKDWNIGKLCFESDTEPYALARDKKVTDFALASGIEVLTPVSHTLFDPEEIIKKNGGRPPLTYQSFVSIAGEPPAPAMEEYSELPPLGDTGEYELLPVPTVEELGYGDISQEEIPPFHGGETEALRRMKESLQNKEWVAKFEKPKGDPSAFVKPSTTVLSPYLKIFLPLHSGCAQERQKPYKTTCFIDRTVAVARLLLHSVLWNT

SEQ ID NO: 183339 - protein, 57 aa, Zea Mays
MALKLRGIKSSVCVVVEVTVYSGQDVNCSPELGISAMAILPRRRDSAGCHHCKVTRI

SEQ ID NO: 183340 - protein, 398 aa, Zea Mays
MAATMAVTTMVTRSKESWSSLQVPAVAFPWKPRGGKTGGLEFPRRLGAAVPGQQAAWEAEEEAAKRRKQKGGGSKKQQQLGDLSLRKVRVKIANPHLRRLVSGAIAGAVSRTFVAPLETIRTHLMVGSIGVDSMAGVFQWIMQNEGWTGLFRGNAVNVLRVAPSKAIEHFTYDTAKKFLTPKGDEPPKIPIPTPLVAGALAGFASTLCTYPMELIKTRVTIEKDVYDNVAHAFVKILRDEGPSELYRGLTPSLIGVVPYAACNFYAYETLKRLYRRATGRRPGADVGPVATLLIGSAAGAIASSATFPLEVARKQMQVGAVGGRQVYQNVLHAIYCILKKEGAGGLYRGLGPSCIKLMPAAGIAFMCYEACKKILVDKEDEEEEDEAGGGEDDKKKVE

SEQ ID NO: 183341 - protein, 254 aa, Zea Mays
MGVKGGDKPKPNYRKGLWSLEEDQKLRDYILLHGHGCWSALPMKAGTNVKIAAIPSSVVVLTSETFDSIVLDEFYAPWCGHCKHLAPIYEKLASVFKQDDSVVIANLDADKHTDLAKKYGVSSFPTLKFFPKGNKAGEDYDGGRDLDDFVKFINEKCGTSRDPKGHLTSEARLVPSLNPLVKEFLNAVDDKRKEVLSKIEEDVAKLSGSAAKHGNIYVTAAKKIMDKGSDYTKKETERLHRMLEKIPSSHSRSC

SEQ ID NO: 183342 - protein, 146 aa, Zea Mays
MHIVSGTNVKIAAIPSSVVVLTSETFDSIVLDEFYAPWCGHCKHLAPIYEKLASVFKQDDSVVIANLDADKHTDLAKKYGVSSFPTLKFFPKGNKAGEDYDGGRDLDDFVKFINEKCGTSRDPKGHLTSEACAKLESSCEGVSQCC

SEQ ID NO: 183343 - protein, 65 aa, Zea Mays
MHGRLRSLRQGQVHVGPITWRFCHTSHFNCSLPTVFGLATLRSTKCPGLIFFNQTFLSRHFIVSA

SEQ ID NO: 183344 - protein, 106 aa, Zea Mays
MKPTMRMAYKSAQKEIERSLGPTIERCGLRPYAAPFTLRSRAFDLARTVVMQNRTSQWGCLRKAAMSPLLNSAALRSDAPATPVEDIDTGCGWSTLRFLYLRQNLV

SEQ ID NO: 183345 - protein, 204 aa, Zea Mays
MESRAASKNVDVAVMPPNSDNAMVPVDGVSPSSSTHPSLAHPNTSANILIPNSLRTLRVYLRTHALDQMVQAVGASAGLRVIKRVDQTLQELAVNLKPKVPTKAVCIEHIELRNELLTLLNLQKQLQNKEAEVSANRESSFTEAPSTPKRSNRDIDRPFIPDTSGFTGERAGKRDHKRKSTGRFIDAPPSPPQSKRPRKLKGSD

SEQ ID NO: 183346 - protein, 436 aa, Zea Mays
MDAKDILGLPKTPFSSSQEKKSRPPKEPQRKPDGVSREVYALTGGVGMPPLMPTIEASHLKRRPAAEKEKVAWQWLPFTSSARTDNLQLYHWVRVVNGIQPTGDYQFAKYNKRADVLKYTDEEYEKYLVDPDWSKEETDQLFELCERFDLRFIIIADKFPTARSVEDLKSPYYSASRALLIHRARSFEDVSGNPLVKDAYDAAHETERKRALSALLSQTKQQERKDAETLAEAKRIMESRAASKNVDVAVMPPNSDNAMVPVDGVSPSSSTHPSLAHPNTSANILIPNSLRTLRVYLRTHALDQMVQAVGASAGLRVIKRVDQTLQELAVNLKPKVPTKAVCIEHIELRNELLTLLNLQKQLQNKEAEVSANRESSFTEAPSTPKRSNRDIDRPFIPDTSERAGKRDHKRKSTGRFIDAPPSPPQSKRPRKLKGSD

SEQ ID NO: 183347 - protein, 392 aa, Zea Mays
MDAKDILGLPKTPFSSSQEKKSRPPKEPQRKPDGVSREVYALTGGVGMPPLMPTIEASHLKRRPAAEKEKVAWQWLPFTSSARTDNLQLYHWVRVVNGIQPTGDYQFAKYNKRADVLKYTDEEYEKYLVDPDWSKEETDQLFELCERFDLRFIIIADKFPTARSVEDLKSPYYSASRALLIHRARSFEDVSGNPLVKDAYDAAHETERKRALSALLSQTKQQERKDAETLAEAKRIMESRAASKLRVYLRTHALDQMVQAVGASAGLRVIKRVDQTLQELAVNLKPKVPTKAVCIEHIELRNELLTLLNLQKQLQNKEAEVSANRESSFTEAPSTPKRSNRDIDRPFIPDTSGFTGERAGKRDHKRKSTGRFIDAPPSPPQSKRPRKLKGSD

SEQ ID NO: 183348 - protein, 373 aa, Zea Mays
MDAKDILGLPKTPFSSSQEKKSRPPKEPQRKPDGVSREVYALTGGVGMPPLMPTIEASHLKRRPAAEKEKVAWQWLPFTSSARTDNLQLYHWVRVVNGIQPTGDYQFAKYNKRADVLKYTDEEYEKYLVDPDWSKEETDQLFELCERFDLRFIIIADKFPTARSVEDLKSPYYSASRALLIHRARSFEDVSGNPLVKDAYDAAHETERKRALSALLSQTKQQERKDAETLAEAKRIMESRAASKNVDVAVMPPNSDNAMVPVDGVSPSSSTHPSLAHPNTSANILIPNSLRTLRVYLRTHALDQMVQAVGASAGLRVIKRVDQTLQELAVNLKPKVPTKAVCIEHIELRNELLTLLNLQKQVAEVLIPNFDLF

SEQ ID NO: 183349 - protein, 106 aa, Zea Mays
MGADSEDAVKQLSLLMEQVEAPLKRSFQNMHQGYPKETLVRFLKAREWNVPKAHKMIVDSLDWRIENEIDSVLERPIVPVDLYRSIRDSQLIGLSGYTKEATTTAK

SEQ ID NO: 183350 - protein, 110 aa, Zea Mays
MGADSEDAVKQLSLLMEQVEAPLKRSFQNMHQGYPKETLVRFLKAREWNVPKAHKMIVDSLDWRIENEIDSVLERPIVPVDLYRSIRDSQLIGLSGYTKEWQYRRLCPRV

SEQ ID NO: 183351 - protein, 317 aa, Zea Mays
MWDSVIEVLGIVERDGRISSAAGGLIEKMENFKFVFILKLMGNLFSITNDLSQVLQRKDINIIHAIDLVDDVKYQLIALRDHGWEDFLDEVKKFCEAKCVLVPNMDDEIPCRSRSRRERLIITNLHHYRVELFYVTIDQIIADMNHRFNEATTEILTCFSCLDPKNNFSKFDTDKLFRLAEIYDADFSNSDRSLIRGQLETYILQVRRHAAFASCKDVASLAIKMVETGKHLVFPLVYKLIELVLILPVSTASVERSFSAMKIIKSKLRNKIGDEWFNHLMVCYTEREIFKGLDDVTIMRRFQNIKTRKMNLPCGRN

SEQ ID NO: 183352 - protein, 290 aa, Zea Mays
MLLRQWADSDDYLRQTMATRMKDKYNKYWGNWHDNENDNENANEGRGKGKLKEKENMNLLIFVATALDPRYKLSNYTKLAIGEMFGEEKGENVWNAVRQCFYDLFEEYRSMYSPNDDSMAEVNEDQTQKRGGRMMRSLIAKKMKVGSGSICITKSEIDKYLSEDNEDDNNKFDILAWWKVNESRFPILACIARDVLAIPISTVASESVFSTGGRILDDFRSSLTPFMVQALICTQDWLRRSTLINIEEDVEELTKLEEELIAEHNDAKAMEKAAKSKSITKPSSDVISHD

SEQ ID NO: 183353 - protein, 83 aa, Zea Mays
MILHWSNLHAGHLGGSSPPRQSSHFGSKKMRRFLVDRSLLSAPQGQSAIATQPNPPQAQSRGGNEINLDEIVSDPALRKPIHE

SEQ ID NO: 183354 - protein, 55 aa, Zea Mays
MQRHRQGSACKSIRYFLYFFFSMTVMEFICSPKTVFPHDIVRCQSWCSRICYGAK

SEQ ID NO: 183355 - protein, 120 aa, Zea Mays
MSSNPQIIVQALCAIAPKPNTLEPSVDGRKEVRTMENLGGSMPRRSLRVRPGKDGHLGIVSLKLTDEEIAEDLYAMTGELPRGHPRRRLSQAQIMLNKLVPGAPLAGMAPETYPMCQKKN

SEQ ID NO: 183356 - protein, 421 aa, Zea Mays
MFLLLSQRILPSHVWSIAMEIGLSGGDYVSLGWHEKEDLKCAVSCLRDNKQVSTIGLWGRSMGAVTCLLYGAEDPSIGGMILDSAFTNLYDLMMELVDVYKIRVPKFTVKMAVQYMRRIIQKRAKFDIMDLNVLRLAPKMFIPVLFGHGLNDMFIQPHHCDRIHQAYGGDKNIIKFDGDHNSPRPQSYYDSVSIFFYKSLHPPLLPAARSKLHMGAFKVGNITNENFFFEIINGLRPANTAGCSSSTDAPNIPHDGTSVIELLSDSMNQLSIKNENHLLQDFLLDENHSLPEIDSDSVGSRLQDKRSRRNEESFSFTSSNRESWGRCSSLGAASDESFSGDNNDKQNLTVKALATPVRQNQRQSQRKPIEKAKQKKIQALWKKIKREKVEMGDSLSSRLKMCLGQSPQHKRNRSSGTITTS

SEQ ID NO: 183357 - protein, 360 aa, Zea Mays
MGAVTCLLYGAEDPSIGGMILDSAFTNLYDLMMELVDVYKIRVPKFTVKMAVQYMRRIIQKRAKFDIMDLNVLRLAPKMFIPVLFGHGLNDMFIQPHHCDRIHQAYGGDKNIIKFDGDHNSPRPQSYYDSVSIFFYKSLHPPLLPAARSKLHMGAFKVGNITNENFFFEIINGLRPANTAGCSSSTDAPNIPHDGTSVIELLSDSMNQLSIKNENHLLQDFLLDENHSLPEIDSDSVGSRLQDKRSRRNEESFSFTSSNRESWGRCSSLGAASDESFSGDNNDKQNLTVKALATPVRQNQRQSQRKPIEKAKQKKIQALWKKIKREKVEMGDSLSSRLKMCLGQSPQHKRNRSSGTITTS

SEQ ID NO: 183358 - protein, 361 aa, Zea Mays
MFLLLSQRILPSHVWSIAMEIGLSGGDYVSLGWHEKEDLKCAVSCLRDNKQVSTIGLWGRSMGAVTCLLYGAEDPSIGGMILDSAFTNLYDLMMELVDVYKIRVPKFTGDKNIIKFDGDHNSPRPQSYYDSVSIFFYKSLHPPLLPAARSKLHMGAFKVGNITNENFFFEIINGLRPANTAGCSSSTDAPNIPHDGTSVIELLSDSMNQLSIKNENHLLQDFLLDENHSLPEIDSDSVGSRLQDKRSRRNEESFSFTSSNRESWGRCSSLGAASDESFSGDNNDKQNLTVKALATPVRQNQRQSQRKPIEKAKQKKIQALWKKIKREKVEMGDSLSSRLKMCLGQSPQHKRNRSSGTITTS

SEQ ID NO: 183359 - protein, 85 aa, Zea Mays
MQSKYGNVRSPPRSHFISPGLLRQQHAKRSYPNPNIGIGTNNESSSRKRAMKAMGNVNQPKVEYDNLEDECVNLESKKWGLKINI

SEQ ID NO: 183360 - protein, 74 aa, Zea Mays
MRAWLQLVASPTHKKRLASRANPDPHRSSCVTRFGPRSAPSLTMGSTAVSLEYSRTIASSTAMRSREFEDQLGT

SEQ ID NO: 183361 - protein, 74 aa, Zea Mays
MKTEPAAWCSPSARQKARTSCATQVRFVKIIQSKKRSSAIDYRRKEGPWMTSTGNRHRTSDYCVEVVRVRELTT

SEQ ID NO: 183362 - protein, 100 aa, Zea Mays
MPCDHSGLTCTMRHIPEPPSPHTPVKPRGSALIPLVTPRPIPGPTILTPRSSLGSYIIPTDQHESFVRTLSSLMRTRENFPVGHSSQIAPSQARLTWKFF

SEQ ID NO: 183363 - protein, 275 aa, Zea Mays
MASVLEKIDEMLLLAVYKKVCTSLGASRRRWAPKPFVARSFKPPTTYSKPTPPRAMIGPVSSLSEPSPGPPSPSSSPSPAASSRKAIWYFEGIYAYSPQIPGVRFPGLTHPGIVGTAPSAKLLNVWNEREKRLAETSPQTLKLFEVLHQRPLANLPTPENCLLGKIQEGTAGWHKVANEAAKTIPGRENGGNCDIKNLSRGSKVYLPVFVEGANLSTGDMHFSQGDGEVSFCGAIEMSGFLELKRIRRISSSRESGSGAKEAGVGALSNGPLLTN

SEQ ID NO: 183364 - protein, 121 aa, Zea Mays
MYITLSSPISTQFWNSVEDCLRASGSLLIVLRVVDGYKRSTKEQKEFLKSIMAIIERHWEKQMDHPLYGAAMYLNPGKLHPLIRNDDDATVGQLRGCFLDVLAKMVDDEETRDKINSQAMD

SEQ ID NO: 183365 - protein, 648 aa, Zea Mays
MSLDSEASSQGLLFEMLRSTRKNSKSTWKVLIMDKFTVKIMSYACKMADITEEGVSLVEDLYKRRQPLPSLDAIYFIQPTKENIVMFLSDMSGRSPLYKKAYVFFSSPVHKELVAQIKKDSSVLPRIAALSEMNLEYFAIDSQGFITDHERALEELFSENAEGSHKYNACLNTMATRISTVFASMREFPRVHYRIAKTIDASTMTTLRDLVPTKLAASVWNCLAKYKTTIPEFPQTETCELLIVDRSIDQIAPIIHEWTYDAMCHDLLCMDGNKYVHEVPTKNGSATEKKEVLLEDHDPVWLELRHAHIADASERLHDKMTNFISKNKAAQLHQARTDGELSTRDLQKMVQALPQYSDQIDKLSLHVEIAGKLNNIIREQCLRDVGQLEQDLVFGDAGTKELINFLRTQLVVSRENKLRLLMIYAALNPEKFESDKGAKLMQLAGLSADDMIAVNNMRCLCGPDTKKSSVGGFTLKFDVHKKKHTNRKERTGEESTWALSRFYPILEQLIENLSKGELPKDEYNCMNDPSPTVHGLPTSSSARTSPAHSMRSRRTGGTWARPRGSDDGYSSDSVLKHASSDFRKLGQRIFVFVIGGATRSELRAAHKLSSKLKRDIILGSSSLDDPPQFITKLKLMSVEELTLDDLQL

SEQ ID NO: 183366 - protein, 424 aa, Zea Mays
MSLDSEASSQGLLFEMLRSTRKNSKSTWKVLIMDKFTVKIMSYACKMADITEEGVSLVEDLYKRRQPLPSLDAIYFIQPTKENIVMFLSDMSGRSPLYKKAYVFFSSPVHKELVAQIKKDSSVLPRIAALSEMNLEYFAIDSQGFITDHERALEELFSENAEGSHKYNACLNTMATRISTVFASMREFPRVHYRIAKTIDASTMTTLRDLVPTKLAASVWNCLAKYKTTIPEFPQTETCELLIVDRSIDQIAPIIHEWTYDAMCHDLLCMDGNKYVHEVPTKNGSATEKKEVLLEDHDPVWLELRHAHIADASERLHDKMTNFISKNKAAQLHQARTDGELSTRDLQKMVQALPQYSDQIDKLSLHVEIAGKLNNIIREQCLRDVGQLEQDLVFGDAGTKELINFLRTQLHLTQRSLKATRVQN

SEQ ID NO: 183367 - protein, 437 aa, Zea Mays
MSLDSEASSQGGDYRSFRQITRDRLLFEMLRSTRKNSKSTWKVLIMDKFTVKIMSYACKMADITEEGVSLVEDLYKRRQPLPSLDAIYFIQPTKENIVMFLSDMSGRSPLYKKAYVFFSSPVHKELVAQIKKDSSVLPRIAALSEMNLEYFAIDSQGFITDHERALEELFSENAEGSHKYNACLNTMATRISTVFASMREFPRVHYRIAKTIDASTMTTLRDLVPTKLAASVWNCLAKYKTTIPEFPQTETCELLIVDRSIDQIAPIIHEWTYDAMCHDLLCMDGNKYVHEVPTKNGSATEKKEVLLEDHDPVWLELRHAHIADASERLHDKMTNFISKNKAAQLHQARTDGELSTRDLQKMVQALPQYSDQIDKLSLHVEIAGKLNNIIREQCLRDVGQLEQDLVFGDAGTKELINFLRTQLHLTQRSLKATRVQN

SEQ ID NO: 183368 - protein, 461 aa, Zea Mays
MSLDSEASSQGGDYRSFRQITRDRLLFEMLRSTRKNSKSTWKVLIMDKFTVKIMSYACKMADITEEGVSLVEDLYKRRQPLPSLDAIYFIQPTKENIVMFLSDMSGRSPLYKKAYVFFSSPVHKELVAQIKKDSSVLPRIAALSEMNLEYFAIDSQGFITDHERALEELFSENAEGSHKYNACLNTMATRISTVFASMREFPRVHYRIAKTIDASTMTTLRDLVPTKLAASVWNCLAKYKTTIPEFPQTETCELLIVDRSIDQIAPIIHEWTYDAMCHDLLCMDGNKYVHEVPTKNGSATEKKEVLLEDHDPVWLELRHAHIADASERLHDKMTNFISKNKAAQLHQARTDGELSTRDLQKMVQALPQYSDQIDKLSLHVEIAGKLNNIIREQCLRDVGQLEQDLVFGDAGTKELINFLRTQLVVSRENKLRLLMIYAALNPEKFESDKGAKLMQDYLLMT

SEQ ID NO: 183369 - protein, 169 aa, Zea Mays
MRLAVTVLVGLARVPEVAADEGVVSTVPLVTEVVAKSRIVCCRTDPAITEECFELLSLIAIASEDGAYEFCEPGVIDMIFLQILILTDGHIAKNLPHYVCLSLQYFLAYRRFLEIDTLHSSRQLYLCEKISLTGEMYFAITLDRKTTVHERSPFTSMNHGVMSLNHVSC

SEQ ID NO: 183370 - protein, 148 aa, Zea Mays
MRLAVTVLVGLARVPEVAADEGVVSTVPLVTEVVAKSRIVCCRTDPAITEECFELLSLIAIASEDGAYEFCEPGVIDMIFLQILILTDGHIAKNLPHYVCLSLQYFLAYRRFLEIDTLHSSRQLYLCEKISLTGEMYFAITLDRKTTD

SEQ ID NO: 183371 - protein, 84 aa, Zea Mays
MSIFLIKASFLLGWFIYFKSSYELFFQDVLGNRQGIFAIQLVIIYDPLNSIFLSHVLILYTSLENLRGDLFLFNIACMFISWLF

SEQ ID NO: 183372 - protein, 150 aa, Zea Mays
MTSCSSCSRSVASHSLCSTLPCCRTPTPSIFSSVPCPWLRARASLFGCRRASSSVGLASRRCPILASPHPWSCSSSSPMLCLIQLSSLLRASLLARRVSSDVPQHSCLPLTRVSARAPARCHCGALALRPSGFARARVYRRAVEPILPCS

SEQ ID NO: 183373 - protein, 60 aa, Zea Mays
MFTIFTVLVHINVKEHDSAMELVIRFNMKIGRCIYPSVKINPKKIMTLVCCLTCRILARW

SEQ ID NO: 183374 - protein, 192 aa, Zea Mays
MRSGGVINAEITSSLLKSVESGDLIAYGLIPEFVGRFPILVGLSSLSEDQLVEVLTEPKNALGRQYTKLFEMNDVKLHFTEEALRLIAKRAISKNTGARGLRSILESILTEAMYEIPETRTGKDKIDAVVVDEESVGSVNQHGIGAKILCGEKALDVYLANHNNKESTGQLQERPNGESEIDTEAPSRVASM

SEQ ID NO: 183375 - protein, 314 aa, Zea Mays
MGTEMVNSLPHVKAADFDVAAAQQGIVYIDEVDKITKKAESINLSRDVSGEGVQQALLKMLEGTVVSVPEKGARRHPRGDNIQIDTKNILFICGGAFVDLEKTISERRHDSSIGFRAQVRSNMRSGGVINAEITSSLLKSVESGDLIAYGLIPEFVGRFPILVGLSSLSEDQLVEVLTEPKNALGRQYTKLFEMNDVKLHFTEEALRLIAKRAISKNTGARGLRSILESILTEAMYEIPETRTGKDKIDAVVVDEESVGSVNQHGIGAKILCGEKALDVYLANHNNKESTGQLQERPNGESEIDTEAPSRVASM

SEQ ID NO: 183376 - protein, 326 aa, Zea Mays
MKYVKIVKDNIKHKLWICLQARQSEAADFDVAAAQQGIVYIDEVDKITKKAESINLSRDVSGEGVQQALLKMLEGTVVSVPEKGARRHPRGDNIQIDTKNILFICGGAFVDLEKTISERRHDSSIGFRAQVRSNMRSGGVINAEITSSLLKSVESGDLIAYGLIPEFVGRFPILVGLSSLSEDQLVEVLTEPKNALGRQYTKLFEMNDVKLHFTEEALRLIAKRAISKNTGARGLRSILESILTEAMYEIPETRTGKDKIDAVVVDEESVGSVNQHGIGAKILCGEKALDVYLANHNNKESTGQLQERPNGESEIDTEAPSRVASM

SEQ ID NO: 183377 - protein, 255 aa, Zea Mays
MLEGTVVSVPEKGARRHPRGDNIQIDTKNILFICGGAFVDLEKTISERRHDSSIGFRAQVRSNMRSGGVINAEITSSLLKSVESGDLIAYGLIPEFVGRFPILVGLSSLSEDQLVEVLTEPKNALGRQYTKLFEMNDVKLHFTEEALRLIAKRAISKNTGARGLRSILESILTEAMYEIPETRTGKDKIDAVVVDEESVGSVNQHGIGAKILCGEKALDVYLANHNNKESTGQLQERPNGESEIDTEAPSRVASM

SEQ ID NO: 183378 - protein, 506 aa, Zea Mays
MSAAVRSRAAAAALSAARRIHAGHAAGQKQQGSNSTGAFRRPWTLFRRQQQEERSHVPRAAAPVLDAVADHRAGGSDGAEPPEIWRQPGEAPVAPEGVGAVGRIDVVRVAAPGGEDFDGKDGGGESGGWGGSNLGRRFPTPKEICRGLDKFVIGQQRAKKVLSVAVYNHYKRIYCESLINRSAADCSQSDSCTSDTDMVELEKSNILVMGPTGSGKTLLAKTLARFVNVPFVIADATSLTQAGYVGEDVESILYKLLAAADFDVAAAQQGIVYIDEVDKITKKAESINLSRDVSGEGVQQALLKMLEGTVVSVPEKGARRHPRGDNIQIDTKNILFICGGAFVDLEKTISERRHDSSIGFRAQVRSNMRSGGVINAEITSSLLKSVESGDLIAYGLIPEFVGRFPILVGLSSLSEDQLVEVLTEPKNALGRQYTKLFEMNDVKLHFTEEALRLIAKRAISKNTGARGLRSILESILTEAMYEGQLQERPNGESEIDTEAPSRVASM

SEQ ID NO: 183379 - protein, 295 aa, Zea Mays
MSAAVRSRAAAAALSAARRIHAGHAAGQKQQGSNSTGAFRRPWTLFRRQQQEERSHVPRAAAPVLDAVADHRAGGSDGAEPPEIWRQPGEAPVAPEGVGAVGRIDVVRVAAPGGEDFDGKDGGGESGGWGGSNLGRRFPTPKEICRGLDKFVIGQQRAKKVLSVAVYNHYKRIYCESLINRSAADCSQSDSCTSDTDMVELEKSNILVMGPTGSGKTLLAKTLARFVNVPFVIADATSLTQAADFDVAAAQQGIVYIDEVDKITKKAESINLSRDVSGEGVQQALLKMLEGTIGC

SEQ ID NO: 183380 - protein, 235 aa, Zea Mays
MSAAVRSRAAAAALSAARRIHAGHAAGQKQQGSNSTGAFRRPWTLFRRQQQEERSHVPRAAAPVLDAVADHRAGGSDGAEPPEIWRQPGEAPVAPEGVGAVGRIDVVRVAAPGGEDFDGKDGGGESGGWGGSNLGRRFPTPKEICRGLDKFVIGQQRAKKVLSVAVYNHYKRIYCESLINRSAADCSQSDSCTSDTDMVELEKSNILVMGPTGSVRENIAGKNTGKICERALRYS

SEQ ID NO: 183381 - protein, 186 aa, Zea Mays
MRSGGVINAEITSSLLKSVESGDLIAYGLIPEFVGRFPILVGLSSLSEDQLVEVLTEPKNALGRQYTKLFEMNDVKLHFTEEALRLIAKRAISKNTGARGLRSILESILTEAMYEIPETRTGKDKIDAVVVDEESVGSVNQHGIGAKILCGEKALDVYLANHNNKESTDATCLAAYVGVSMVEVIN

SEQ ID NO: 183382 - protein, 105 aa, Zea Mays
MLANPVENLTIIVDADDDLLKVGTGICSSTPKIVEPQQHNCTSVTEDHLIIPKEADNVCGQHYPITEKIYRSHMWQREQSKEEWCRMHWTVMLEYGTSGGCQLQP

SEQ ID NO: 183383 - protein, 281 aa, Zea Mays
MARKRQAPPPPPPPPPPQEEEDESSSEESGSEEESPRLPELRRPSQAAAANNADSSDADSDSDADVQAFQMRQVPRFPTKQTHPVSHPESGAEEEEGELSESEHENPVPVVQKKAVAAAGMSKTGQERKRPASDPAPSGKAKKTKAEATPPAKAKKGEKLAPDATPAGKAKKGKTELETLAPDATPAGKAKKGKVEKTAPEATPSGKGKKGGDKLEKPAALDRSPSDSKSEKLAHFSRTWEKDDEMKILEALAAHVKSEGVLPKTDFLLASVRDRLVRKNE

SEQ ID NO: 183384 - protein, 55 aa, Zea Mays
MHFDYWAPSCYVVLLYFNYPVFIYHINRYLRLLFKYNYCLFLNTVRVVCWLTLNF

SEQ ID NO: 183385 - protein, 619 aa, Zea Mays
MEARPEWDLRKMRELRFVVLLLVISLPCFSASDRQGDALYDMKQKLNVTGGQLSDWNQNQVNPCTWNSVICDNNNNVIQVTLAARGFTGVLSPRIGELQNLSVLSLAGNRITGTIPEEFGNLSSLTSLDLEDNLLVGEVPASLGNLSKLQLLILSQNNFNGSIPGSIANISSLTDIRLAYNNLSGQIPGLLFQVARYNFSGNHLNCGPNFPHYCASNTSYPSGSHNSKIGLILGTVGGILGLIIVGALFLICNARRKSHLREVFVDVAGEDDRRIAFGQLKRFAWRELQIATDNFNERNVLGQGGFGKVYKGVLPDGTKIAVKRLTDYESPGGEAAFLREVELISVAVHRNLLRLIGFCTTQTERLLVYPFMQNLSVAYRLRDFKPGEAILDWPSRKRVAIGTARGLEYLHEHCNPKIIHRDVKAANVLLDEDFEPVVGDFGLAKLVDVQKTSVTTQVRGTMGHIAPEYLSTGKSSERTDVFGYGIMLLELVTGQRAIDFSRLEDEDDVLLLDHVKKLQREGELDSIVDSNLNQNYDGEDIEMIIQIALLCTQASPEDRPSMSEVVRMLEGEGLAERWEEWQHVEVTRRQEYERMQRRFDWGEDSFYNQEAIELSAGIL

SEQ ID NO: 183386 - protein, 618 aa, Zea Mays
MEARPEWDLRKMRELRFVVLLLVISLPCFSASDRQGDALYDMKQKLNVTGGQLSDWNQNQVNPCTWNSVICDNNNNVIQVTLAARGFTGVLSPRIGELQNLSVLSLAGNRITGTIPEEFGNLSSLTSLDLEDNLLVGEVPASLGNLSKLQLLILSQNNFNGSIPGSIANISSLTDIRLAYNNLSGQIPGLLFQVARYNFSGNHLNCGPNFPHYCASNTSYPSGSHNSKIGLILGTVGGILGLIIVGALFLICNARRKSHLREVFVDVAGEDDRRIAFGQLKRFAWRELQIATDNFNERNVLGQGGFGKVYKGVLPDGTKIAVKRLTDYESPGGEAAFLREVELISVAVHRNLLRLIGFCTTQTERLLVYPFMQNLSVAYRLRDFKPGEAILDWPSRKRVAIGTARGLEYLHEHCNPKIIHRDVKAANVLLDEDFEPVVGDFGLAKLVDVQKTSVTTQVRGTMGHIAPEYLSTGKSSERTDVFGYGIMLLELVTGQRAIDFSRLEDEDDVLLLDHVKKLQREGELDSIVDSNLNQNYDGEDIEMIIQIALLCTQASPEDRPSMSEVVRMLEGEGLAERWEEWQHVEVTRRQEYERMQRRFDWGEDSFYNQEAIELSAGR

SEQ ID NO: 183387 - protein, 246 aa, Zea Mays
MADNSDLRVTIAQVAESVKALQATAEANARATRPSSSCPAPSKSRADTTPTDHLHVSRSSISPNTMVLDLREMKNAGNRLISALSLARYRHLKVLNLEFAQDIEDRYFVHLKEMSGISLENLEFLNLNACQKISDKGIEAVTSLCPNLQRLAIYWIVGLTDSSIGHITKNCKHLVHLNLSGCKNIKDKGMQLIANNYQGLKRLNITRCVKLTDDGLNQVLLKCSSLESLNLYALSSFTDSVYREIG

SEQ ID NO: 183388 - protein, 146 aa, Zea Mays
MKNAGNRLISALSLSGISLENLEFLNLNACQKISDKGIEAVTSLCPNLQRLAIYWIVGLTDSSIGHITKNCKHLVHLNLSGCKNIKDKGMQLIANNYQGLKRLNITRCVKLTDDGLNQVLLKCSSLESLNLYALSSFTDSVYREIG

SEQ ID NO: 183389 - protein, 220 aa, Zea Mays
MAAPAADEAWCRKTVPRVMELVCRRLPQRDACALLAVSPWCYRALVANSRLWEVLDLREMKNAGNRLISALSLSGISLENLEFLNLNACQKISDKGIEAVTSLCPNLQRLAIYWIVGLTDSSIGHITKNCKHLVHLNLSGCKMYSVKLGSDDGIRSHRDRCAQALPRTWRPVCGCPWQPLCSGLRGRRLRHRGRAAEQKYSELLKNTPECDDCFSLRVWA

SEQ ID NO: 183390 - protein, 130 aa, Zea Mays
MLSQSHLWRRFFSPAKKTLVVAFSPFCPYLAATPFPPSHTWPPLSPFPLDWLSSPPMAAPLHGFLLPLDLPPRSKDREEEEHIELKGKRGSRRCSSPSLLAEFLGETLGMDEILVAPCNYVLLEVVDHGN

SEQ ID NO: 183391 - protein, 238 aa, Zea Mays
MAKIPLPFNRSTIRSILIQTVSASNCTQGSLRYWLSAGPGDFQLSSSGCTNPALYAVVIESPSLQVPSCCRVVTSSIPIKSPQFAVMKSVNYLPNALTKVEGEENGAFTGIWLDDEGFVAEGSNMNVGFVTKNKELLMPRFDKILSGCTARRVLTLAEHLVAHGKLSRVISRNVSVEEGKMADEMMLIGSGILVKPVVQWDDKIIGSGQEGPIAQALYDLILEDMRSGPPSVRIPIPY

SEQ ID NO: 183392 - protein, 415 aa, Zea Mays
MRVDHRSFPLRPPSQNPMAHLPSSPAAAVPTGHRVSPSPHSCRSLPQLKTVLLSIGAAAGPPRRSWRGMESVAAAPTGSDNAATGTIAHANEVPVLSFSEVAERLDTFHASGARNQNYMAMYSSIFGGITTNPSAMVIPIDDHMVHRGHGVFDTAAIMDGHLYELEQHLDRFLKSASMAKIPLPFNRSTIRSILIQTVSASNCTQGSLRYWLSAGPGDFQLSSSGCTNPALYAVVIESPSLQVPSCCRVVTSSIPIKSPQFAVMKSVNYLPNALTKVEGEENGAFTGIWLDDEGFVAEGSNMNVGFVTKNKELLMPRFDKILSGCTARRVLTLAEHLVAHGKLSRVISRNVSVEEGKMADEMMLIGSGILVKPVVQWDDKIIGSGQEGPIAQALYDLILEDMRSGPPSVRIPIPY

SEQ ID NO: 183393 - protein, 316 aa, Zea Mays
MRVDHRSFPLRPPSQNPMAHLPSSPAAAVPTGHRVSPSPHSCRSLPQLKTVLLSIGAAAGPPRRSWRGMESVAAAPTGSDNAAATGTIAHANEVPVLSFSEVAERLDTFHASGARNQNYMAMYSSIFGGITTNPSAMVIPIDDHMVHRGHGVFDTAAIMDGHLYELEQHLDRFLKSASMAKIPLPFNRSTIRSILIQTVSASNCTQGSLRYWLSAGPGDFQLSSSGCTNPALYAVVIESPSLQVPSCCRVVTSSIPIKSPQFAVMKSVNYLPNALTKVEGEENGAFTGIWLDDEGFVAEGSNMRSGPPSVRIPIPY

SEQ ID NO: 183394 - protein, 190 aa, Zea Mays
MRVDHRSFPLRPPSQNPMAHLPSSPAAAVPTGHRVSPSPHSCRSLPQLKTVLLSIGAAAGPPRRSWRGMESVAAAPTGSDNAAATGTIAHANEVPVLSFSEVAERLDTFHASGARNQNYMAMYSSIFGGITTNPSAMVIPIDDHMVHRGHGVFDTAAIMDGHEKRELLAQCTHQGGRRREWCIYWHLARR

SEQ ID NO: 183395 - protein, 152 aa, Zea Mays
MKSVNYLPNALTKVEGEENGAFTGIWLDDEGFVAEGSNMNVGFVTKNKELLMPRFDKILSGCTARRVLTLAEHLVAHGKLSRVISRNVSVEEGKMADEMMLIGSGILVKPVVQWDDKIIGSGQEGPIAQALYDLILEDMRSGPPSVRIPIPY

SEQ ID NO: 183396 - protein, 348 aa, Zea Mays
MESVAAAPTGSDNAAATGTIAHANEVPVLSFSEVAERLDTFHASGARNQNYMAMYSSIFGGITTNPSAMVIPIDDHMVHRGHGVFDTAAIMDGHLYELEQHLDRFLKSASMAKIPLPFNRSTIRSILIQTVSASNCTQGSLRYWLSAGPGDFQLSSSGCTNPALYAVVIESPSLQVPSCCRVVTSSIPIKSPQFAVMKSVNYLPNALTKVEGEENGAFTGIWLDDEGFVAEGSNMNVGFVTKNKELLMPRFDKILSGCTARRVLTLAEHLVAHGKLSRVISRNVSVEEGKMADEMMLIGSGILVKPVVQWDDKIIGSGQEGPIAQALYDLILEDMRSGPPSVRIPIPY

SEQ ID NO: 183397 - protein, 267 aa, Zea Mays
MQMKFLSCLSLSHLYELEQHLDRFLKSASMAKIPLPFNRSTIRSILIQTVSASNCTQGSLRYWLSAGPGDFQLSSSGCTNPALYAVVIESPSLQVPSCCRVVTSSIPIKSPQFAVMKSVNYLPNALTKVEGEENGAFTGIWLDDEGFVAEGSNMNVGFVTKNKELLMPRFDKILSGCTARRVLTLAEHLVAHGKLSRVISRNVSVEEGKMADEMMLIGSGILVKPVVQWDDKIIGSGQEGPIAQALYDLILEDMRSGPPSVRIPIPY

SEQ ID NO: 183398 - protein, 50 aa, Zea Mays
MESRGMGSPAMATAASWFVPSRPGPIGEKSAQPFDRVLRLGFNLGAGWCG

SEQ ID NO: 183399 - protein, 81 aa, Zea Mays
MICLSCSWQVPENSVFVMGDNRNNSYDSHVWGPLPAKNILGRSIFRYWPPGRIGGTTKGCFSPELSPGAKPESLTDVKSTK

SEQ ID NO: 183400 - protein, 232 aa, Zea Mays
MSSVHFFPASSQTPVPACLLKTSPKSPLPCPRTLATTSLQSVGGNCNAWHRPHLRLQRRVRTPAAPSDAPPVGPDGGSGGGGAGGGSGGEDEEEEGEKKKGLLPEWMNLTTEDAKTVLAAVAISLAFRTFVAEPRFIPSLSMFPTFDVGDRIVAEKVTYYFRKPCVNDIIIFKSPPVLQEVGYTDNDVFIKRVVAREGDVVEVHEGKLVVNGEGRNEEFILEPPSYDMNPVV

SEQ ID NO: 183401 - protein, 155 aa, Zea Mays
MGSVRNCRIPSPDPGFSCADRCTDHLVPVVQCDCLYQKISEDLAVNIALALRADINKALALLREIALGHNLMKFLGVVVALWILSEIGELCDLLRLMYIVVLILHTVPILYHKYQDQVDNFAAKAHRELCKQYAVLDAKVLSKIPRAPPKDKKQN

SEQ ID NO: 183402 - protein, 367 aa, Zea Mays
MLPRTGKAPVPWPRFLSWCALALALPTLSRSIYYIFNETFSNTMIIRTATRMYYTHKKSFIQFSEKNSHIISRQISEGSSHVRERKTTHRPNHDCRRRVVARERKRSPSPKEKGSTPTHQESVELLLPAASCSSTLSPHKLDSSLGHGCTRGGDACRRGYGVTTAAGEDKSVHKALGGGKTADVLLWKDKKTSAAVVGGATVLWVLFEIVEYHLLTLVSHVLIAALTILFLWSNATVFIKKSPPDVPEVQISEDLAVNIALALRADINKALALLREIALGHNLMKFLGVVVALWILSEIGELCDLLRLMYIVVLILHTVPILYHKYQDQVDNFAAKAHRELCKQYAVLDAKVLSKIPRAPPKDKKQN

SEQ ID NO: 183403 - protein, 546 aa, Zea Mays
MVQSLHKQDSKMVTKKTIKLLDAPPYSKRLKLEPVQTGRDAEIKGHEFISQKNVPDLAPCATSEKSRLLKQKRISDAKRIDKKNIRSGVRSKYDCFSSKAGLAHFCSGFSGNSVLGAHGLKSDVRDITNHIENLSLSELLDGTYKYSSLGRDKGKKDSNLILGPKPPPACTSSCDIKEQCCDKPSPLVKDSSQINVCDTALCHPKDILSRLTLPHQQDLDSLLTPGSESTAAVKPVRGASLPPFPWSHSQAGGCRQSVDCGKHGSSRSYSQWQWVRVGSNLTSLDYEDTSVHRIDHLLQEMDAAKLCRMDSCDGQYNLCGTESTSGSLAQNIQSRKNGGEHGSQQLQTLDRVDSLDGFQKHDSEHSLLKTSQVSPKIQHAAEILCDMRRSIESLSGQGYSNGVIKWPKSPSEKVMKARKPSSQFGITESSSGSRNNDATWNGSSHSTKKFCDRKNDSACLNYPGKETIRWPVPVEGGASPVRSSERGPMLDMRQPHGNGGRHPVQVPSQVARLEKEYENQQKLRKATLTSSLGPPGDWSRERNRRV

SEQ ID NO: 183404 - protein, 597 aa, Zea Mays
MDAVELPLPAKVEFGKILAPAAAVEGVDGAVVGGGPGGGSGEVLRSCADADQRHGGDVKQHNQNAEGFPSYRSKRTPLEVSIQKSLGFGLKSENGKRDYVANDMVQSLHKQDSKMVTKKTIKLLDAPPYSKRLKLEPVQTGRDAEIKGHEFISQKNVPDLAPCATSGAHGLKSDVRDITNHIENLSLSELLDGTYKYSSLGRDKGKKDSNLILGPKPPPACTSSCDIKEQCCDKPSPLVKDSSQINVCDTALCHPKDILSRLTLPHQQDLDSLLTPGSESTAAVKPVRGASLPPFPWSHSQAGGCRQSVDCGKHGSSRSYSQWQWVRVGSNLTSLDYEDTSVHRIDHLLQEMDAAKLCRMDSCDGQYNLCGTESTSGSLAQNIQSRKNGGEHGSQQLQTLDRVDSLDGFQKHDSEHSLLKTSQVSPKIQHAAEILCDMRRSIESLSGQGYSNGVIKWPKSPSEKVMKARKPSSQFGITESSSGSRNNDATWNGSSHSTKKFCDRKNDSACLNYPGKETIRWPVPVEGGASPVRSSERGPMLDMRQPHGNGGRHPVQVPSQVARLEKEYENQQKLRKATLTSSLGPPGDWSRERNRRV

SEQ ID NO: 183405 - protein, 102 aa, Zea Mays
MVERRGWGVVSSSPAHVGEWPGRRGKAGGKTKTPTLLPACKGAETHLIMFASGAHDGGDGKLRLLPAVEAGGATEGIASSFSLPAVEAGGACGGAAQLRHDT

SEQ ID NO: 183406 - protein, 464 aa, Zea Mays
MSDQTNCNEVEAEECDAYEENQEEPVAMVEESPPDVGQDGDDGQGIDSSWTVVGTPVLRVKTIYISSAILAAKSPFFFKLFSNGMKESDQRHATLRITDSEETALMELLSFMYSGKLATTEPTLLLDILMAADKFEVVSCMRYCSQLLTSLPMTTESALLYLDLPCSISMAAAVQPLTDAAKDFLAVKYKDLTKFQDEVMNIPLAGIEAILSSNDLQVASEDTIYDFLLRWARAQYPKSEERREILSSRLLPLVRFSHMTCRKLRKVLTCTDIDHEQATKCVTEALLYKADAPHRQRALAADTTTCRKFAERAYKYRPLKVVEFDRPYPQCIAYLDLKREECSRLFPAGRIYSQAFHLAGQGFFLSAHCNMEQQSTFYCFGLFLGMQEKGSTSVTVDYEFAARTRPSGEFVSKYKGNYTFTGGKAVGYRNLFGIPWQAFMADDSLFFIDGMLHLRAELTIKQPT

SEQ ID NO: 183407 - protein, 359 aa, Zea Mays
MELLSFMYSGKLATTEPTLLLDILMAADKFEVVSCMRYCSQLLTSLPMTTESALLYLDLPCSISMAAAVQPLTDAAKDFLAVKYKDLTKFQDEVMNIPLAGIEAILSSNDLQVASEDTIYDFLLRWARAQYPKSEERREILSSRLLPLVRFSHMTCRKLRKVLTCTDIDHEQATKCVTEALLYKADAPHRQRALAADTTTCRKFAERAYKYRPLKVVEFDRPYPQCIAYLDLKREECSRLFPAGRIYSQAFHLAGQGFFLSAHCNMEQQSTFYCFGLFLGMQEKGSTSVTVDYEFAARTRPSGEFVSKYKGNYTFTGGKAVGYRNLFGIPWQAFMADDSLFFIDGMLHLRAELTIKQPT

SEQ ID NO: 183408 - protein, 762 aa, Zea Mays
MDSSYYYRPPNCGTWPYHDISHPSEFHCCCNRAYLPDYYSFRPPFPQELPPPHLYYHVPSPHHPNACPSYFVPSHPYPFDQTPYGYEKFKSHCCGCPTHVCPGAEKNNVKIEEQRPDVKLESGEHKNADSDSIIQHPNKKYPFIWLPSGNMKGKENGEHYELSPQVLNEWAPVSGKWLGDVKQQGQDNEKGKQFQWPIVWMPAGYDAPNQKAKDMNDTEETPKSPKISEVSPQSPKIIPLSWFGNGHHHDQKSAARNGSGDHNNGSAVKNQPVVTDHQDSMILEGNPKITPAVPKSIHVGKKPPRENCKTIPVVPEKEINEKKASTYRTIPVIKESDEKKIGMREKRESKEANSAEMVEENRKTKHNDSSVVKHSKLPPVCLRVDPLPRKKPGNGSSRSPSPPRKDTDNTKKDVDEAQSQILEPKQSSTSKDITVSEVKEKSPYEMKKEVGFRNETVEAASVEHLQEEEAPTSKDGQKVQAASTTVGDQENAALNSIEEDHVQENAGAGSLNGCDKRKNEDGTVIESETAKDDARTYGVNLSESDAAVRIQSAYRGYDVRKWQPLDKLWKIKHVHEQMQVVRKQIQCLLDSCSKPTQKEQVAIGETIMNLLLKLDAIQGLHPSVREARKSVARELICLQEKLDTLCKAASGDLNHTDSNDDESEGTKNIIQTEAPTVITEASDRQKRTIELGKVQEPCSVDSMEPCNTVPSGVSWEVRPDVDASEEKNEKQESCSTTVDEAHEQLTTRSMELENQMLLQWNK

SEQ ID NO: 183409 - protein, 1298 aa, Zea Mays
MYPANRHMDPYYSHYRNHVPYPYYPPARWEIPSGHPQAMDSSYYYRPPNCGTWPYHDISHPSEFHCCCNRAYLPDYYSFRPPFPQELPPPHLYYHVPSPHHPNACPSYFVPSHPYPFDQTPYGYEKFKSHCCGCPTHVCPGAEKNNVKIEEQRPDVKLESGEHKNADSDSIIQHPNKKYPFIWLPSGNMKGKENGEHYELSPQVLNEWAPVSGKWLGDVKQQGQDNEKGKQFQWPIVWMPAGYDAPNQKAKDMNDTEETPKSPKISEVSPQSPKIIPLSWFGNGHHHDQKSAARNGSGDHNNGSAVKNQPVVTDHQDSMILEGNPKITPAVPKSIHVGKKPPRENCKTIPVVPEKEINEKKASTYRTIPVIKESDEKKIGMREKRESKEANSAEMVEENRKTKHNDSSVVKHSKLPPVCLRVDPLPRKKPGNGSSRSPSPPRKDTDNTKKDVDEAQSQILEPKQSSTSKDITVSEVKEKSPYEMKKEVGFRNETVEAASVEHLQEEEAPTSKDGQKVQAASTTVGDQENAALNSIEEDHVQENAGAGSLNGCDKRKNEDGTVIESETAKDDARTYGVNLSESDAAVRIQSAYRGYDVRKWQPLDKLWKIKHVHEQMQVVRKQIQCLLDSCSKPTQKEQVAIGETIMNLLLKLDAIQGLHPSVREARKSVARELICLQEKLDTLCKAASGDLNHTDSNDDESEGTKNIIQTEAPTVITEASDRQKRTIELGKVQEPCSVDSMEPCNTVPSGVSWEVRPDVDASEEKNEKQESCSTTVDEAHEQIEIQVASSMDMISDEAFTADNQEHGIGESNVTSVEQVTEEEKPASEDEVKEPPLVNSTALLYDTTSSGDSSGLKQYTASTDQNLYAESNTGSSPASTEDIDISTLAVESEVAAENDGPINSQVHETVALENVEMKDDVSSAENEHNRSSSPVIHLEDPLVSLKDVEQHGPTPTKDFVVPNTEDQQEARDISLQVQAVDSMKDCGEVPDGTIEASTNDDELELGTSADVEKNDQPTLLEPRSESVSVPELSVLDESDDKMQCGVSGKDEEAHVEEKTVTIAVDKVTGGSANFEDPLCEASRKEPDIEKSHPSLGEEEDDTIGGTVFPGSGSCELSCPQDGGIAVYEGPEMVSPESQTDARKENIHSDVAETDECTKTQKAALAGTEGENSAEDSGVPVSEMDKCNEMPKDAPTLTAAGANPAEDEASLKDLSVQTENKASSASPAPDDPKASDEKTLAEENQKLKELLQKLLASGNDQMGVITDLSEKVKVLERRLARKKRPKVRVHKPSRHASCVH

SEQ ID NO: 183410 - protein, 1265 aa, Zea Mays
MDSSYYYRPPNCGTWPYHDISHPSEFHCCCNRAYLPDYYSFRPPFPQELPPPHLYYHVPSPHHPNACPSYFVPSHPYPFDQTPYGYEKFKSHCCGCPTHVCPGAEKNNVKIEEQRPDVKLESGEHKNADSDSIIQHPNKKYPFIWLPSGNMKGKENGEHYELSPQVLNEWAPVSGKWLGDVKQQGQDNEKGKQFQWPIVWMPAGYDAPNQKAKDMNDTEETPKSPKISEVSPQSPKIIPLSWFGNGHHHDQKSAARNGSGDHNNGSAVKNQPVVTDHQDSMILEGNPKITPAVPKSIHVGKKPPRENCKTIPVVPEKEINEKKASTYRTIPVIKESDEKKIGMREKRESKEANSAEMVEENRKTKHNDSSVVKHSKLPPVCLRVDPLPRKKPGNGSSRSPSPPRKDTDNTKKDVDEAQSQILEPKQSSTSKDITVSEVKEKSPYEMKKEVGFRNETVEAASVEHLQEEEAPTSKDGQKVQAASTTVGDQENAALNSIEEDHVQENAGAGSLNGCDKRKNEDGTVIESETAKDDARTYGVNLSESDAAVRIQSAYRGYDVRKWQPLDKLWKIKHVHEQMQVVRKQIQCLLDSCSKPTQKEQVAIGETIMNLLLKLDAIQGLHPSVREARKSVARELICLQEKLDTLCKAASGDLNHTDSNDDESEGTKNIIQTEAPTVITEASDRKRTIELGKVQEPCSVDSMEPCNTVPSGVSWEVRPDVDASEEKNEKQESCSTTVDEAHEQGKTEGQIEIQVASSMDMISDEAFTADNQEHGIGESNVTSVEQVTEEEKPASEDEVKEPPLVNSTALLYDTTSSGDSSGLKQYTASTDQNLYAESNTGSSPASTEDIDISTLAVESEVAAENDGPINSQVHETVALENVEMKDDVSSAENEHNRSSSPVIHLEDPLVSLKDVEQHGPTPTKDFVVPNTEDQQEARDISLQVQAVDSMKDCGEVPDGTIEASTNDDELELGTSADVEKNDQPTLLEPRSESVSVPELSVLDESDDKMQCGVSGKDEEAHVEEKTVTIAVDKVTGGSANFEDPLCEASRKEPDIEKSHPSLGEEEDDTIGGTVFPGSGSCELSCPQDGGIAVYEGPEMVSPESQTDARKENIHSDVAETDECTKTQKAALAGTEGENSAEDSGVPVSEMDKCNEMPKDAPTLTAAGANPAEDEASLKDLSVQTENKASSASPAPDDPKASDEKTLAEENQKLKELLQKLLASGNDQMGVITDLSEKVKVLERRLARKKRPKVRVHKPSRHASCVH

SEQ ID NO: 183411 - protein, 1296 aa, Zea Mays
MYPANRHMDPYYSHYRNHVPYPYYPPARWEIPSGHPQAMDSSYYYRPPNCGTWPYHDISHPSEFHCCCNRAYLPDYYSFRPPFPQELPPPHLYYHVPSPHHPNACPSYFVPSHPYPFDQTPYGYEKFKSHCCGCPTHVCPGAEKNNVKIEEQRPDVKLESGEHKNADSDSIIQHPNKKYPFIWLPSGNMKGKENGEHYELSPQVLNEWAPVSGKWLGDVKQQGQDNEKGKQFQWPIVWMPAGYDAPNQKAKDMNDTEETPKSPKISEVSPQSPKIIPLSWFGNGHHHDQKSAARNGSGDHNNGSAVKNQPVVTDHQDSMILEGNPKITPAVPKSIHVGKKPPRENCKTIPVVPEKEINEKKASTYRTIPVIKESDEKKIGMREKRESKEANSAEMVEENRKTKHNDSSVVKHSKLPPVCLRVDPLPRKKPGNGSSRSPSPPRKDTDNTKKDVDEAQSQILEPKQSSTSKDITVSEVKEKSPYEMKKEVGFRNETVEAASVEHLQEEEAPTSKDGQKVQAASTTVGDQENAALNSIEEDHVQENAGAGSLNGCDKRKNEDGTVIESETAKDDARTYGVNLSESDAAVRIQSAYRGYDVRKWQPLDKLWKIKHVHEQMQVVRKQIQCLLDSCSKPTQKEQVAIGETIMNLLLKLDAIQGLHPSVREARKSVARELICLQEKLDTLCKAASGDLNHTDSNDDESEGTKNIIQTEAPTQKRTIELGKVQEPCSVDSMEPCNTVPSGVSWEVRPDVDASEEKNEKQESCSTTVDEAHEQGKTEGQIEIQVASSMDMISDEAFTADNQEHGIGESNVTSVEQVTEEEKPASEDEVKEPPLVNSTALLYDTTSSGDSSGLKQYTASTDQNLYAESNTGSSPASTEDIDISTLAVESEVAAENDGPINSQVHETVALENVEMKDDVSSAENEHNRSSSPVIHLEDPLVSLKDVEQHGPTPTKDFVVPNTEDQQEARDISLQVQAVDSMKDCGEVPDGTIEASTNDDELELGTSADVEKNDQPTLLEPRSESVSVPELSVLDESDDKMQCGVSGKDEEAHVEEKTVTIAVDKVTGGSANFEDPLCEASRKEPDIEKSHPSLGEEEDDTIGGTVFPGSGSCELSCPQDGGIAVYEGPEMVSPESQTDARKENIHSDVAETDECTKTQKAALAGTEGENSAEDSGVPVSEMDKCNEMPKDAPTLTAAGANPAEDEASLKDLSVQTENKASSASPAPDDPKASDEKTLAEENQKLKELLQKLLASGNDQMGVITDLSEKVKVLERRLARKKRPKVRVHKPSRHASCVH

SEQ ID NO: 183412 - protein, 1295 aa, Zea Mays
MYPANRHMDPYYSHYRNHVPYPYYPPARWEIPSGHPQAMDSSYYYRPPNCGTWPYHDISHPSEFHCCCNRAYLPDYYSFRPPFPQELPPPHLYYHVPSPHHPNACPSYFVPSHPYPFDQTPYGYEKFKSHCCGCPTHVCPGAEKNNVKIEEQRPDVKLESGEHKNADSDSIIQHPNKKYPFIWLPSGNMKGKENGEHYELSPQVLNEWAPVSGKWLGDVKQQGQDNEKGKQFQWPIVWMPAGYDAPNQKAKDMNDTEETPKSPKISEVSPQSPKIIPLSWFGNGHHHDQKSAARNGSGDHNNGSAVKNQPVVTDHQDSMILEGNPKITPAVPKSIHVGKKPPRENCKTIPVVPEKEINEKKASTYRTIPVIKESDEKKIGMREKRESKEANSAEMVEENRKTKHNDSSVVKHSKLPPVCLRVDPLPRKKPGNGSSRSPSPPRKDTDNTKKDVDEAQSQILEPKQSSTSKDITVSEVKEKSPYEMKKEVGFRNETVEAASVEHLQEEEAPTSKDGQKVQAASTTVGDQENAALNSIEEDHVQENAGAGSLNGCDKRKNEDGTVIESETAKDDARTYGVNLSESDAAVRIQSAYRGYDVRKWQPLDKLWKIKHVHEQMQVVRKQIQCLLDSCSKPTQKEQVAIGETIMNLLLKLDAIQGLHPSVREARKSVARELICLQEKLDTLCKAASGDLNHTDSNDDESEGTKNIIQTEAPTVITEASDRVQEPCSVDSMEPCNTVPSGVSWEVRPDVDASEEKNEKQESCSTTVDEAHEQGKTEGQIEIQVASSMDMISDEAFTADNQEHGIGESNVTSVEQVTEEEKPASEDEVKEPPLVNSTALLYDTTSSGDSSGLKQYTASTDQNLYAESNTGSSPASTEDIDISTLAVESEVAAENDGPINSQVHETVALENVEMKDDVSSAENEHNRSSSPVIHLEDPLVSLKDVEQHGPTPTKDFVVPNTEDQQEARDISLQVQAVDSMKDCGEVPDGTIEASTNDDELELGTSADVEKNDQPTLLEPRSESVSVPELSVLDESDDKMQCGVSGKDEEAHVEEKTVTIAVDKVTGGSANFEDPLCEASRKEPDIEKSHPSLGEEEDDTIGGTVFPGSGSCELSCPQDGGIAVYEGPEMVSPESQTDARKENIHSDVAETDECTKTQKAALAGTEGENSAEDSGVPVSEMDKCNEMPKDAPTLTAAGANPAEDEASLKDLSVQTENKASSASPAPDDPKASDEKTLAEENQKLKELLQKLLASGNDQMGVITDLSEKVKVLERRLARKKRPKVRVHKPSRHASCVH

SEQ ID NO: 183413 - protein, 149 aa, Zea Mays
MVGHVSPVSSSRYRPPPSPPPPRRTCASPSSPPLLLRTRLTFHWRRRRRHIGRSSPPNLIQIQSLPSESRIRNVSSLPLDPAAGAPPPDPVVNSITPSSTSLSPPPSALTHRFYIATSLVVEDTEDLAIIIRRPSLDFPSAAPSWSLSR

SEQ ID NO: 183414 - protein, 58 aa, Zea Mays
MGTKAHIYIIANNFLCVLWNLFRYIWANNLTDTTTTWLLGWTRKETLSTYIQWLTLES

SEQ ID NO: 183415 - protein, 397 aa, Zea Mays
MGDGQCELVVDNHCQLRHRLDLSGAEDLFSVIGTWEERTDDGGAGDGGGGGSSAPAMRAYRQISCSAGAVAATRLTGKSRRRTGEEEEEKGSGGSAPGPAHKKHNKAGSAVTDDDEGAPKISHVAVERNRRKQMNEHLTVLRSLMPCFYVKRGDQASIIGGVVDYIKELQQVLRSLEAKKHRKAYAEQVLSPRPSAGGVSTSVSAASPRHLAVKSVAPLSPRMAVPISPRTPTPGSPYKAAASGVAGCCRLPLLPPYMLSSSAAAAAASYSHDQQQHYSTQTTTYLPTLDSLVTELATQQAACRPAAAAAGLALPDVKVEFAGPNLVLKTVSHRAPGQALKIIAALESLSLQILHVSVSAVDDTMLHSFTIKALTLLNQGWARLESRHSIGSSTSMY

SEQ ID NO: 183416 - protein, 173 aa, Zea Mays
MQMERGYRHSLAMHGLNLLIAGPALWCLGSVQNICQFYERASGHVQLLQKSVQIPLLLGSTLFLIAGIVNRHDRRSRHSGFVLLGRSWAWFCLFGSLLFLAGGLLNLLKVFKTQQMGGRGLEKLRGGTQERLALEREGKVPLILEHGHGGRRGPAIPPPPPGSYKDALVSSAS

SEQ ID NO: 183417 - protein, 127 aa, Zea Mays
MPFCLWLSRFMAVQVLIDFGLSFTLTIPEDKAVDLYVLERALISMHSSCGEVARLICANIYDSASQISPVAIGFMPFPFVRGILFPMVFMQMEKILAVYRKASKQWCSTQNKLAQVRQRVRKRTMVG

SEQ ID NO: 183418 - protein, 132 aa, Zea Mays
MQGCRGRHQRHPPAIPADCLACPSILLPTPPSILARALRTHSIHASLQQQTPIPVVALASLLFVASASASTPLFDAFAADSDFWCTLFSTARARAALAMASTGTRMGPRPLCGLLYSKCLDVERLWIYRQRP

SEQ ID NO: 183419 - protein, 121 aa, Zea Mays
MKGNIEIGSVREVNVKSGLPATRSTERLELLDDNEHILSVRFVGGDHRLQNYSSILTVHPEVIDGRPGTLVIESFVVDVPDGNTKDETCYFVEALLKCNLKSLAEVSERQVVKDQTEPLDR

SEQ ID NO: 183420 - protein, 143 aa, Zea Mays
MVATPAADGRDGKLSCGYSSFRGKRATMEDFYDVKLTEIDGQAISLFGVFDGHGGSRAAEYLREHLFENLLKHPDFLTDTKLAISETYQKTDTDFLESEASAFRDDGSTASTAILVGDRLYVANVGDSRAVISKAGKGIAYWK

SEQ ID NO: 183421 - protein, 231 aa, Zea Mays
MVCIGSLLRALVLRAASSAGRRRGPRILCGRATDVRVTPRHGHGWRGFRAVTGRMMLDSSESASSAAAAAAEAGAGAVAGQAQPQRRAVGAVPQAHDGGYASGGWEREDGKLSCGYSSFRGKRATMEDFYDVKLTEIDGQAISLFGVFDGHGGSRAAEYLREHLFENLLKHPDFLTDTKLAISETYQKTDTDFLESEASAFRDDGSTASTAILLWHFQKITNLTGLMSERE

SEQ ID NO: 183422 - protein, 173 aa, Zea Mays
MVLGFIISKRGIEANPEKDRDHRTAPRALAGGTRGLHAPPGKAACHRQSSGARNVQAGRRSGRGLWQHLEHPTATSLLPLRCFQAVRIPRSHKSLSRQGRVSLASAEPDPPSGAKKGGTPLRQDWAYLSASKIFGQKGFCVLPAMSVTGPQGPNVGACKWQGRLSRGIPMPPG

SEQ ID NO: 183423 - protein, 189 aa, Zea Mays
MMRSTQMLVAFIFSSTTGDWSAGSPFSLGSLRIPYDNIPSYAYGCFYWKVESENRLLTLNMSSMEFSVVDLPPGPDRSFVIMVEAGESRLGMFSLINHGTTLCYAIRQIGSEKSNQLEMDSVIPLPEGYIYFRIHGSYEGHILIFGYAFSEDACFALEIKTMKIERVCRKWRGFCPYFVFLPSMSQRRI

SEQ ID NO: 183424 - protein, 282 aa, Zea Mays
MEAAAKGRYHALFNFGDSLADAGNLIQNGTPEILATARLPYGQTYFGKPTGRCSDGRLVIDHLAQEFGLPLLPPSKAKNASFAHGANFAITGATALDTPYFEAKGLGAVIWNSGALMTQIQWFRDLKPFFCNTTEACKKFFAKALFVVGEFGGNDYNAPLFAGMGIPEAYKFMPDVIQGISDGIEALIAEGAVEMIVPGVMPTGCFPVYLNMLDEPKEGYGPHSGCVRRYNTFSWVHNAHLKAMLEKLRAKHPNVRIIYGDYYTPVVQFMLQPEKFGELLHS

SEQ ID NO: 183425 - protein, 665 aa, Zea Mays
MASDPPGDGAGGEEPTPGPAPAVEVLAAPAVPLRPRWATEIKVYTRKHPRKTPKPPPEPAPAPASVPAPALAPAPAPNPLSETLSSIRRSIRRADTVGAAARPDPAAPASVPARGPPGERGAASGDPSSEVNRVGGGISNGHGDDRAAAAAEKSEKARKRRVRSELRRRLAGELDQVRVLSKRLKEAAEALAQQEASEPAPLPMVVLPTQQQVVDAGYVQLQFSAGDMAVPMSAQIAAAVTPARSMLQRRPLTVSVVHNEAFEKVKRTPKANQLYQNSEFLLAKDRIPPSDSHVRKKSKHHKKKHRSLESRGADFDAERRLYSHAFKKSSSLLSRLMKHKFGWVFNKPVDPVALGLHDYFTIIKHPMDLGTIRGRLSRGQYRNPKEFAEDVRLTFHNAMTYNPKGQDVHFMAEQLSGIFEAQWPEIEAEVNYLASCPPLPKKFPPPPIDLHFLERSDSMRHHMALDTNSRPISHTPTYTRTPSMKKPRAKDPNKRDMTIDEKRKLSENLQNLPPEKLDAVVQVIKNKNLSVMQHDDEIEVEIDSMDAETLWELDRFVANYKKNLSKQKRKAERAMLARQDAELRAQRLIQQPQPTPVPQEPVGEKSLKQVAKGEQLPTSASEKNDENRQNVSGSSNSSSSSSDSGSSSSDSDSSSSDGSDAANSS

SEQ ID NO: 183426 - protein, 162 aa, Zea Mays
MLIQQIGDTFVTEDTTNVMFPREVTVPGYTHPLVAVGTGYREKFFVKVYAAAFYVDYSLRLDTEQWKAKTGIESFDSSSVFDSIFKAPVVKSLSIILVRAVDGKTFVNALNDVIARQIKNPNAEEESSLSTLQNTFLGRNLKQGTSIYLTWLEPKRMLTLKL

SEQ ID NO: 183427 - protein, 302 aa, Zea Mays
MSGLLRHAQTHIFGRLLREDGTPNIPVIEKLFCKIDLDNDGKLERGELQAFILGVKFEDVDLDSDLAVDQVMADFDTSHNSVIEKGEFIDGILRWLEEAKRSVATSGSDSRKFLQDFHTRTRDERSQLLGKDDEDGEAIENPTWTSFKAILLLLLGTAMAAAFADPLVDAVHGFSNATSIPSFFISFIAMPLATNSSEAVSAIIFASRKKQRTLSLTFSEVYGAVTMNNTLCLAVFLGLVYVRGLTWDFSSEVLIIFSVCTIMGLFTSFRTDFPLWTCVVAYLLYPLSLVVVYVLDFKFGWS

SEQ ID NO: 183428 - protein, 295 aa, Zea Mays
MAQLPPRAPGGAAPQDHWSAAGEFLGFAAARRGAHRRSASDSAAFLEALPMEDVIGGDGFDRLDDDQLMSMFSDVDAPAVSAGDAAQLMDVADADADADDDGSAASSRAAADGVAADPKRVKRILANRQSAQRSRVRKLQYISELERSVTGLQMEVSALSPRVAFLDHQRSLLTVGNSHLKQRIAALAQDKIFKDGISSRGAEEGDRAATPCVPAAAAAAADQGGHHRRRRHRRGRLHAGQARAARVRGRCHSIADRGRRRSIGSATTTSTELCAGFLLFSDKLFVVRANTRACY

SEQ ID NO: 183429 - protein, 1033 aa, Zea Mays
MEIVAVVAWTIWKQRNDCIFRNVIPSFHSCRICFNDTLKLQMFRFSSTLKLHVSLWFINEQKHRHEVTILLQDIVDIVVQDMIVDPQSILNVVNSSKRLISDDDGAFSYYEPELFASVSSRTSIRYPYFDQQKEQVKRFYLLLSTKEKAAEIPSNLEARRRISFFATSLFMHMPAAPKVRSMLSFSVITPYFMEEVKFSDEELHSNQDEASTLSYMQKIYPDQWKNFLERVDTKVTNDEIRYWASYRGQTLSRTVRGMMYYRKALKLQALLDMTNDQDLYEALLAIEQGKNKRNIHQALAAELEALADMKFSYVISCQKFGEQKIKGDPHAQDIIDLMMRCPALRVAYIEEKEVIVNNCSHMVEGKEVIVNNCPHKVYSSVLIKAENNLDQEIYRIKLPGPPIIGEGKPENQNHAIIFTRGDALQTIDMNQDNYLEEAYKMRNVLQEFVRHPRDKAPTILGLREHIFTGSVSSLAGFMSYQETSFVTIGQRFLAEPLRVRFHYGHPDIFDRIFHLTRGGISKASKTINLSEDVFAGYNSILRRGNIIYSEYIQVGKGRDVGLNQISKFEAKVANGNSEQTISRDIHRLGRRFDFFRMLSCYFTTVGFYFNSLISVVGVYVFLYGQLYLVLSGLQRALLLEAQTQNIKSLETALASQSFLQLGLLTGLPMVMELGLEKGFRAALSDFILMQLQLASVFFTFSLGTKAHYYGRTILHGGAKYRPTGRKFVVFHASFTENYQLYSRSHFVKGFELIFLLIVYHIFRRSYVSNVVHVMITYSTWFMAVAWLFTPFLFNPAGFAWQKIVDDWADWNRWMKNQGGIGVQPEKSWESWWNSENAHLRYSVLSSRILEVLLSLRFFIYQYGLVYHLNISQDNKNFLVYLLSWVVIIAIIGFVKLVNCASRRLSTKHQLVFRLIKLLTFLSVVTSLVLLYCLCRLSIMDLIICCLAFIPTGWGLLLIVQVLRPKIEYYAVWEPIQVIAHAYDYGMGSLLFFPIAVLAWMPVISAIQTRVLFNRAFSRQLQIQPFIAGKTKRR

SEQ ID NO: 183430 - protein, 995 aa, Zea Mays
MNHLPSLFQKFDQLAELLFINEQKHRHEVTILLQDIVDIVVQDMIVDPQSILNVVNSSKRLISDDDGAFSYYEPELFASVSSRTSIRYPYFDQQKEQVKRFYLLLSTKEKAAEIPSNLEARRRISFFATSLFMHMPAAPKVRSMLSFSVITPYFMEEVKFSDEELHSNQDEASTLSYMQKIYPDQWKNFLERVDTKVTNDEIRYWASYRGQTLSRTVRGMMYYRKALKLQALLDMTNDQDLYEALLAIEQGKNKRNIHQALAAELEALADMKFSYVISCQKFGEQKIKGDPHAQDIIDLMMRCPALRVAYIEEKEVIVNNCSHMVEGKEVIVNNCPHKVYSSVLIKAENNLDQEIYRIKLPGPPIIGEGKPENQNHAIIFTRGDALQTIDMNQDNYLEEAYKMRNVLQEFVRHPRDKAPTILGLREHIFTGSVSSLAGFMSYQETSFVTIGQRFLAEPLRVRFHYGHPDIFDRIFHLTRGGISKASKTINLSEDVFAGYNSILRRGNIIYSEYIQVGKGRDVGLNQISKFEAKVANGNSEQTISRDIHRLGRRFDFFRMLSCYFTTVGFYFNSLISVVGVYVFLYGQLYLVLSGLQRALLLEAQTQNIKSLETALASQSFLQLGLLTGLPMVMELGLEKGFRAALSDFILMQLQLASVFFTFSLGTKAHYYGRTILHGGAKYRPTGRKFVVFHASFTENYQLYSRSHFVKGFELIFLLIVYHIFRRSYVSNVVHVMITYSTWFMAVAWLFTPFLFNPAGFAWQKIVDDWADWNRWMKNQGGIGVQPEKSWESWWNSENAHLRYSVLSSRILEVLLSLRFFIYQYGLVYHLNISQDNKNFLVYLLSWVVIIAIIGFVKLVNCASRRLSTKHQLVFRLIKLLTFLSVVTSLVLLYCLCRLSIMDLIICCLAFIPTGWGLLLIVQVLRPKIEYYAVWEPIQVIAHAYDYGMGSLLFFPIAVLAWMPVISAIQTRVLFNRAFSRQLQIQPFIAGKTKRR

SEQ ID NO: 183431 - protein, 1996 aa, Zea Mays
MPRGTMELEIVEVGPSSRPLQYVSRPPLPPPPPPPPPPPLQQQQQGEAGDANAAPPLVQHFDSEKLPQTLVSEIRPFLRAANDIEAENPRVAYLCRFHAFEKAHTMDKLSAGRGVRQFKTALLRRLEQDESSTKSKMTQRGDAREMKSFYEKKKKANAHEHLPVLAEVLKALLSGTGLEVGLVASEDFADLFRYNILPLHPRSSQKPIMLLPEIKVAVAAVFSVRSLPSVNMKDEKNHTDILRWLQSWFGFQKGNVANQREHLILLLANMHARLNPKSSSAQMLDDRAVDELLAKTFENYLTWCKFLGRRSNIWLPSVKQEIQQHKLLYIALYLLIWGEASNLRLMPECLCYIFHHMSYELYGVLSGAVSLITGEKVRPAYGGDDESFLNNVVKPIYNVIFQESQKNKNGASDHSTWRNYDDLNEFFWSADCFKLGWPMRLNNDFFFTSSATKDSQVLCGSRLSKVPHGLENCASCVPLVSLHTSQQNEQLNSQLPPESSSTENYLNSEAAEQRQQQAMSSSSQQRWLGKTNFVEVRSFWHLFRSFDRMWTLLVLGLQVLIIMAWHGLESPTQLLDPIIFEDILSIFITNAVLRVIQVILDIAFSWRTKGTMRVDQILRFTIKLSLVVAWAIILPVFYANSQNYKACSTKRSKTFLGMFCLSKYMVVVALYLASNVVGMALFFVPAVTNYIETSTWRICNVLSWWCQPQLYVGRGMQEGLVSILKYTTFWTILLSCKFLFSYYFEIKPLVGPTKEIMKINVNRYEWHEFFPQVKSNAGAILAVWAPIILVYFMDTQIWYSVFCTIFGGMCGIIHHLGEIRTMGMVRSRFYSLPEAFSMSLCPPATPIQRKGMFFSFLEKRIFKKLGKDERYYPRKFALVWNNIISSFRSEDLISNREMELMTMPMTPMHNSGSICWPLFLLAKKFSEAVDMAANFTGKSAQLFWMIKKDHYMFCSINEFYELTKNIFRFLIIGETERRVVAAIFDEIDKSIQNSSLVIDFRMNHLPSLFQKFDQLAELLFINEQKHRHEVTILLQDIVDIVVQDMIVDPQSILNVVNSSKRLISDDDGAFSYYEPELFASVSSRTSIRYPYFDQQKEQVKRFYLLLSTKEKAAEIPSNLEARRRISFFATSLFMHMPAAPKVRSMLSFSVITPYFMEEVKFSDEELHSNQDEASTLSYMQKIYPDQWKNFLERVDTKVTNDEIRYWASYRGQTLSRTVRGMMYYRKALKLQALLDMTNDQDLYEALLAIEQGKNKRNIHQALAAELEALADMKFSYVISCQKFGEQKIKGDPHAQDIIDLMMRCPALRVAYIEEKEVIVNNCSHMVEGKEVIVNNCPHKVYSSVLIKAENNLDQEIYRIKLPGPPIIGEGKPENQNHAIIFTRGDALQTIDMNQDNYLEEAYKMRNVLQEFVRHPRDKAPTILGLREHIFTGSVSSLAGFMSYQETSFVTIGQRFLAEPLRVRFHYGHPDIFDRIFHLTRGGISKASKTINLSEDVFAGYNSILRRGNIIYSEYIQVGKGRDVGLNQISKFEAKVANGNSEQTISRDIHRLGRRFDFFRMLSCYFTTVGFYFNSLISVVGVYVFLYGQLYLVLSGLQRALLLEAQTQNIKSLETALASQSFLQLGLLTGLPMVMELGLEKGFRAALSDFILMQLQLASVFFTFSLGTKAHYYGRTILHGGAKYRPTGRKFVVFHASFTENYQLYSRSHFVKGFELIFLLIVYHIFRRSYVSNVVHVMITYSTWFMAVAWLFTPFLFNPAGFAWQKIVDDWADWNRWMKNQGGIGVQPEKSWESWWNSENAHLRYSVLSSRILEVLLSLRFFIYQYGLVYHLNISQDNKNFLVYLLSWVVIIAIIGFVKLVNCASRRLSTKHQLVFRLIKLLTFLSVVTSLVLLYCLCRLSIMDLIICCLAFIPTGWGLLLIVQVLRPKIEYYAVWEPIQVIAHAYDYGMGSLLFFPIAVLAWMPVISAIQTRVLFNRAFSRQLQIQPFIAGKTKRR

SEQ ID NO: 183432 - protein, 983 aa, Zea Mays
MPRGTMELEIVEVGPSSRPLQYVSRPPLPPPPPPPPPPPLQQQQQGEAGDANAAPPLVQHFDSEKLPQTLVSEIRPFLRAANDIEAENPRVAYLCRFHAFEKAHTMDKLSAGRGVRQFKTALLRRLEQDESSTKSKMTQRGDAREMKSFYEKKKKANAHEHLPVLAEVLKALLSGTGLEVGLVASEDFADLFRYNILPLHPRSSQKPIMLLPEIKVAVAAVFSVRSLPSVNMKDEKNHTDILRWLQSWFGFQKGNVANQREHLILLLANMHARLNPKSSSAQMLDDRAVDELLAKTFENYLTWCKFLGRRSNIWLPSVKQEIQQHKLLYIALYLLIWGEASNLRLMPECLCYIFHHMSYELYGVLSGAVSLITGEKVRPAYGGDDESFLNNVVKPIYNVIFQESQKNKNGASDHSTWRNYDDLNEFFWSADCFKLGWPMRLNNDFFFTSSATKDSQVLCGSRLSKVPHGLENCASCVPLVSLHTSQQNEQLNSQLPPESSSTENYLNSEAAEQRQQQAMSSSSQQRWLGKTNFVEVRSFWHLFRSFDRMWTLLVLGLQVLIIMAWHGLESPTQLLDPIIFEDILSIFITNAVLRVIQVILDIAFSWRTKGTMRVDQILRFTIKLSLVVAWAIILPVFYANSQNYKACSTKRSKTFLGMFCLSKYMVVVALYLASNVVGMALFFVPAVTNYIETSTWRICNVLSWWCQPQLYVGRGMQEGLVSILKYTTFWTILLSCKFLFSYYFEIKPLVGPTKEIMKINVNRYEWHEFFPQVKSNAGAILAVWAPIILVYFMDTQIWYSVFCTIFGGMCGIIHHLGEIRTMGMVRSRFYSLPEAFSMSLCPPATPIQRKGMFFSFLEKRIFKKLGKDERYYPRKFALVWNNIISSFRSEDLISNREMELMTMPMTPMHNSGSICWPLFLLAKKFSEAVDMAANFTGKSAQLFWMIKKDHYMFCSINEFYELTKNIFRFLIIGETERRLYSGW

SEQ ID NO: 183433 - protein, 92 aa, Zea Mays
MYLDLPFLYFLCTSCIKGRESMSMHYPCFIPSLTSQKFHSCINASLLKLDEVILLSKSLKLNLVTRISYLCSKGGWSLSLFEILKGKCLRCL

SEQ ID NO: 183434 - protein, 614 aa, Zea Mays
MTLEFWKQVPPNEPYRVILGDVRDKLYYTRERSRHLLTSGISEILEEATFTNVEQFLEPLELCYRSLCACGDKPIADGSLLDFLRQVSTFGLALVKLDIRQESDRHTDVLDSITTHLGIGSYAEWSEEKRQDWLLSELRGKRPLFGSDLPQTEETADVLGTFHVLAELPADCFGAYIISMATAPSDVLAVELLQRECHVKHPLRVVPLFEKLADLEAAPAAVARLFSIDWYMDRINGKQEVMIGYSDSGKDAGRLSAAWQMYKAQEELIKVAKHYGVKLTMFHGRGGTVGRGGGPTHLAILSQPPDTIHGSLRVTVQGEVIEHSFGEELLCFRTLQRYTAATLEHGMHPPISPKPEWRALMDEMAVVATKEYRSIVFQEPRFVEYFRSATPETEYGRMNIGSRPSKRKPSGGIESLRAIPWIFAWTQTRFHLPVWLGFGAAIKHIMQKDIRNIHILREMYNEWPFFRVTLDLLEMVFAKGDPGIAAVYDKLLVADDLQSFGEQLRKNYEETKELLLQVAGHKDVLEGDPYLKQRLRLRESYITTLNVCQAYTLKRIRDPSFQVSPQPPLSKEFTDESQPAELVQLNQQSEYAPGLEDTLILTMKGIAAGMQNTG

SEQ ID NO: 183435 - protein, 729 aa, Zea Mays
MRAGMSYFHETIWKGVPKFLRRIDTALKNIGINERLPYNAPLIQFSSWMGGDRDGNPRVTPEVTRDVCLLARMMAANLYFSQIEDLMFELSMWRCSDELRIRADELHRSSRKAAKHYIEFWKQVPPNEPYRVILGDVRDKLYYTRERSRHLLTSGISEILEEATFTNVEQFLEPLELCYRSLCACGDKPIADGSLLDFLRQVSTFGLALVKLDIRQESDRHTDVLDSITTHLGIGSYAEWSEEKRQDWLLSELRGKRPLFGSDLPQTEETADVLGTFHVLAELPADCFGAYIISMATAPSDVLAVELLQRECHVKHPLRVVPLFEKLADLEAAPAAVARLFSIDWYMDRINGKQEVMIGYSDSGKDAGRLSAAWQMYKAQEELIKVAKHYGVKLTMFHGRGGTVGRGGGPTHLAILSQPPDTIHGSLRVTVQGEVIEHSFGEELLCFRTLQRYTAATLEHGMHPPISPKPEWRALMDEMAVVATKEYRSIVFQEPRFVEYFRSATPETEYGRMNIGSRPSKRKPSGGIESLRAIPWIFAWTQTRFHLPVWLGFGAAIKHIMQKDIRNIHILREMYNEWPFFRVTLDLLEMVFAKGDPGIAAVYDKLLVADDLQSFGEQLRKNYEETKELLLQVAGHKDVLEGDPYLKQRLRLRESYITTLNVCQAYTLKRIRDPSFQVSPQPPLSKEFTDESQPAELVQLNQQSEYAPGLEDTLILTMKGIAAGMQNTG

SEQ ID NO: 183436 - protein, 741 aa, Zea Mays
MPERHQSIDAQLRLLAPGKVSEDDKLVEYDALLVDRFLDILQDLHGPHLREFVQECYELSAEYENDRDEARLGELGSKLTSLPPGDSIVVASSFSHMLNLANLAEEVQIAHRRRIKLKRGDFADEASAPTESDIEETLKRLVSQLGKSREEVFDALKNQTVDLVFTAHPTQSVRRSLLQKHGRIRNCLRQLYAKDITADDKQELDEALQREIQAAFRTDEIRRTPPTPQDEMRAGMSYFHETIWKGVPKFLRRIDTALKNIGINERLPYNAPLIQFSSWMGGDRDGNPRVTPEVTRDVCLLARMMAANLYFSQIEDLMFELSMWRCSDELRIRADELHRSSRKAAKHYIEFWKQVPPNEPYRVILGDVRDKLYYTRERSRHLLTSGISEILEEATFTNVEQFLEPLELCYRSLCACGDKPIADGSLLDFLRQVSTFGLALVKLDIRQESDRHTDVLDSITTHLGIGSYAEWSEEKRQDWLLSELRGKRPLFGSDLPQTEETADVLGTFHVLAELPADCFGAYIISMATAPSDVLAVELLQRECHVKHPLRVVPLFEKLADLEAAPAAVARLFSIDWYMDRINGKQEVMIGYSDSGKDAGRLSAAWQMYKAQEELIKVAKHYGVKLTMFHGRGGTVGRGGGPTHLAILSQPPDTIHGSLRVTVQGEVIEHSFGEELLCFRTLQRYTAATLEHGMHPPISPKPEWRALMDEMAVVATKEYRSIVFQEPRFVEYFRSPSIKEEA

SEQ ID NO: 183437 - protein, 958 aa, Zea Mays
MPERHQSIDAQLRLLAPGKVSEDDKLVEYDALLVDRFLDILQDLHGPHLREFECYELSAEYENDRDEARLGELGSKLTSLPPGDSIVVASSFSHMLNLANLAEEVQIAHRRRIKLKRGDFADEASAPTESDIEETLKRLVSQLGKSREEVFDALKNQTVDLVFTAHPTQSVRRSLLQKHGRIRNCLRQLYAKDITADDKQELDEALQREIQAAFRTDEIRRTPPTPQDEMRAGMSYFHETIWKGVPKFLRRIDTALKNIGINERLPYNAPLIQFSSWMGGDRDGNPRVTPEVTRDVCLLARMMAANLYFSQIEDLMFELSMWRCSDELRIRADELHRSSRKAAKHYIEFWKQVPPNEPYRVILGDVRDKLYYTRERSRHLLTSGISEILEEATFTNVEQFLEPLELCYRSLCACGDKPIADGSLLDFLRQVSTFGLALVKLDIRQESDRHTDVLDSITTHLGIGSYAEWSEEKRQDWLLSELRGKRPLFGSDLPQTEETADVLGTFHVLAELPADCFGAYIISMATAPSDVLAVELLQRECHVKHPLRVVPLFEKLADLEAAPAAVARLFSIDWYMDRINGKQEVMIGYSDSGKDAGRLSAAWQMYKAQEELIKVAKHYGVKLTMFHGRGGTVGRGGGPTHLAILSQPPDTIHGSLRVTVQGEVIEHSFGEELLCFRTLQRYTAATLEHGMHPPISPKPEWRALMDEMAVVATKEYRSIVFQEPRFVEYFRSATPETEYGRMNIGSRPSKRKPSGGIESLRAIPWIFAWTQTRFHLPVWLGFGAAIKHIMQKDIRNIHILREMYNEWPFFRVTLDLLEMVFAKGDPGIAAVYDKLLVADDLQSFGEQLRKNYEETKELLLQVAGHKDVLEGDPYLKQRLRLRESYITTLNVCQAYTLKRIRDPSFQVSPQPPLSKEFTDESQPAELVQLNQQSEYAPGLEDTLILTMKGIAAGMQNTG

SEQ ID NO: 183438 - protein, 292 aa, Zea Mays
MKVLIYFWFCRIIASLRANQFCERLPSPNGESIVDCHQISKMPNLAFTIANKTFTLTPELYIVKLEQAGQTICINGFMAFDVPPPRGPLCYAKHICTTLKLNMKKSSGSGSVSLPRSIPELYEERGASSLREFGFQELRAATSDFSRLLKVGEVASGAFTRASSAFLAGPPAARSSRLSHSGISHLPADEVKPLVKYDNDEDAHSPGGRGRGRGGRGRGRGRGRGGRGNGFNEYADAGWEDDHARAYMGNGYARGRGRSFRGRGRRGDDDNQPEYQQVGGYFKKIQLNQKLE

SEQ ID NO: 183439 - protein, 222 aa, Zea Mays
MGNGYARGRGHSFRGRGRRGGDNNQPEYQQVGGYYEEAPVHAPALGGFSPFVMELKSASHRSGNLFLVVNIYMVYPVVLGTSNFVHIEPVRMTSSLKVIEMLQSSNGIQHIPCAAISALISRAGNANWNRKGLLLIQSNWAPMVKAYGHSRLKNSEYLEARQIRPSDKKVDYQIQKLTNAADNATAREKSGNAETNGKDGHSDEEDLLKYRPNPDMMDTDWS

SEQ ID NO: 183440 - protein, 60 aa, Zea Mays
MFNETPKPIIIIVSDFRSSSVVLSMVLVVDFALTSSWLDGRLSSCLLIYSSSPWTCVSAC

SEQ ID NO: 183441 - protein, 366 aa, Zea Mays
MSTKDDVYSVKIITRKHWVLVGTHDGFILVYEYETGMKLITRFKAVSNIFHGYSDGVLVVHPTLPYVLSAYGREMKLWDWDKGWECIQTFELGRYGSIRQVAFSPNGTDNFATASSDRKIKLWSHSSPTAEYTLCHHKRDVSCLDFFRGDDSNQYLISGSGDYTAKIWDLQKKTCLHTLDVMSPVTSIISLPNSPYLIIGSEDGTVHLWRSPSFRIERILQIGCTRPVRSLCLVGSKRVLIEKMGEVSIMDIDTSIKEPPELLLHVHPTTLVFELQPGKLSQCSMQLTNDTDQHMAFKLSSTDSVDWLEQFLPWYGIVAARSTYTLILNVFLERDTAEKRFCDMILESCTCEYNDNNMYSATTYWE

SEQ ID NO: 183442 - protein, 100 aa, Zea Mays
MDCKASATREDLEFILLNEDAQPKPLPLSLLADITSDFSDKNIIGRGGFGIVYKGFIGNRTVAVKRLLRVLHFDEDGFYREIKCLMKMHLLRLNGNNAIE

SEQ ID NO: 183443 - protein, 411 aa, Zea Mays
MAMLSRAASSAARRPLLPPPRLLAVRAMASSLFGHVEPAPKDPILGVTEAFLADPSSDKVNVGVGAYRDDNGQPVVLSCVREAERRIAGNLNMEYLPMGGSVKMIEESLKLAYGEDSDFIKDKRIAAVQALSGTGACRLFADFQKRFLPDSQIYIPTPTWSNHHNIWRDAQVPQKTFTYYHPESRGLDFSGLMNEIKNAPDGSFFLLHACAHNPTGVDPTEEQWREISHQFKVKKHFPFFDMAYQGFASGDPERDAKAIRIFLEDGHQIGCAQSYAKNMGLYGQRAGCLSILCEDEMQAVAVKSQLQQIARPMYSNPPVHGALVVSIILSDPELKSLWLKEVKGMADRIIGMRKALKENLEKLGSPLSWDHITNQIGMFCYSGMTPEQVDRLTNEYHIYMTRNGRISKCNS

SEQ ID NO: 183444 - protein, 117 aa, Zea Mays
MREIKVQKLVLNISVGESGDRLTRAAKLLRRNFSDTGCFGFGIQEHIDLGIKYDPSTGIYGMDFYVVLERAGYRVARRRRCKSRVGIQHRVTKEDSMKWFQVKYEGVILNKAQANTL

SEQ ID NO: 183445 - protein, 151 aa, Zea Mays
MHELNGQVYHSSFADDDGITKACSCPLLPLKTHIKGPAPASDPDKADIVDEAITFFRANVFFKNFHVKCSADKLLIYLTFYINIALKRLEGCRTLAVGTKAIINLGLEKVPVPGEPGFPFPGLFTLPQSQEEAVGLIKSAKRLYPWIPVIN

SEQ ID NO: 183446 - protein, 177 aa, Zea Mays
MLSQPHPQQQGGEPSSVNSASITQKTSNAIKSDDPTWEHCFVPDMSKKHAIQCKYCDKVIHGGITRVKYHLVNIGGFNVTKCKKVPAHVKQEMEALLTKKTGEKEQRKKEKQRERDEIDLDKSDGSDEEENEHENDVIVLKSTRESNNCSSSRLPTNGGSGTIDNFYKPQSIEESVH

SEQ ID NO: 183447 - protein, 90 aa, Zea Mays
MHLQIDCIPLEYILQRYTYSAIQDVTFSRDDKNLKGKDSETKSYRQKMLLKKAMKVVHHASLSKAGHDRALEMMDELLLLLSLLEPDIEE

SEQ ID NO: 183448 - protein, 470 aa, Zea Mays
MRRLALLSALLDSLLLLLADEGEAAFSDAANLCFRELYVVLFRADLLVSYVASAGRAWALLRAPQLAASFRDLDAELAVVLDVLPAASLRLSWDAAQYLDFLRARCRRRAPAHYHDPAEAALGDCLLAALRHFELGQPPDPSMLRSLLRQIGISDAASCRSEIEYLEEQILNQEEDADLPLIGGVVALLRLLLSSDWMAQENAVTALLNLSIFEPNKTRIMEQEDCLHLIVSVLKNGLTTEAKENAAATLFSLSVVHDYKKKIMNEPGAVEELASMLTKGTARGKKDAVMALFNLSTHPESSGRMLESSAVVSLIESLRNDTVSEEAAGALALLMKQPSIVHLVGSSETVITSLVGLMRRGTPKGKENAVSALYEICRRGGSTLAQRVARIPGLNTVMQNITLTGTKRAKKKASLIVKMCQRSQMPSALALGSTLAVVDHSLVGNSRLRRAPSFGSGELSNPVSISVPVP

SEQ ID NO: 183449 - protein, 160 aa, Zea Mays
MQHGKRKTDLTPLRDRLVMPEDREETAAAAQKLSSTPMRPETAHAPNPVTETAAPKAPKSTKPSKLRDSSTLSSKHRSSKRQEYADFYGTSEPAPVGAAAKVPKDRLRHRHHHREKSGEVAYGAAHHDLKPAEAKPADYSDPSYDPYVRSKYAAESGYRY

SEQ ID NO: 183450 - protein, 257 aa, Zea Mays
MLYMYDPYLILVIGAVVAGYIFSGFQHGFGFSGSEKVEAPENEQHESSTIGKPPLVVESLKEEPGAGWPSLGTLIADLLKLAIEGVGKLLLSVVPQRMQHGKRKTDLTPLRDRLVMPEDREETAAAAQKLSSTPMRPETAHAPNPVTETAAPKAPKSTKPSKLRDSSTLSSKHRSSKRQEYADFYGTSEPAPVGAAAKVPKDRLRHRHHHREKSGEVAYGAAHHDLKPAEAKPADYSDPSYDPYVRSKYAAESGYRY

SEQ ID NO: 183451 - protein, 496 aa, Zea Mays
MGLRSPLVLLLLLLFLAATFRPSAAALAPPTGSIVKQLSSVVRWPRAAPSTHGPKQPGHPQYADGHVGVALQFESGYFVETLVEGDKLGVTPHTVRVSPVEGGELLAVDSAHSNIVRITPPLSEYSRGRLVAGSFQGHSGHIDGKPSDARFKRPTGVAVDDMGNVYVADTANLAIRKIGESAGGKSNIPGYRDGPSEDAKFSTDFDVVYVKKMCSLLVIDRGNAALRKISLPQEDCTYQDSALLSSDLILVIGAVVAGYIFSGFQHGFGFSGSEKVEAPENEQHESSTIGKPPLVVESLKEEPGAGWPSLGTLIADLLKLAIEGVGKLLLSVVPQRMQHGKRKTDLTPLRDRLVMPEDREETAAAAQKLSSTPMRPETAHAPNPVTETAAPKAPKSTKPSKLRDSSTLSSKHRSSKRQEYADFYGTSEPAPVGAAAKVPKDRLRHRHHHREKSGEVAYGAAHHDLKPAEAKPADYSDPSYDPYVRSKYAAESGYRY

SEQ ID NO: 183452 - protein, 257 aa, Zea Mays
MGLRSPLVLLLLLLFLAATFRPSAAALAPPTGSIVKQLSSVVRWPRAAPSTHGPKQPGHPQYADGHVGVALQFESGYFVETLVEGDKLGVTPHTVRVSPVEGGELLAVDSAHSNIVRITPPLSEYSRGRLVAGSFQGHSGHIDGKPSDARFKRPTGVAVDDMGNVYVADTANLAIRKIGESGVTTIAGGKSNIPGYRDGPSEDAKFSTDFDVVYVKKMCSLLVIDRGNAALRKISLPQEDCTYQDSALLSSDDEVLE

SEQ ID NO: 183453 - protein, 68 aa, Zea Mays
MAIEKASSDDLPPDLLQTLQSIPGFDDTHKAFYFAYLVKNPGLARQFPTLPLTYQISFLARFVSETFP

SEQ ID NO: 183454 - protein, 143 aa, Zea Mays
MSGLYRGFSVSITGISLYRGLYFGIYDSMKPLVLVGPLEGNFFASFVLGWTITTFSGACAYPFDTVRRRMMLTSGEPFKYKNGFHAVKLIVSTEGFFTLFRGVGANILSGLAGAGVLSGYDQLQRLASRHDQNFEHNMKGALK

SEQ ID NO: 183455 - protein, 350 aa, Zea Mays
MAGTERLHRPIDPPRPAGSRSVVVGAGGSPARWDDDNDDCGGGGRVEGLAGLHIFDQEAEESPTKNDMANSLDTNCTPIAKGCNTETTETSVESEPVNVLNLLHDHTGIWVPVSVPPMTALASEDWHRGFRCNGGHFPEEEFSWELDEDNKEMTMWDVFADMAVAAKDKVISAAKYEYGRCGMSTVSNFFLQEAWKDMAQTLVDANTGIANELLETEPTKWLPDSAATSCMLCGVRFHPIMCSRHHCRFCGGVFCNGCSNGRSLMPPKFRTADPQRVCDVCGVRLESIQPQLMNQISRASQLPTRDVTDLSTLRSWLNFPWSHTMEYEIYKAANSLRSYCKVCLFILLNY

SEQ ID NO: 183456 - protein, 131 aa, Zea Mays
MEGAGGEAWILLPLHDFHMDPIHPGISVYSFHEGGVDWVEEVVPARAVYGRGSHDRHCRVDWAEARCAGEGGSVAACRDLRWGQRCEGREVRWQLGGSRSCTSFWRSARYGGGQLLLADEDHTVAHQDPEG

SEQ ID NO: 183457 - protein, 130 aa, Zea Mays
MEGAGGEAWILLPLHDFHMDPIHPGISVYSFHEGGVDWVEEVVPARAVYGRGSHDRHCRVDWAEARCAGEVRGMWWRLYPDIGRRLGARGMWGEVRGGGGRCGGYSLGRGGMLRSTRRDGGVGGVRFGGS

SEQ ID NO: 183458 - protein, 172 aa, Zea Mays
MEGAGGEAWILLPLHDFHMDPIHPGISVYSFHEGGVDWVEEVVPARAVYGRGSHDRHCRVDWAEARCAGEVRGMWWRLYPDIGRRLGARGMWGEVRGGGGRCGGYSLGRGGMLRSTRRDGGVGGVRFGGGMPRSAVGTEVRGEGGSVAARWESILYIFLAEREVWRRSTSSR

SEQ ID NO: 183459 - protein, 251 aa, Zea Mays
MATSGVAPFVAKTYRMVDDPATDGVVAWGRDNNSFVVADPFAFSQTLLPAHFKHSNFSSFVRQLNTYGFRKVDPDRWEFAHVSFLRGQTHLLGQIVRRSNGGKRKDDGNGAGSGSADDEDAVAMEVVRLRREQRAIEEQVAAMWRRVQETERRPKQMLAFLVKVAGDPQVLRRLVSGAGGDAVFAAAEPEDGASIKRARLLLDAGSGGDGAVDFSGLYSTTAGSEDDGVGFGSDYLQPPPPYVFPVNSGGY

SEQ ID NO: 183460 - protein, 123 aa, Zea Mays
MEYIYTLLLAILPICYISAVEASWLEIRNRLPNLKMALRRALGWSEGEVMRPESKPCSRLMRQTAGIFSVGGGPRITVPRSLRWASCGAVSMSATSALLVRLFSPECEPQNIAAFDKPELKAQ

SEQ ID NO: 183461 - protein, 196 aa, Zea Mays
MLSCLISVSVNFSTFLVIGKTSPVTYKVLGHLKTCLVLTFGYVLLHDLFSWRNILGILIVVIGMVLYLYFCTRETQQIPAEASPQVVQMKLYVHGFSFVLYLSAGTLGLNGAFSKVAKLELGILVHPADCKSMLDAFIAGCDFHSRIAMNMYQHIRETIEEEKVILEWHPQPDQEKPLVLLLKDAFGAERRKAIRC

SEQ ID NO: 183462 - protein, 1008 aa, Zea Mays
MTTRMADSYLVLLFLLVFVTSNSSSQSMAQITDASELAILLAIKKGWGSPSALSSWSSQNASYCSWAGVRCVNGQVSALSFQNLSIANPVPVPAASICNLKNLSSLDLSYNKLTGQFPTALYSCSAARFLDLSNNRFSGALPADINRLSSAMEHLNLSSNGFTGSVPRAIAAFTKLRSLVLDTNSFDGTYPGSAIAGLSELETLTLANNPFVPGPIPDDFGKLTKLQTLWMSGMNLTGRIPDKLSSLTELTTLALSVNKLHGEIPAWVWSLQKLQILYLYDNSFTGAIGPDITAVSLQEIDLSSNWLNGTIPESMGDLRDLTLLFLYFNNLTGPIPSSVGLLPNLTDIRLFNNRLSGPLPPELGKHSPLANLEVSNNLLRGELPDTLCLNRKLYDLVVFNNSFSGVFPANLADCDTVNNIMAYNNLFTGEFPEKVWSGFPVLTTVMIQNNSFTGTMPSAISSNITRIEMGNNRFSGDVPTSAPGLKTFKAGNNQFSGTLPEDMSGLANLIELNLAGNTISGAIPPSIGSLQRLNYLNLSSNQISGAIPPGIGLLPVLTILDLSSNELTGEIPEDFNDLHTSFLNLSSNQLTGELPESLKNPAYDRSFLGNRGLCAAVNPNVNFPACRYRRHSQMSIGLIILVSVVAGAILVGAVGCFIVRRKKQRCNVTSWKMMPFRKLDFSECDVLITNLRDEDVIGSGGSGKVYRVHLPARGRGRGCAGTVVAVKKLCSRGKAEEKLDREFDTEVKILGDIRHNNIVSLLCYISSEDTKLLVYEYMENGSLDRWLHPKDNAATAALDWPTRLGIAIDAARGLSYMHDECAQPIMHRDVKSSNILLDPGFRAKIADFGLARILLKSGEPESVSAVSGTFGYMAPEYGRGAKVNQKVDVYSFGVVLLELATGRVANDSSKDAADCCLVEWAWRRYKAGDPLHDVVDETIQDRAVYIDDAVAMFKLGVMCTGDDAPSRPSSPSCQEIVRRRIIFGWRRGERQLRGPSCLNFQFNFTFSV

SEQ ID NO: 183463 - protein, 262 aa, Zea Mays
MVHGLLHLLGFDHEVSKVAEEEMEKEEEHILNTLEWRGKGLIKSAYDIATVMEHLQNSVEADSNIEKVILQEKHQPKLSHIICDIDGTIMDYEGGLHEKSIGSLREAIATGVNVIMVTGKSRASTIRTFKLLDFREKGDFISETSPGVFLQGSLIYGRDGKKVHRAELDLDVCKEALLYSLKHRIPLVAYCEEQCLTLFEHPFVELLHTVHNENKVKVMHSIEDLLEYSSIQYQRGFICPKAAFFRTEQRESTCYQNAFKYN

SEQ ID NO: 183464 - protein, 459 aa, Zea Mays
MVRLHQLLSRTLASHQILASATSSVRSTPRLLLPLRLPPPAPPPHGRTLLPIIVAASRQYASSTFGRRGRSTRPPMLLRRKRARSPTRKGPGELRVQIGIEEALPDDPGILSIAETLRTDVGKAVKLALNDLEGSDYMTRDPSICNVDKYASIEVSVLLCDDDFIRKLNKEWRDEDHATDVLSMSQHIPELDIPILQLGDIVISVDTARRQAEERGHTLVDEIRILMVHGLLHLLGFDHEVSKVAEEEMEKEEEHILNTLEWRGKGLIKSAYDIATVMEHLQNSVEADSNIEKVILQEKHQPKLSHIICDIDGTIMDYEGGLHEKSIGSLREAIATGVNVIMVTGKSRASTIRTFKLLDFREKGDFISETSPGVFLQGSLIYGRDGKKVHRAELDLDVCKEALLYSLKHRIPLVAYCEEQCLTLFEHPFVELLHTVHNENKVKVMHSIEDLLEYSSIQN

SEQ ID NO: 183465 - protein, 279 aa, Zea Mays
MVHGLLHLLGFDHEVSKVAEEEMEKEEEHILNTLEWRGKGLIKSAYDIATVMEHLQNSVEADSNIEKVILQEKHQPKLSHIICDIDGTIMDYEGGLHEKSIGSLREAIATGVNVIMVTGKGSLIYGRDGKKVHRAELDLDVCKEALLYSLKHRIPLVAYCEEQCLTLFEHPFVELLHTVHNENKVKVMHSIEDLLEYSSIQKLLLFDSTKEDSSVLRQHFSELSRGKAHVIKMHSNTIDIVPLNTSKGGGLRILLDHLGITKDCDLDSIGDYTRWLSNK

SEQ ID NO: 183466 - protein, 197 aa, Zea Mays
MAARWDCSRESTARWGWPDLRRAGSHMGEGAYVQEANKEPRPWGELTCSSSDLEKCPALGAWGGGSYVQEANKEPRPWGELTCSSSDLEKCPALGAWGGGCCAGCRPEVRCARESSQPWITQGQRRARRELRRRDRWPDHRLRRSCTHGAAYLELAEQKRAAGHGVPAGHHGKGSRGAARQKDEGERGEEEEAVGGG

SEQ ID NO: 183467 - protein, 79 aa, Zea Mays
MLSAFIINTINKTTKFYLFTQHKYDMTSTHIFYAHLNHSFVLLLTTQEQPRQHKFKSDLGINVYETPISQSTREEIYKT

SEQ ID NO: 183468 - protein, 75 aa, Zea Mays
MLSAFIINTINKTTKFYLFTQHKYDMTSTHIFYAHLNHSFVLLLTTQEQPRQHKFKSDLGINVYETPISQSTREE

SEQ ID NO: 183469 - protein, 73 aa, Zea Mays
MYVVAAEPLRVVVRVYECSMAAQGYESPEEQVGIWNLKSQASCALDHFFLPNHVLINHNDLHRLILMEPNRSP

SEQ ID NO: 183470 - protein, 293 aa, Zea Mays
MDARAREAAETSGPGLPLAVRELLAGGVAGGVAKTAVAPLERVKILFQTRRAEFHGSGLIGSFRTIYRTEGLLGFYRGNGASVARIVPYAALHYMAYEEYRRWIILGFPNVEQGPVLDLVAGSIAGGTAVICTYPLDLVRTKLAYQVKGAVSVGFRESKPSEQVYKGIMDCVKTIYRQNGLKGIYRGMAPSLYGIFPYSGLKFYFYEKMKSHVPEEHRKGIIAKLGCGSVAGLLGQTITYPLDVVRRQMQVQALSSSSLVGRGTFESLVMIAKQQGWRQLFSGLSINYLKLLA

SEQ ID NO: 183471 - protein, 172 aa, Zea Mays
MASVGRAGRGGKGDGGKGEGSLARRAWRQYLLQLQQHPLRTKMITAGCLAGVSDSVAQKLSGFQKIEKRRLLLKMLFGFAYGGPFGHFLHKILDYIFQGKKDTKTIAKKVLLEQVTSSPWNNILFLFYYGYVVERRPLKEVTTRVKKQYPSVQLSAWMVFFFSSLPASILGF

SEQ ID NO: 183472 - protein, 170 aa, Zea Mays
MASVGRAGRGGKGDGGKGEGSLARRAWRQYLLQLQQHPLRTKLFGFAYGGPFGHFLHKILDYIFQGKKDTKTIAKKVLLEQVTSSPWNNILFLFYYGYVVERRPLKEVTTRVKKQYPSVQLSAWMFWPIVSWINHQYMPLQFRVIFHSFVACCWGIFLNLRARAMSLKQA

SEQ ID NO: 183473 - protein, 248 aa, Zea Mays
MSSASIRGAYNCKQEHHIQTNHGPVSVAVYGDHDKPALVTYPDIALNHMSCFQGLLFCPEAASLLLHNFCIYHISPPGHELGAAPISPNAPIPSVDDLADQVVDVLDFFGLGSVMCFGVTAGAYILTLFASKYRERVLGLILVSPLCKGPTWTEWLYSKVISNLLYYYGMCGLVKECLLQRYFSKEVQGFSELPESDIVQACRSLLDQRQSMNVWRFVQTMNQYVNISHLYTNDDCAVEKLGGEVTAY

SEQ ID NO: 183474 - protein, 200 aa, Zea Mays
MSCFQGLLFCPEAASLLLHNFCIYHISPPGHELGAAPISPNAPIPSVDDLADQVVDVLDFFGLGSVMCFGVTAGAYILTLFASKYRERVLGLILVSPLCKGPTWTEWLYSKVISNLLYYYGMCGLVKECLLQRYFSKEVQGFSELPESDIVQACRSLLDQRQSMNVWRFVQTMNQYVNISHLYTNDDCAVEKLGGEVTAY

SEQ ID NO: 183475 - protein, 151 aa, Zea Mays
MLLYRLLTIWQIRLGSVMCFGVTAGAYILTLFASKYRERVLGLILVSPLCKGPTWTEWLYSKVISNLLYYYGMCGLVKECLLQRYFSKEVQGFSELPESDIVQACRSLLDQRQSMNVWRFVQTMNQYVNISHLYTNDDCAVEKLGGEVTAY

SEQ ID NO: 183476 - protein, 250 aa, Zea Mays
MAGSSPPRLRRPSSAYEHHIQTNHGPVSVAVYGDHDKPALVTYPDIALNHMSCFQGLLFCPEAASLLLHNFCIYHISPPGHELGAAPISPNAPIPSVDDLADQVVDVLDFFGLGSVMCFGVTAGAYILTLFASKYRERVLGLILVSPLCKGPTWTEWLYSKVISNLLYYYGMCGLVKECLLQRYFSKEVQGFSELPESDIVQACRSLLDQRQSMNVWRFVQTMNQYVNISHLYTNDDCAVEKLGGEVTAY

SEQ ID NO: 183477 - protein, 134 aa, Zea Mays
MCFGVTAGAYILTLFASKYRERVLGLILVSPLCKGPTWTEWLYSKVISNLLYYYGMCGLVKECLLQRYFSKEVQGFSELPESDIVQACRSLLDQRQSMNVWRFVQTMNQYVNISHLYTNDDCAVEKLGGEVTAY

SEQ ID NO: 183478 - protein, 196 aa, Zea Mays
MGDSGGSVVSVDVERISFGGKEHHIQTNHGPVSVAVYGDHDKPALVTYPDIALNHMSCFQGLLFCPEAASLLLHNFCIYHISPPGHELGAAPISPNAPIPSVDDLADQVVDVLDFFGLGSVMCFGVTAGAYILTLFASKYRERVLGLILVSPLCKGPTWTEWLYSDIQSAVLLWHVWVGEGVPTSAVLQQGSARIL

SEQ ID NO: 183479 - protein, 477 aa, Zea Mays
MAASPTSSLAPPVVPMELHAGNRDRLVAALRGHISASARPLHGLVLLQGGEEKTRYCTDHLELFRQESYFAYLFGVQEPGFYGAIDTYKVDMVFYVDEIARVVQDHFGNHGKPLLFLLHGRNTDSGNFSKPASFEGMENFDTDLITLHPILTECRVIKSDLELALIRYANDVSSEAHIEVMRRARPGMKEYQLESIFLHHVYMYGGCRHCSYTCICATGDNSAVLHYGHAAAPNDRTLNDGDMALMDMGAEYHFYGSDITCSYPINGKFNRSQTIIYNAVLKAHNAVISDMRPGVNWMDMHKLAERAILESLRKEQIVQGDVDDMMAQRLGAVFMPHGLGHLLGIDTHDPGGYPEGLERPKDPGLNSLRTTRELKEGMVITVEPGCYFIDALLTKTRDDPISSKFFNWQEVEKYKSFGGVRIESDVYVTAQGCRNLTNCPRETWEIEAVMAGAPWPLPASSSMVVAAENSNDISKAS

SEQ ID NO: 183480 - protein, 461 aa, Zea Mays
MAASPTSSLAPPVVPMELHAGNRDRLVAALRGHISASARPLHGLVLLQGGEEKTRYCTDHLELFRQESYFAYLFGVQEPGFYGAIDIASGQSILFAPRLPADYAVWMGEIKPLSYFRDTYKVDMVFYVDEIARVVQDHFGNHGKPLLFLLHGRNTDSGNFSKPASFEGMENFDTDLITLHPILTECRVIKSDLELALIRYANDVSSEAHIEVMRRARPGMKEYQLESIFLHHVYMYGGCRHCSYTCICATGDNSAVLHYGHAAAPNDRTLNDGDMALMDMGAEYHFYGSDITCSYPINGKFNRSQTIIYNAVLKAHNAVISDMRPGVNWMDMHKLAERAILESLRKEQIVQGDVDDMMAQRLGAVFMPHGLGHLLGIDTHDPGGYPEGLERPKDPGLNSLRTTRELKEGMYVTAQGCRNLTNCPRETWEIEAVMAGAPWPLPASSSMVVAAENSNDISKAS

SEQ ID NO: 183481 - protein, 403 aa, Zea Mays
MGEIKPLSYFRDTYKVDMVFYVDEIARVVQDHFGNHGKPLLFLLHGRNTDSGNFSKPASFEGMENFDTDLITLHPILTECRVIKSDLELALIRYANDVSSEAHIEVMRRARPGMKEYQLESIFLHHVYMYGGCRHCSYTCICATGDNSAVLHYGHAAAPNDRTLNDGDMALMDMGAEYHFYGSDITCSYPINGKFNRSQTIIYNAVLKAHNAVISDMRPGVNWMDMHKLAERAILESLRKEQIVQGDVDDMMAQRLGAVFMPHGLGHLLGIDTHDPGGYPEGLERPKDPGLNSLRTTRELKEGMVITVEPGCYFIDALLTKTRDDPISSKFFNWQEVEKYKSFGGVRIESDVYVTAQGCRNLTNCPRETWEIEAVMAGAPWPLPASSSMVVAAENSNDISKAS

SEQ ID NO: 183482 - protein, 90 aa, Zea Mays
MPNRDGYAPHPRATCLLLPRRSHPRWLAPLLLLVPSPASLPASDGARPRDSPDSPSGLWWRPALPSCPPFLSTPLTSPRSNIARKCRADS

SEQ ID NO: 183483 - protein, 125 aa, Zea Mays
MGICASSKRVRQEEQDSDENVVYVMDEQGGGGEGEDGRGARAAASRKVASLFSQKGKKGPNQDAVILCQRRLSVSSAATAACSRSRTSRRCCACGFPTRTARASPWRALWATTASSATAWCRSRR

SEQ ID NO: 183484 - protein, 309 aa, Zea Mays
MGICASSKRVRQEEQDSDENVVYVMDEQGGGGEGEDGRGARAAASRKVASLFSQKGKKGPNQDAVILCQGFGMEDGVFCGVFDGHGRCGQFISKLVRDYLPFMILSHRNALLMGSDDDDDDPAQLLEEWREACANAFEAMDKELKLQANVDCNFSGTTAVCAIKQGKDLIVANLGDSRAVLATMSDTGYLKAVQLTTDQKPNVPQEAERIKRCNGRVFALKDEPSVLRVWLPDEDCPGLAMARSLGDYRLKRHGVVSEPEVTHRRVAPGDLFIILATDGVWDVLSNEEVVSIVCATPRKQHASKAAASR

SEQ ID NO: 183485 - protein, 166 aa, Zea Mays
MSDSQAQITVRRRECALSGVGQTIRLSPSSIKGLSGCNDIGVDRANFDLIFSTFSVLDDEAVMRKQLHEAREQLFGGRNLEFANPEESLLFFSTEPTIIFGADVTHPAALDDTSSLLPPKTGPRWLTIMALSVHKVTVKSSSMGWKTLSRNSYLHSWNGLSRDPSS

SEQ ID NO: 183486 - protein, 58 aa, Zea Mays
MSFTMLYSQKMIMAFMTSSVSSQFNSTKLYGITTVGSRKTLLCTAKTISVFCLKSSII

SEQ ID NO: 183487 - protein, 228 aa, Zea Mays
MNYDLSPVKRKDGQRAGAATDDSSDMAKPAAARKPSAASTVALTLVLALASAVLLFLLLRFSPSSPSPNPHPHRRLRLRPRAHAHHHQIPFDPVVADIERRLEDREWERLAAAGLHAPGMEAAPVPEDLTDGEVDADEDYINDAARFNVTLRVEALFPKIDVDPADGAVTGAELAAWNLANARREVLHRTARELELHDRDHDGRVAYGEYERPSWAWRFDDLKFIGYS

SEQ ID NO: 183488 - protein, 328 aa, Zea Mays
MNYDLSPVKRKDGQRAGAATDDSSDMAKPAAARKPSAASTVALTLVLALASAVLLFLLLRFSPSSPSPNPHPHRRLRLRPRAHAHHHQIPFDPVVADIERRLEDREWERLAAAGLHAPGMEAAPVPEDLTDGEVDADEDYINDAARFNVTLRVEALFPKIDVDPADGAVTGAELAAWNLANARREVLHRTARELELHDRDHDGRVAYGEYERPSWAWRFDDHNSTDDGVGWWKEEHFSAADMDGDGFLNLTEFNDFLHPADTTNPKLIHWLCKEEVRERDKDNDGKLNFQEFFNGLFYSIRHYDDEGLTDDTGGSDAPAKNLRKAFSD

SEQ ID NO: 183489 - protein, 885 aa, Zea Mays
MHLVSEMTDARVSSQVVEDRGTEKTMPEEQLSVTLSDGKGCFACNERSHNLEQCKTKYKLVPAAHQFGYATKFPFTVIQPSNEMVEKKKFFQHCLLIESNLANLDESMLKDELKKLWNLPGDWELRRECSTTFLASFSSEDDLTSCLKNPEIQTLLDNKEVKLTVTRWNESDDGSPGLVEEWLLVSGVPRMYRNWKELYEVASALGVLIDVDEESLQVGDKEPIRLKLKTAFRSFDAAPFSYYFAFGCWSSRLVMVTAVQDKTQGMEHKIKELDCKEHKKELNVAKSIMLEEPNSTEESRSNGKAKVNKISAPAATITDSEVIAAIESSKPEGVQSIAQSPRSMTGEENFRGIQKPPIKHVFKRRGKKQPVTTEAINKSPSNKMDKEVAPHSQSNATRTGASTGCDMLDQKECSKMEPKRELNMEGITPAGESKKAEKIGACRNSEYSKVASSTIKSKKTQILGDTSRAPRDELITKYPKGDGMDQMGSSAQGDEKEDASIIDTGLLPNSEEVGVYDSFSEMGLQENLLKGIYQYGLEKPSAVHQRGIVPLCKGFDVLHRSLSGTTETICSGVLQRVDYGSAECQALILVPTPDLAQETLKVLEALGEFLGVTAQTCTGGTSAHADQQALLSGAQVLVGTPDCILDMLQKHAVCPDHVRMLFLDEADELLTGGSKDQIYKIIVHLPDKIQVGLFSATYSTEAIESSRRLMDKPVAVIVPRDEELKNVKQYYLAVENEGLKLRKLLALFKTTGTEQLVIFANTRDKVLSLAEDVGKRYAVSASHDGMDQRARDAAVQKFRSGSSSILIATDHGGTTNAMPQVPIIINYDLPTESMRYVRRLQQQNRQFRRSVSVAISFVTPADRRTLSAITSFCKCYMGELPTDLK

SEQ ID NO: 183490 - protein, 846 aa, Zea Mays
MAGQREGMHLVSEMTDARVSSQVVEDRGTEKTMPEEQLSVTLSDGKGCFACNERSHNLEQCKTKYKLVPAAHQFGYATKFPFTVIQPSNEMVEKKKFFQHCLLIESNLANLDESMLKDELKKLWNLPGDWELRRECSTTFLASFSSEDDLTSCLKNPEIQTLLDNKEVKLTVTRWNESDDGSPGLVEEWLLVSGVPRMYRNWKELYEVASALGVLIDVDEESLQVGDKEPIRLKLKTAFRSFDAAPFSYYFAFGCWSSRLVMVTAVQDKTQGMEHKIKELDCKEHKKELNVAKSIMLEEPNSTEESRSNGKAKVNKISAPAATITDSEVIAAIESSKPEGVQSIAQSPRSMTGEENFRGIQKPPIKHVFKRRGKKQPVTTEAINKSPSNKMDKEVAPHSQSNATRTGASTGCDMLDQKECSKMEPKRELNMEGITPAGESKKAEKIGACRNSEYSKVASSTIKSKKTQILGDTSRAPRDELITKYPKGDGMDQMGSSAQGDEKEDASIIDTGLLPNSEEVGVYDSFSEMGLQENLLKGIYQYGLEKPSAVHQRGIVPLCKGFDVLHRSLSGTTETICSGVLQRVDYGSAECQALILVPTPDLAQETLKVLEALVCPDHVRMLFLDEADELLTGGSKDQIYKIIVHLPDKIQVGLFSATYSTEAIESSRRLMDKPVAVIVPRDEELKNVKQYYLAVENEGLKLRKLLALFKTTGTEQLVIFANTRDKVLSLAEDVGKRYAVSASHDGMDQRARDAAVQKFRSGSSSILIATDHGGTTNAMPQVPIIINYDLPTESMRYVRRLQQQNRQFRRSVSVAISFVTPADRRTLSAITSFCKCYMGELPTDLK

SEQ ID NO: 183491 - protein, 212 aa, Zea Mays
MAVSNNITACVTLLALICAVPVIASGVWFASAQGEECARLARWPVAILGGLLLLAALAGFVGAYWNRRGLLAFYLFAMASLVVLLIALLAFAFAVTRGSGAYPVLGRAYDDYRLDGFSMWLRGYVSDDPGRWDKVRACLAVSDTCKKLARQAAFTSADQFYQSHLSPLQVLLIDDRQKCGKIYLYVTNCGAEFECLILGNLDKCDIKLYGNF

SEQ ID NO: 183492 - protein, 539 aa, Zea Mays
MSAAQLLRHSRKLRSLQNPVGCENFSFVRHFSSGSGSFIARENGIGKRTRGTRFSQHNQPAKQLETFSAGVNGSCTWRIASNSLTPSAASWLSGSFSCGQVVSARPFSSSADLPPHQEIGMPSLSPTMTEGNIAKWLKKEGDKVSPGEVLCEVETDKATVEMECMEEGYLAKIIHGDGAKEIKVGEVIAITVEEEGDIEKLKDYKPSSSAEPVAPAEPKAEPEPSQPKAEEKKPTQAPEAKTPKIEEASQSGDRIFASPLARKLAEDNNVPLSSVKGTGPDGRILKADIEDYLAKGGLRESFADPGLGYVDIPNAQIRKVTANRLLASKQTIPHYYLTVDARVDKLVQLRGELNPLQDASGGKKISINDLVIKAAALALRKVPQCNSSWMNDFIRQYHNVNINVAVQTEHGLFVPVIRDADKKGLGAIAEEVKQLAQKARDNSLKPADYEGGTFTVSNLGGPFGIKQFCAIINPPQSAILAIGSAEKRVIPGSADGQFEFGSFMSATLSCDHRVIDGAIGAEFLKAFKGYIENPTSMLL

SEQ ID NO: 183493 - protein, 272 aa, Zea Mays
MSAAQLLRHSRKLRSLQNPVGCENFSFVRHFSSGSGSFIARENGIGKRTRGTRFSQHNQPAKQLETFSAGVNGSCTWRIASNSLTPSAASWLSGSFSCGQVVSARPFSSSADLPPHQEIGMPSLSPTMTEGNIAKWLKKEGDKVSPGEVLCEVETDKATVEMECMEEGYLAKIIHGDGAKEIKVGEVIAITVEEEGDIEKLKDYKPSSSAEPVAPAEPKAEPEPSQPKAEEKKPTQAPEAKTPKIEEASQSGDRIFASPLARPTIKCERYWS

SEQ ID NO: 183494 - protein, 371 aa, Zea Mays
MPPAPPPQQPKNRSRVPTPTGENRRPQRRMESRNASERAAFFARREAAAVLRRVLRGDATRRAAGSIKSLVYSPTVRNKRATFALVCQTLKYLPILKEVLASSEILSSKWKKQEELVYVTTYDILFGQGIAVSGSVEQLIMLQKDSLRTTLDKVCARKRVRCVEDLLSNKSAVKPKPRFLRVNTLKVTTESVIEELNKMHMVDKDEMVPDMLVLPPGTDLHNHPLVTDGKVFLQGRASCMVAVALCPKPGWKVIDACAAPGNKTVHLAALMNGEGSIIACELNKERAKTLQHTVRRSGANNIRIVNGDFLEVDRNDPSYAEVCRYLHFYWSMLFYWTPRALVLEYLQRDLIICFPHILEIVRMMRVQAQGS

SEQ ID NO: 183495 - protein, 262 aa, Zea Mays
MPPAPPPQQPKNRSRVPTPTGENRRPQRRMESRNASERAAFFARREAAAVLRRVLRGDATRRAAGSIKSLVYSPTVRNKRATFALVCQTLKYLPILKEVLASSEILSSKWKKQEELVYVTTYDILFGQGIAVSGSVEQLIMLQKDSLRTTLDKVCARKRVRCVEDLLSNKSAVKPKPRFLRVNTLKVTTESVIEELNKMHMVDKDEMVPDMLVLPPGTDLHNHPLVTDGKVFLQGRASCMVAVALCPKPGWKGTKQSTLLHS

SEQ ID NO: 183496 - protein, 202 aa, Zea Mays
MPPAPPPQQPKNRSRVPTPTGENRRPQRRMESRNASERAAFFARREAAAVLRRVLRGDATRRAAGSIKSLVYSPTVRNKRATFALVCQTLKYLPILKEVLASSEILSSKWKKQEELVYVTTYDILFGQGIAVSGSVEQLIMLQKDSLRTTLDKVCARKRVRCVEDLLSNKSAVKPKPRFLRVNTLKVTTESVIEELNKMHMY

SEQ ID NO: 183497 - protein, 170 aa, Zea Mays
MEDEGSSGPSLGPDREASSSPLQRPERMRGASGTMPLTVKQVLSDPQKRAAYDQYGKKGLKAFADIQERCEAEWMKEILGDYDAIHSLHPHLDRDTTPEYNRKRIAQWIPPGQTSFIALNERTPCFFSTLSDRQQFRYKLAYSCNLSSMLEPIIKENYQLLTVCKNEPAH

SEQ ID NO: 183498 - protein, 92 aa, Zea Mays
MEDEGSSGPSLGPDREASSSPLQRPERMRGASGTMPLTVKQVLSDPQKRAAYDQYGKKGLKAFADIQERCEAEWMKEILGDYDAIHVRVVIY

SEQ ID NO: 183499 - protein, 124 aa, Zea Mays
MAGLPFLPCRTQGLLQLSPAHPAGIPGATRTPQQPRGIHPFSPRAIKTGRRVSPAHQNQIQNSPWEFGGRFAAAWVWWGMRRTTPASELKRLGVSSNGMTIIGARCSWMVARQRRQLHPRHTRA

SEQ ID NO: 183500 - protein, 554 aa, Zea Mays
MDPSSSGSGGNSLPSVGPDGQKRRVCYYYDPDVGNYYYGQGHPMKPHRIRMTHSLLARYGLLNQMHVYRPSLASQRDLCRFHADDYIKFLRSVTPDTQQEQTRLLKRFNVGEDCPVFDGLYSFCQTYAGASVGGAFRLNHGHDIAINWSGGLHHAKKSEASGYCYVNDIVLAILELLKYHERVLYVDIDIHHGDGVEEAFYTTDRVMTVSFHKFGDYFPGTGDIRDIGHSKGKYYSLNAPLDDGIDDESYQSLFKPIMSKVMEVFRPGAVVLQCGADSLSGDRLGCFNLSIRGHAECVRYMRSFNVPLLLLGGGGYTIRNVARCWCYETGVALGQELEDKMPANEYYGYFAPYYTLHVTPSNMENKNTRHQLDDIRSKLLDNLRKLQHAPSVQFQERVPDTEVPDPDKDQDDPDERHDPDSDTEVDDNKAVEASARRSILGMKVKREFGENDTKVQVGMEVKREFGGENDTKVQVGMKVKRKFGENDTKVQDGGRVASEHRVLEPKAEDNGFSIQAPIPIQILQSRMVVQRGGSFVAQVLVLWSGLDASLATWE

SEQ ID NO: 183501 - protein, 522 aa, Zea Mays
MDPSSSGSGGNSLPSVGPDGQKRRVCYYYDPDVGNYYYGQGHPMKPHRIRMTHSLLARYGLLNQMHVYRPSLASQRDLCRFHADDYIKFLRSVTPDTQQEQTRLLKRFNVGEDCPVFDGLYSFCQTYAGASVGGAFRLNHGHDIAINWSGGLHHAKKSEASGYCYVNDIVLAILELLKYHERVLYVDIDIHHGDGVEEAFYTTDRVMTVSFHKFGDYFPGTGDIRDIGHSKGKYYSLNAPLDDGIDDESYQSLFKPIMSKVMEVFRPGAVVLQCGADSLSGDRLGCFNLSIRGHAECVRYMRSFNVPLLLLGGGGYTIRNVARCWCYETGVALGQELEDKMPANEYYGYFAPYYTLHVTPSNMENKNTRHQLDDIRSKLLDNLRKLQHAPSVQFQERVPDTEVPDPDKDQDDPDERHDPDSDTEVDDNKAVEASARRSILGMKVKREFGENDTKVQVGMEVKREFGGENDTKVQDGGRVASEHRVLEPKAEDNGFSIQAPHVCARAMAVDEPSNVKNEPEGN

SEQ ID NO: 183502 - protein, 91 aa, Zea Mays
MSTRPQVSQDQNGFTRPESTVLHRPAIGLVGTRYSRHGARHVSESTAPHLPVSCHGGYKLLSPSLHSQCVRAVLVLVRPRLSLPMMRHVAS

SEQ ID NO: 183503 - protein, 127 aa, Zea Mays
MEEADVLCDRIGIIANGSLQCIGSSKELKDRYGGSCLLTVTTPAGGQEEEEVERLVQSISPAANRVYRVSGTQKFEMPKRGMKISAVFQAMEQAKSSLDIVAWGLADTTLEDVFVRVAKQTDMSTVT

SEQ ID NO: 183504 - protein, 780 aa, Zea Mays
MGASRLEQTDALFRKNLVIQRRACKTNCCLILFPLALCSVIGGLQIAINHASSQGGGGGGGGGGATPAIRLDCSCSNVSVDENALGGIQCPDECPLPRAPKWPPVVRTPSPEYRAVQDGLFPFADLPDASCRAEGSCPATFLVTGDNHSFVGSVIDNILPTHSSSVNLSADVSALSDFVLADDGEFHQSFLQNKCSPNLTLSYPVQYGNNVVSQVYDFLSSDQSNFNLIISYNSTNDYGVYDESEQSIPVINQAGPVQKPNLVQVPRLANMASNAYLHLKGNGLKMPFEFVKEMPRAAIPIHDGQFDLAPYIGQLPFVWTMELLFPVILTNLVYERQNKLRIMMKMHGLGDLPYWTISYCYFLLLSLLYVLSFVLFGSALGLTFFRQNNYGMQFIFYFAYMNLQISFAFLMTTYFSSVRTATVTGYLYIFVSGLLSQFMFRPYVEDSNISRIWITLMELLPAFSLYRIVYEFSRFAQAQPENYMASSGIQWADMTNPESGLAGVLTIMAVEWLLFLLFAFYLDHFRSYKDGIRKAAALVRSRIHGNHSEAAQQQNVQLQEFRASIQLERTDVLKEREIVELISKESDRSYSVICDNLGKVYRGKDGNADKIAVRGISISMSRGQCFGVLGPNGAGKTTLINMLTGFCKPTSGTAYVQGMDIRFDMDRIYTGIGVCPQDDLLWESLTGREHLLFYGRLKKLKAAALFEAIEQSLRSMHLLAGGVADKLVGKYSGGMKRRLSVAISLIGDPKRIRWKRLTFCATGSGSSRMVACSALEALRS

SEQ ID NO: 183505 - protein, 890 aa, Zea Mays
MGASRLEQTDALFRKNLVIQRRACKTNCCLILFPLALCSVIGGLQIAINHASSQGGGGGGGGGGATPAIRLDCSCSNVSVDENALGGIQCPDECPLPRAPKWPPVVRTPSPEYRAVQDGLFPFADLPDASCRAEGSCPATFLVTGDNHSFVGSVIDNILPTHSSSVNLSADVSALSDFVLADDGEFHQSFLQNKCSPNLTLSYPVQYGNNVVSQVYDFLSSDQSNFNLIISYNSTNDYGVYDESEQSIPVINQAGPVQKPNLVQVPRLANMASNAYLHLKGNGLKMPFEFVKEMPRAAIPIHDGQFDLAPYIGQLPFVWTMELLFPVILTNLVYERQNKLRIMMKMHGLGDLPYWTISYCYFLLLSLLYVLSFVLFGSALGLTFFRQNNYGMQFIFYFAYMNLQISFAFLMTTYFSSVRTATVTGYLYIFVSGLLSQFMFRPYVEDSNISRIWITLMELLPAFSLYRIVYEFSRFAQAQPENYMASSGIQWADMTNPESGLAGVLTIMAVEWLLFLLFAFYLDHFRSYKDGIRKAAALVRSRIHGNHSEAAQQQNVQLQEFRASIQLERTDVLKEREIVELISKESDRSYSVICDNLGKVYRGKDGNADKIAVRGISISMSRGQCFGVLGPNGAGKTTLINMLTGFCKPTSGTALLWESLTGREHLLFYGRLKKLKAAALFEAIEQSLRSMHLLAGGVADKLVGKYSGGMKRRLSVAISLIGDPKVVYMDEPSSGLDPASRKNLWKAVKSAKQDRTIVLTTHSMEEADVLCDRIGIIANGSLQCIGSSKELKDRYGGSCLLTVTTPAGGQEEEEVERLVQSISPAANRVYRVSGTQKFEMPKRGMKISAVFQAMEQAKSSLDIVAWGLADTTLEDVFVRVAKQTDMSTVT

SEQ ID NO: 183506 - protein, 915 aa, Zea Mays
MGASRLEQTDALFRKNLVIQRRACKTNCCLILFPLALCSVIGGLQIAINHASSQGGGGGGGGGGATPAIRLDCSCSNVSVDENALGGIQCPDECPLPRAPKWPPVVRTPSPEYRAVQDGLFPFADLPDASCRAEGSCPATFLVTGDNHSFVGSVIDNILPTHSSSVNLSADVSALSDFVLADDGEFHQSFLQNKCSPNLTLSYPVQYGNNVVSQVYDFLSSDQSNFNLIISYNSTNDYGVYDESEQSIPVINQAGPVQKPNLVQVPRLANMASNAYLHLKGNGLKMPFEFVKEMPRAAIPIHDGQFDLAPYIGQLPFVWTMELLFPVILTNLVYERQNKLRIMMKMHGLGDLPYWTISYCYFLLLSLLYVLSFVLFGSALGLTFFRQNNYGMQFIFYFAYMNLQISFAFLMTTYFSSVRTATVTGYLYIFVSGLLSQFMFRPYVEDSNISRIWITLMELLPAFSLYRIVYEFSRFAQAQPENYMASSGIQWADMTNPESGLAGVLTIMAVEWLLFLLFAFYLDHFRSYKDGIRKAAALVRSRIHGNHSEAAQQQNVQLQEFRASIQLERTDVLKEREIVELISKESDRSYSVICDNLGKVYRGKDGNADKIAVRGISISMSRGQCFGVLGPNGAGKTTLINMLTGFCKPTSGTAYVQGMDIRFDMDRIYTGIGVCPQDDLLWESLTGREHLLFYGRLKKLKAAALFEAIEQSLRSMHLLAGGVADKLVGKYSGGMKRRLSVAISLIGDPKVVYMDEPSSGLDPASRKNLWKAVKSAKQDRTIVLTTHSMEEADVLCDRIGIIANGSLQCIGSSKELKDRYGGSCLLTVTTPAGGQEEEEVERLVQSISPAANRVYRVSGTQKFEMPKRGMKISAVFQAMEQAKSSLDIVAWGLADTTLEDVFVRVAKQTDMSTVT

SEQ ID NO: 183507 - protein, 688 aa, Zea Mays
MGASRLEQTDALFRKNLVIQRRACKTNCCLILFPLALCSVIGGLQIAINHASSQGGGGGGGGGGATPAIRLDCSCSNVSVDENALGGIQCPDECPLPRAPKWPPVVRTPSPEYRAVQDGLFPFADLPDASCRAEGSCPATFLVTGDNHSFVGSVIDNILPTHSSSVNLSADVSALSDFVLADDGEFHQSFLQNKCSPNLTLSYPVQYGNNVVSQVYDFLSSDQSNFNLIISYNSTNDYGVYDESEQSIPVINQAGPVQKPNLVQVPRLANMASNAYLHLKGNGLKMPFEFVKEMPRAAIPIHDGQFDLAPYIGQLPFVWTMELLFPVILTNLVYERQNKLRIMMKMHGLGDLPYWTISYCYFLLLSLLYVLSFVLFGSALGLTFFRQNNYGMQFIFYFAYMNLQISFAFLMTTYFSSVRTATVTGYLYIFVSGLLSQFMFRPYVEDSNISRIWITLMELLPAFSLYRIVYEFSRFAQAQPENYMASSGIQWADMTNPESGLAGVLTIMAVEWLLFLLFAFYLDHFRSYKDGIRKAAALVRSRIHGNHSEAAQQQNVQLQEFRASIQLERTDVLKEREIVELISKESDRSYSVICDNLGKVYRGKDGNADKIAVRGISISMSRGQCFGVLGPNGAGKTTLINMLTGFCKPTSGTALLWESLTGREHLLFYGRLKKLKAAALFEDECQVL

SEQ ID NO: 183508 - protein, 829 aa, Zea Mays
MGASRLEQTDALFRKNLVIQRRACKTNCCLILFPLALCSVIGGLQIAINHASSQGGGGGGGGGGATPAIRLDCSCSNVSVDENALGGIQCPDECPLPRAPKWPPVVRTPSPEYRAVQDGLFPFADLPDASCRAEGSCPATFLVTGDNHSFVGSVIDNILPTHSSSVNLSADVSALSDFVLADDGEFHQSFLQNKCSPNLTLSYPVQYGNNVVSQVYDFLSSDQSNFNLIISYNSTNDYGVYDESEQSIPVINQAGPVQKPNLVQVPRLANMASNAYLHLKGNGLKMPFEFVKEMPRAAIPIHDGQFDLAPYIGQLPFVWTMELLFPVILTNLVYERQNKLRIMMKMHGLGDLPYWTISYCYFLLLSLLYVLSFVLFGSALGLTFFRQNNYGMQFIFYFAYMNLQISFAFLMTTYFSSVRTATVTGYLYIFVSGLLSQFMFRPYVEDSNISRIWITLMELLPAFSLYRIVYEFSRFAQAQPENYMASSGIQWADMTNPESGLAGVLTIMAVEWLLFLLFAFYLDHFRSYKDGIRKAAALVRSRIHGNHSEAAQQQNVQLQEFRASIQLERTDVLKEREIVELISKESDRSYSVICDNLGKVYRGKDGNADKIAVRGISISMSRGQCFGVLGPNGAGKTTLINMLTGFCKPTSGTALLWESLTGREHLLFYGRLKKLKAAALFEQRIRKTLTVSRYRLPSPAVGPHTPHPKIPNRTTEGNPSQKSLCRRPRFPSPLVVAVAVEARGAAPAVAPDALGHAAAPRPEPGRHRRRWWSPWRRAALPLPWLQTGIAALLTLACEARGAAAPVVALGTSRCSPWSARRAAQLLSRS

SEQ ID NO: 183509 - protein, 846 aa, Zea Mays
MGASRLEQTDALFRKNLVIQRRACKTNCCLILFPLALCSVIGGLQIAINHASSQGGGGGGGGGGATPAIRLDCSCSNVSVDENALGGIQCPDECPLPRAPKWPPVVRTPSPEYRAVQDGLFPFADLPDASCRAEGSCPATFLVTGDNHSFVGSVIDNILPTHSSSVNLSADVSALSDFVLADDGEFHQSFLQNKCSPNLTLSYPVQYGNNVVSQDVRCTEGLVLWRDSSRLINDELYGGYYQGNRNHKIDEIAAVYDFLSSDQSNFNLIISYNSTNDYGVYDESEQSIPVINQAGPVQKPNLVQVPRLANMASNAYLHLKGNGLKMPFEFVKEMPRAAIPIHDGQFDLAPYIGQLPFVWTMELLFPVILTNLVYERQNKLRIMMKMHGLGDLPYWTISYCYFLLLSLLYVLSFVLFGSALGLTFFRQNNYGMQFIFYFAYMNLQISFAFLMTTYFSSVRTATVTGYLYIFVSGLLSQFMFRPYVEDSNISRIWITLMELLPAFSLYRIVYEFSRFAQAQPENYMASSGIQWADMTNPESGLAGVLTIMAVEWLLFLLFAFYLDHFRSYKDGIRKAAALVRSRIHGNHSEAAQQQNVQLQEFRASIQLERTDVLKEREIVELISKESDRSYSVICDNLGKVYRGKDGNADKIAVRGISISMSRGQCFGVLGPNGAGKTTLINMLTGFCKPTSGTAYVQGMDIRFDMDRIYTGIGVCPQDDLLWESLTGREHLLFYGRLKKLKAAALFELGPTRHIPKSPIEQQREIHRKNPCAAALGSRRRWWSPSPWRRAALPLPWPQTPSATRLLLARSPVDIAAAGGRRGGARRCPCRGSRRSRPRGCSSLGAR

SEQ ID NO: 183510 - protein, 97 aa, Zea Mays
MMDQFYWSERLQWLGVAPEPLQRQNLVPDNDDALSIHNAADVLVGAIRSALSPETKAQAARIADRLSSEDGIGEALRILKARVLTQNKIISSFIASK

SEQ ID NO: 183511 - protein, 455 aa, Zea Mays
MAGRGGAGRRPRAVFMAFGTQGDVFPIAALAAAFACDQQEYAVVFITHSAHRSLSAHLAASSVRYMPVSSPPVLAAEQLENISSDSIQSNHERESFSMRKKAIQAEHRKECLSFVEEVFGNDPSISGDFIVINFFALEGWHLAELFQVKCVIAAPYFVPYSAPTSFKRQFKQTFPLLYKYFQEAPANTVCWTDIIHWMWALFMESWGSWRNDCLNLSPIPFTDPVTNLPLWHVREESPLLLYGFSKEIVECPGYWPFNAHACGFWFLPMDWQFSCDKCMELSGNINSSFGGMLCANHSSLEHFLTRNAYSSRPIFVGLSSIGRMGFLRNPKAFLMVLKAAIESTDYMFILFSSGYKPLDSAIQSIASSVNESRGVDSPSLGGDSALLFNGRLFCFLGWLFPRCAAAIHHAGSGSTAAALLAGIPQVTTTLSTASPHVLRLSFCCSFLVLLFIRNL

SEQ ID NO: 183512 - protein, 463 aa, Zea Mays
MAGRGGAGRRPRAVFMAFGTQGDVFPIAALAAAFACDQQEYAVVFITHSAHRSLSAHLAASSVRYMPVSSPPVLAAEQLENISSDSIQSNHERESFSMRKKAIQAEHRKECLSFVEEVFGNDPSISGDFIVINFFALEGWHLAELFQVKCVIAAPYFVPYSAPTSFKRQFKQTFPLLYKYFQEAPANTQLQVCWTDIIHWMWALFMESWGSWRNDCLNLSPIPFTDPVTNLPLWHVREESPLLLYGFSKEIVECPGYWPFNAHACGFWFLPMDWQFSCDKCMELSGNINSSFGGMLCANHSSLEHFLTRNAYSSRPIFVGLSSIGRMGFLRNPKAFLMVLKAAIESTDYMFILFSSGYKPLDSAIQSIASSVNESRGVDSPSLGGDSALLFNGRLFCFLGSIPYSWLFPRCAAAIHHAGSGSTAAALLAGIPQVTTTLSTASPHVLRLSFCCSFLVLLFIRNL

SEQ ID NO: 183513 - protein, 325 aa, Zea Mays
MAGRGGAGRRPRAVFMAFGTQGDVFPIAALAAAFACDQQEYAVVFITHSAHRSLSAHLAASSVRYMPVSSPPVLAAEQLENISSDSIQSNHERESFSMRKKAIQAEHRKECLSFVEEVFGNDPSISGDFIVINFFALEGWHLAELFQVKCVIAAPYFVPYSAPTSFKRQFKQTFPLLYKYFQEAPANTVCWTDIIHWMWALFMESWGSWRNDCLNLSPIPFTDPVTNLPLWHVREESPLLLYGFSKEIVECPGYWPFNAHACGFWFLPMDWQFSCDKCMELSGNINSSFGGMLCANHSSLEHFLTRNAYSSRPIFVGLSSIGRLP

SEQ ID NO: 183514 - protein, 409 aa, Zea Mays
MAGRGGAGRRPRAVFMAFGTQGDVFPIAALAAAFACDQQEYAVVFITHSAHRSLSAHLAASSVRYMPVSSPPVLAAEQLENISSDSIQSNHERESFSMRKKAIQAEHRKECLSFVEEVFGNDPSISGDFIVINFFALVCWTDIIHWMWALFMESWGSWRNDCLNLSPIPFTDPVTNLPLWHVREESPLLLYGFSKEIVECPGYWPFNAHACGFWFLPMDWQFSCDKCMELSGNINSSFGGMLCANHSSLEHFLTRNAYSSRPIFVGLSSIGRMGFLRNPKAFLMVLKAAIESTDYMFILFSSGYKPLDSAIQSIASSVNESRGVDSPSLGGDSALLFNGRLFCFLGSIPYSWLFPRCAAAIHHAGSGSTAAALLAGIPQVTTTLSTASPHVLRLSFCCSFLVLLFIRNL

SEQ ID NO: 183515 - protein, 450 aa, Zea Mays
MAGRGGAGRRPRAVFMAFGTQGDVFPIAALAAAFACDQQEYAVVFITHSAHRSLSAHLAASSVRYMPVSSPPVLAAEQLENISSDSIQSNHERESFSMRKKAIQAEHRKECLSFVEEVFGNDPSISGDFIVINFFALEGWHLAELFQVKCVIAAPYFVPYSAPTSFKRQFKQTFPLLYKYFQEAPANTVCWTDIIHWMWALFMESWGSWRNDCLNLSPIPFTDPVTNLPLWHVREESPLLLYGFSKEIVECPGYWPFNAHACGFWFLPMDWQFSCDKCMELSGNINSSFGGMLCANHSSLEHFLTRNAYSSRPIFVGLSSIGRMGFLRNPKAFLMVLKAAIESTDYMFILFSSGYKPLDSAIQSIASSVNESRGVDSPSLGGDSALLFNGRLFCFLGCAAAIHHAGSGSTAAALLAGIPQVTTTLSTASPHVLRLSFCCSFLVLLFIRNL

SEQ ID NO: 183516 - protein, 301 aa, Zea Mays
MAGRGGAGRRPRAVFMAFGTQGDVFPIAALAAAFACDQQEYAVVFITHSAHRSLSAHLAASSVRYMPVSSPPVLAAEQLENISSDSIQSNHERESFSMRKKAIQAEHRKECLSFVEEVFGNDPSISGDFIVINFFALEGWHLAELFQVKCVIAAPYFVPYSAPTSFKRQFKQTFPLLYKYFQEAPANTVCWTDIIHWMWALFMESWGSWRNDCLNLSPIPFTDPVTNLPLWHVREESPLLLYGFSKEIVECPGYWPFNAHACGFWFLPMDWQFSCDKCMELSGNINSSFGEWAFLEILKHF

SEQ ID NO: 183517 - protein, 395 aa, Zea Mays
MPVSSPPVLAAEQLENISSDSIQSNHERESFSMRKKAIQAEHRKECLSFVEEVFGNDPSISGDFIVINFFALEGWHLAELFQVKCVIAAPYFVPYSAPTSFKRQFKQTFPLLYKYFQEAPANTVCWTDIIHWMWALFMESWGSWRNDCLNLSPIPFTDPVTNLPLWHVREESPLLLYGFSKEIVECPGYWPFNAHACGFWFLPMDWQFSCDKCMELSGNINSSFGGMLCANHSSLEHFLTRNAYSSRPIFVGLSSIGRMGFLRNPKAFLMVLKAAIESTDYMFILFSSGYKPLDSAIQSIASSVNESRGVDSPSLGGDSALLFNGRLFCFLGSIPYSWLFPRCAAAIHHAGSGSTAAALLAGIPQVTTTLSTASPHVLRLSFCCSFLVLLFIRNL

SEQ ID NO: 183518 - protein, 404 aa, Zea Mays
MAGRGGAGRRPRAVFMAFGTQGDVFPIAALAAAFACDQQEYAVVFITHSAHRSLSAHLAASSVRYMPVSSPPVLAAEQLENISSDSIQSNHERESFSMRKKAIQAEHRKECLSFVEEVFGNDPSISGDFIVINFFALVCWTDIIHWMWALFMESWGSWRNDCLNLSPIPFTDPVTNLPLWHVREESPLLLYGFSKEIVECPGYWPFNAHACGFWFLPMDWQFSCDKCMELSGNINSSFGGMLCANHSSLEHFLTRNAYSSRPIFVGLSSIGRMGFLRNPKAFLMVLKAAIESTDYMFILFSSGYKPLDSAIQSIASSVNESRGVDSPSLGGDSALLFNGRLFCFLGWLFPRCAAAIHHAGSGSTAAALLAGIPQVTTTLSTASPHVLRLSFCCSFLVLLFIRNL

SEQ ID NO: 183519 - protein, 264 aa, Zea Mays
MDWQFSCDKCMELSGNINSSFGGMLCANHSSLEHFLTRNAYSSRPIFVGLSSIGRMGFLRNPKAFLMVLKAAIESTDYMFILFSSGYKPLDSAIQSIASSVNESRGVDSPSLGGDSALLFNGRLFCFLGSIPYSWLFPRCAAAIHHAGSGSTAAALLAGIPQVTCPFMMDQFYWSERLQWLGVAPEPLQRQNLVPDNDDALSIHNAADVLVGAIRSALSPETKAQAARIADRLSSEDGIGEALRILKARVLTQNKIISSFIASK

SEQ ID NO: 183520 - protein, 267 aa, Zea Mays
MPVSSPPVLAAEQLENISSDSIQSNHERESFSMRKKAIQAEHRKECLSFVEEVFGNDPSISGDFIVINFFALEGWHLAELFQVKCVIAAPYFVPYSAPTSFKRQFKQTFPLLYKYFQEAPANTVCWTDIIHWMWALFMESWGSWRNDCLNLSPIPFTDPVTNLPLWHVREESPLLLYGFSKEIVECPGYWPFNAHACGFWFLPMDWQFSCDKCMELSGNINSSFGGMLCANHSSLEHFLTRNAYSSRPIFVGLSSIEWAFLEILKHF

SEQ ID NO: 183521 - protein, 416 aa, Zea Mays
MLVFCGRSFWKRPKHQWGFYCDQFLRFELFQVKCVIAAPYFVPYSAPTSFKRQFKQTFPLLYKYFQEAPANTVCWTDIIHWMWALFMESWGSWRNDCLNLSPIPFTDPVTNLPLWHVREESPLLLYGFSKEIVECPGYWPFNAHACGFWFLPMDWQFSCDKCMELSGNINSSFGGMLCANHSSLEHFLTRNAYSSRPIFVGLSSIGRMGFLRNPKAFLMVLKAAIESTDYMFILFSSGYKPLDSAIQSIASSVNESRGVDSPSLGGDSALLFNGRLFCFLGSIPYSWLFPRCAAAIHHAGSGSTAAALLAGIPQVTCPFMMDQFYWSERLQWLGVAPEPLQRQNLVPDNDDALSIHNAADVLVGAIRSALSPETKAQAARIADRLSSEDGIGEALRILKARVLTQNKIISSFIASK

SEQ ID NO: 183522 - protein, 60 aa, Zea Mays
MYVVIPVVQLLDVEFSDGVHVENTKRCQHLPLSPQLQHRPLDIALCILYSLIHCPNQLHP

SEQ ID NO: 183523 - protein, 261 aa, Zea Mays
MPQQPPFNAAAPQPILEQGKSDPSVSGGDWASFDSFGQQQTPQTSSSVNPLESALAQLSFSEAPSAPNASAYPVSLDPTLKANDGGHSSVLDQSHSLFDAPFGISGNQASTVMSGQGSSVQQSPLAAPTAGPPSQATANPQGTSGIQGAASSTDSKFSSRKELPVDIFTALYPPSTQMMPGWQRAPHFGMGYAMQYPPGVGLQSYLHGAFPQPTYQQPVYSQHAYSHPQPVKASNPFDLGNESAHIQAHMATRFGFLQHGF

SEQ ID NO: 183524 - protein, 299 aa, Zea Mays
MPQQPPFNAAAPQPILEQGKSDPSVSGGDWASFDSFGQQQTPQTSSSVNPLESALAQLSFSEAPSAPNASAYPVSLDPTLKANDGGHSSVLDQSHSLFDAPFGISGNQASTVMSGQGSSVQQSPLAAPTAGPPSQATANPQGTSGIQGAASSTDSKFSSRKELPVDIFTALYPPSTQMMPGWQRAPHFGMGYAMQYPPGVGLQSYLHGAFPQPTYQQPVYSQHAYSHPQPVKASNPFDLGNESAHIQAHMPPSGPPGASAGSAPQTLIGNSSFGVPPQQPHQLYQSEAHLTSSEQHAHA

SEQ ID NO: 183525 - protein, 354 aa, Zea Mays
MPQQPPFNAAAPQPILEQGKSDPSVSGGDWASFDSFGQQQTPQTSSSVNPLESALAQLSFSEAPSAPNASAYPVSLDPTLKANDGGHSSVLDQSHSLFDAPFGISGNQASTVMSGQGSSVQQSPLAAPTAGPPSQATANPQGTSGIQGAASSTDSKFSSRKELPVDIFTALYPPSTQMMPGWQRAPHFGMGYAMQYPPGVGLQSYLHGAFPQPTYQQPVYSQHAYSHPQPVKASNPFDLGNESAHIQAHMPPSGPPGASAGSAPQTLIGNSSFGVPPQQPHQLYQSEAHLSHFMMQQVPNSMPMPEQQPNSMLATQQGLGSFNMGFDQEAPLGYPQANTSPSYGSVGGGSNPFG

SEQ ID NO: 183526 - protein, 412 aa, Zea Mays
MESGLVASHRLRVPPPSASAGHHHLIRHCLPPLRAASAAAAAVPAPGDDASPKFLGVETKTIKKIVPLGLMFFCILFNYTILRDTKDVLVVTAKGSSAEIIPFLKTWVNLPMAVGFMLLYTKLADVLSKEALFYAVIFPFIAFFGAFAYVLYPMRDAIHPTALADRLLASLGPSFLGPVAILRVWSFCLFYVMAELWGSVVISVLFWGFANQITTVEEAKEFYPLFGLGANVALIFSGRTVKYFSNMRKNLGPGVDGWAISLKAMMSIVVVLGLVITGIYWGVNKFVIDNSSVCNPLGKSGGALIQQFMILSFGSLANSTPYLGGILLVIVLAWLGAVRSLDLQFSSLAKQELGREKLLKTQAVETVAEVVGTGNGSLQETLASEPSANGAATKQSQEPESTASEKSGQQSQ

SEQ ID NO: 183527 - protein, 80 aa, Zea Mays
MQNDRADGWLWDGCPCSPRTRFCTSTVYCHCEGSPWLAPCMHCSSLSLTFSCLHLPEALDQLRQVLIRGASFLHGAVSFL

SEQ ID NO: 183528 - protein, 763 aa, Zea Mays
MGVVERRNQTVVEMARCMMKSKGVPSRFWGEAVTTAVYLLNRSPTKSVQGRTPYEAWFGKKPSVQHLKTFGCIAHVKKIGPGVNKLSDRSTKMVLLGYESGTKGYRLFDPITEKLCISRDVVFEESERWDWESAEKNQQTETTIPFTTQFQFTVPDQTIQVPAGSGDTSESSGGAAASPPSPQTPMTPSVSQNQSQAASVASGSNNSSQSVNAGSSDMIPLRYRTISDLLDSTQEVHDFEYSAFCLLAADEPKNVESALTDQCWRQAMNSELDSIEQNHTWVWADLPKEQKAIGLKWVFKVKRDAAGNIVKHKARLVAKGYAQKEGVDFDEVFAPVARFETIRVLIALAAQWNWEIHHMDVKSAFLNGDLQEEVYVTQPPGFQDTKKLGKVLRLNKALYGLKQAPRAWNIRLDSELVSLGFRKCEVEHAVYRRGTGKTMLVVGVYVDDLIICGPSVSSIAEFKQQMMKTFSMSDLGLLSYYLGMEVKQGENSITICQKSYATKILEQCNMTSCNHTDTPMEQRVKLSTAQKGTEYDETRYRSVVGSLRYLVNTRPDLAFAVGLVSRFMEAPGKEHWTAVKKILRYVAGTLNLGVNFKKGAAADYTLLGYTDSDCSGDLVHRKSTSGILFFLGDNLVTWSSQKQRVVALSSCEAEYVAAALGACQGVWLRMLIADIMHKNPQKFRLLIDNMSAIELSKNPVYHDRSKHIDTRYHYIRDCIDKGIVDVEHVGTEHQLADILTKPLSRIRLVELRSRLGMVQVQQD

SEQ ID NO: 183529 - protein, 52 aa, Zea Mays
MWNPNCKSGQKRNKLVKYRCNWLTKSYCCCTYFHPAKACIVLIHSEAVDVVM

SEQ ID NO: 183530 - protein, 148 aa, Zea Mays
MSRRTLVVEEILTIDIKPGWKKGTKITFPEKGNEAPHIIPADIVFIIDEKPHDVFTRDGNDLVMTQKITLAEALTECTVNITTLDGRNLTVQINNIIYPGYEEVVPREGMPIQKDSSKKGNLRIKFSIKFPSRLTSEQKAEIKRLLGS

SEQ ID NO: 183531 - protein, 224 aa, Zea Mays
MGGMGGGAERGMRGSRFGMFGDDIFGSHPQFPGEASMHVPQRSQKVPPIENRLPCNLADLYKGTTKKMKISREVLDASGRTLVVEEILTIDIKPGWKKGTKITFPEKGNEAPHIIPADIVFIIDEKPHDVFTRDGNDLVMTQKITLAEALTECTVNITTLDGRNLTVQINNIIYPGYEEVVPREGMPIQKDSSKKGNLRIKFSIKFPSRLTSEQKAEIKRLLGS

SEQ ID NO: 183532 - protein, 258 aa, Zea Mays
MGVDYYKVLQVGRGASDDELKKAYRKLAMKWHPDKNPSNKKEAEAKFKQISEAYEVLSDSQKRAIYDQAGEEGLKAQVPPTGAGGPSGSSFYGGNASTFQFNPRSADDIFAEFFGFSSPFSTMGGMGGGAERGMRGSRFGMFGDDIFGSHPQFPGEASMHVPQRSQKVPPIENRLPCNLADLYKGTTKKMKISREVLDASGRTLVVEEILTIDIKPGWKKGTKITFPEKGNEAPHIIPADIVFIIDEKPHDVFTRDDK

SEQ ID NO: 183533 - protein, 193 aa, Zea Mays
MGVDYYKVLQVGRGASDDELKKAYRKLAMKWHPDKNPSNKKEAEAKFKQISEAYEVLSDSQKRAIYDQAGEEGLKAQVPPTGAGGPSGSSFYGGNASTFQFNPRSADDIFAEFFGFSSPFSTMGGMGGGAERGMRGSRFGMFGDDIFGSHPQFPGEASMHVPQRSQKVPPIENRLPCNLADLYKGELWLLRRS

SEQ ID NO: 183534 - protein, 314 aa, Zea Mays
MGVDYYKVLQVGRGASDDELKKAYRKLAMKWHPDKNPSNKKEAEAKFKQISEAYEVLSDSQKRAIYDQAGEEGLKAQVPPTGAGGPSGSSFYGGNASTFQFNPRSADDIFAEFFGFSSPFSTMGGMGGGAERGMRGSRFGMFGDDIFGSHPQFPGEASMHVPQRSQKVPPIENRLPCNLADLYKGTTKKMKISREVLDASGRTLVVEEILTIDIKPGWKKGTKITFPEKGNEAPHIIPADIVFIIDEKPHDVFTRDVQINNIIYPGYEEVVPREGMPIQKDSSKKGNLRIKFSIKFPSRLTSEQKAEIKRLLGS

SEQ ID NO: 183535 - protein, 83 aa, Zea Mays
MGVLMYCIEKGLQYIDSHETLTLMSRQPNCGASPHTQSNIPRSHNGGTAYDGTGVEAEGRSRLVEIPQRSQRRETGVRVLRLE

SEQ ID NO: 183536 - protein, 368 aa, Zea Mays
MVPIIGGKDLDLHQLYKEVTSRGGIDKVKAENRWREVTASFIFPATATNASFMLKKYYMSLLYHFEQLYFFRVQGWHQQEIDSRMNSSIEIKTEGQAYHKRKRGINTSSDPASSSDNVDVDVIVDGKFEHGYIVTVIMGSKSTKAILYNCTEEPALPTPEPPVANNSTGLKGVRRRRRRRKKLSTTDPRHPKPNRSGYNFFFQDQHRILKPQYPAQDRLISKMIGERWNNLSPEDKAVYQQRGVEDKERYRTQLAAYKELRTGQPISNAVPIQQRLPLTEVTIDEVDSKVSQDDMLLSNQGYSSSDESDHSGEKNVEDELNTETSPEVSMETTGSPGHPDPSRDGDHFELRRRENPKADEKDNAPPDS

SEQ ID NO: 183537 - protein, 464 aa, Zea Mays
MPRQRTLTSEAAGGRLLLVVVAVLLCLSVPLGRAAPPGAEVAEFPGFTGKLPSKHYAGYVTVGQHEQRKRHLYYYLAVSERNPSLDPVVIWINGGPACSGFSAFLHSFGPFRMEGSQVHINDGPRVAVNPYSWTKMASLLLVDSPAGVGYSYADHEDDYTTDDTSRVADLYDFLSKWFAEYAEFLSNPFYVAGCSYSGVIVPVLAHEIIKRNEESGGVKINFKGYSLCNPAIDVDIENNAHVPYAFRMGLISDELFQSLVTTCNGKYWNNSNPSCQENMEQFYTQIKGINMEHILCPPCRYKMGITNQFIEYDSGQMFESLSKTSKHGLECNDQELALEKLFDTRSGREKLHAKKVEVSGPWKRCPKRVLYTRDILTLIEYHLNITSKGYRVFIYSGDHSLLVPFTSTLEWLKKLNYKEIEKWHPWYLENQIAGYSIRYENNILFATIKTLNCGDSLREGTILI

SEQ ID NO: 183538 - protein, 451 aa, Zea Mays
MPRQRTLTSEAAGGRLLLVVVAVLLCLSVPLGRAAPPGAEVAEFPGFTGKLPSKHYAGYVTVGQHEQRKRHLYYYLAVSERNPSLDPVVIWINGGPACSGFSAFLHSFGPFRMEGSQVHINDGPRVAVNPYSWTKMASLLLVDSPAGVGYSYADHEDDYTTDDTSRVADLYDFLSKWFAEYAEFLSNPFYVAGCSYSGVIVPVLAHEIIKRNEESGGVKINFKGYSLCNPAIDVDIENNAHVPYAFRMGLISDELFQSLVTTCNGKYWNNSNPSCQENMEQFYTQIKGINMEHILCPPCRYKMGITNQFIEYDSGQMFESLSKTSKHGLECNDQELALEKLFDTRSGREKLHAKKVEVSGPWKRCPKRVLYTRDILTLIEYHLNITSKGYRVFIYSGDHSLLVPFTSTLEWLKKLNYKEIEKWHPWYLENQIAGYSIRYENNILFATIKVH

SEQ ID NO: 183539 - protein, 487 aa, Zea Mays
MPRQRTLTSEAAGGRLLLVVVAVLLCLSVPLGRAAPPGAEVAEFPGFTGKLPSKHYAGYVTVGQHEQRKRHLYYYLAVSERNPSLDPVVIWINGGPACSGFSAFLHSFGPFRMEGSQVHINDGPRVAVNPYSWTKMASLLLVDSPAGVGYSYADHEDDYTTDDTSRVADLYDFLSKWFAEYAEFLSNPFYVAGCSYSGVIVPVLAHEIIKSNEESGGVKINFKGYSLCNPAIDVDIENNAHVPYAFRMGLISDELFQSLVTTCNGKYWNNSNPSCQENMEQFYTQIKGINMEHILCPPCRYKMGITNQFIEYDSGQMFESLSKTSKHGLECNDQELALEKLFDTRSGREKLHAKKVEVSGPWKRCPKRVLYTRDILTLIEYHLNITSKGYRVFIYSGDHSLLVPFTSTLEWLKKLNYKEIEKWHPWYLENQIAGYSIRYENNILFATIKGAGHVPSDYLPFEVFAAYQRSTEMQFEGFKSKRAETGA

SEQ ID NO: 183540 - protein, 455 aa, Zea Mays
MPRQRTLTSEAAGGRLLLVVVAVLLCLSVPLGRAAPPGAEVAEFPGFTGKLPSKHYAGYVTVGQHEQRKRHLYYYLAVSERNPSLDPVVIWINGGPACSGFSAFLHSFGPFRMEGSQVHINDGPRVAVNPYSWTKMASLLLVDSPAGVGYSYADHEDDYTTDDTSRVADLYDFLSKWFAEYAEFLSNPFYVAGCSYSGVIVPVLAHEIIKRNEESGGVKINFKGYSLCNPAIDVDIENNAHVPYAFRMGLISDELFQSLVTTCNGKYWNNSNPSCQENMEQFYTQIKGINMEHILCPPCRYKMGITNQFIEYDSGQMFESLSKTSKHGLECNDQELALEKLFDTRSGREKLHAKKVEVSGPWKRCPKRVLYTRDILTLIEYHLNITSKGYRVFIYSGDHSLLVPFTSTLEWLKKLNYKEIEKWHPWYLENQIAGYSIRYENNILFATIKQSVIAQ

SEQ ID NO: 183541 - protein, 464 aa, Zea Mays
MPRQRTLTSEAAGGRLLLVVVAVLLCLSVPLGRAAPPGAEVAEFPGFTGKLPSKHYAGYVTVGQHEQRKRHLYYYLAVSERNPSLDPVVIWINGGPACSGFSAFLHSFGPFRMEGSQVHINDGPRVAVNPYSWTKMASLLLVDSPAGVGYSYADHEDDYTTDDTSRVADLYDFLSKWFAEYAEFLSNPFYVAGCSYSGVIVPVLAHEIIKRNEESGGVKINFKGYSLCNPAIDVDIENNAHVPYAFRMGLISDELFQSLVTTCNGKYWNNSNPSCQENMEQFYTQIKGINMEHILCPPCRYKMGITNQFIEYDSGQMFESLSKTSKHGLECNDQELALEKLFDTRSGREKLHAKKVEVSGPWKRCPKRVLYTRDILTLIEYHLNITSKGYRVFIYSGDHSLLVPFTSTLEWLKKLNYKEIEKWHPWYLENQIAGYSIRYENNILFATIKCSVLLVWFLDSSVMW

SEQ ID NO: 183542 - protein, 450 aa, Zea Mays
MPRQRTLTSEAAGGRLLLVVVAVLLCLSVPLGRAAPPGAEVAEFPGFTGKLPSKHYAGYVTVGQHEQRKRHLYYYLAVSERNPSLDPVVIWINGGPACSGFSAFLHSFGPFRMEGSQVHINDGPRVAVNPYSWTKMASLLLVDSPAGVGYSYADHEDDYTTDDTSRVADLYDFLSKWFAEYAEFLSNPFYVAGCSYSGVIVPVLAHEIIKSNEESGGVKINFKGYSLCNPAIDVDIENNAHVPYAFRMGLISDELFQSLVTTCNGKYWNNSNPSCQENMEQFYTQIKGINMEHILCPPCRYKMGITNQFIEYDSGQMFESLSKTSKHGLECNDQELALEKLFDTRSGREKLHAKKVEVSGPWKRCPKRVLYTRDILTLIEYHLNITSKGYRVFIYSGDHSLLVPFTSTLEWLKKLNYKEIEKWHPWYLENQIAGYSIRYENNILFATIKN

SEQ ID NO: 183543 - protein, 450 aa, Zea Mays
MPRQRTLTSEAAGGRLLLVVVAVLLCLSVPLGRAAPPGAEVAEFPGFTGKLPSKHYAGYVTVGQHEQRKRHLYYYLAVSERNPSLDPVVIWINGGPACSGFSAFLHSFGPFRMEGSQVHINDGPRVAVNPYSWTKMASLLLVDSPAGVGYSYADHEDDYTTDDTSRVADLYDFLSKWFAEYAEFLSNPFYVAGCSYSGVIVPVLAHEIIKRNEESGGVKINFKGYSLCNPAIDVDIENNAHVPYAFRMGLISDELFQSLVTTCNGKYWNNSNPSCQENMEQFYTQIKGINMEHILCPPCRYKMGITNQFIEYDSGQMFESLSKTSKHGLECNDQELALEKLFDTRSGREKLHAKKVEVSGPWKRCPKRVLYTRDILTLIEYHLNITSKGYRVFIYSGDHSLLVPFTSTLEWLKKLNYKEIEKWHPWYLENQIAGYSIRYENNILFATIKN

SEQ ID NO: 183544 - protein, 335 aa, Zea Mays
MPRQRTLTSEAAGGRLLLVVVAVLLCLSVPLGRAAPPGAEVAEFPGFTGKLPSKHYAGYVTVGQHEQRKRHLYYYLAVSERNPSLDPVVIWINGGPACSGFSAFLHSFGPFRMEGSQVHINDGPRVAVNPYSWTKMASLLLVDSPAGVGYSYADHEDDYTTDDTSRVADLYDFLSKWFAEYAEFLSNPFYVAGCSYSGVIVPVLAHEIIKRNEESGGVKINFKGYSLCNPAIDVDIENNAHVPYAFRMGLISDELFQSLVTTCNGKYWNNSNPSCQENMEQFYTQIKGINMEHILCPPCRYKMGITNQFIEYDSGQMFESLSKTSKHGLECNVSI

SEQ ID NO: 183545 - protein, 373 aa, Zea Mays
MPRQRTLTSEAAGGRLLLVVVAVLLCLSVPLGRAAPPGAEVAEFPGFTGKLPSKHYAGYVTVGQHEQRKRHLYYYLAVSERNPSLDPVVIWINGGPACSGFSAFLHSFGPFRMEGSQVHINDGPRVAVNPYSWTKMASLLLVDSPAGVGYSYADHEDDYTTDDTSRVADLYDFLSKWFAEYAEFLSNPFYVAGCSYSGVIVPVLAHEIIKSNEESGGVKINFKGYSLCNPAIDVDIENNAHVPYAFRMGLISDELFQSLVTTCNGKYWNNSNPSCQENMEQFYTQIKGINMEHILCPPCRYKMGITNQFIEYDSGQMFESLSKTSKHGLECNWRPFLACSFYFNFGVAKETKLQGNREMAPLVLGESDCWVLN

SEQ ID NO: 183546 - protein, 499 aa, Zea Mays
MPRQRTLTSEAAGGRLLLVVVAVLLCLSVPLGRAAPPGAEVAEFPGFTGKLPSKHYAGYVTVGQHEQRKRHLYYYLAVSERNPSLDPVVIWINGGPACSGFSAFLHSFGPFRMEGSQVHINDGPRVAVNPYSWTKMASLLLVDSPAGVGYSYADHEDDYTTDDTSRVADLYDFLSKWFAEYAEFLSNPFYVAGCSYSGVIVPVLAHEIIKRNEESGGVKINFKGYSLCNPAIDVDIENNAHVPYAFRMGLISDELFQSLVTTCNGKYWNNSNPSCQENMEQFYTQIKGINMEHILCPPCRYKMGITNQFIEYDSGQMFESLSKTSKHGLECNDQELALEKLFDTRSGREKLHAKKVEVSGPWKRCPKRVLYTRDILTLIEYHLNITSKGYRVFIYSGDHSLLVPFTSTLEWLKKLNYKEIEKWHPWYLENQIAGYSIRYENNILFATIKRGGLHMIAVAARAGILFLHRTHILPYLFVLQHLPWWPLSWLPSVLTTSGC

SEQ ID NO: 183547 - protein, 96 aa, Zea Mays
MHLATDPRIFTSTSCVAAPSPVGEGKARPRGDSVVACPDNAMSFEGREGGWTSWRLPEWAEPHRDDCLGRRDDASSLPPAWHGKFETEGIELLATN

SEQ ID NO: 183548 - protein, 71 aa, Zea Mays
MSEEYRRGGQELFSSLGLQEPLRSIGVSFASVAPIAGYRSLRKLPPRYSSFTGINETDINEMNIFGCQELI

SEQ ID NO: 183549 - protein, 100 aa, Zea Mays
MVLDFVRKHINSGTPLLAGNSVYVDFLFLKKYMPQLAAVFSHVIVDVSSIMALCIRWYPKERKQTPRKQKTHRAMDDIKESIAELKYYKHNIFKPQKSKR

SEQ ID NO: 183550 - protein, 130 aa, Zea Mays
MDEWCKTHHAASGLTERVLQSELSEHDAEAKVLDFVRKHINSGTPLLAGNSVYVDFLFLKKYMPQLAAVFSHVIVDVSSIMALCIRWYPKERKQTPRKQKTHRAMDDIKESIAELKYYKHNIFKPQKSKR

SEQ ID NO: 183551 - protein, 133 aa, Zea Mays
MASGELHIVSRVGPEKELKAIQYLERRECEYDQKISIDFYKEGDPLKPAVTGVLVFVSTPDPIGNKYYLGPAPLQDMARQIATANGPTGYNRDYLFSMEKALASISHEDDSIIELANEVRKVLNRTKETKITG

SEQ ID NO: 183552 - protein, 266 aa, Zea Mays
MDRDLKLHKSIDCFFSGTTAVAVIKQEHNLIIGNLGDSRAVLGTRDENNQLIAVQLTVDLKPNIPSEAQRIRQRRGRIFALPEEPEVARVWLPKYNSPGLAMARAFGDFCLKDHGVISTPDVSYHHITEKDEFVVLATDGVWDVLSNDEVVSTVCRATSQASAARFLVESAHRAWRTRFPTSKIDDCAVVCLFLNTDKASESSSSLAKNLADAVEASSAGRATTVQVSAGASTDVAALVPVPDGNEVSIAETITKLVTLMDLPKDG

SEQ ID NO: 183553 - protein, 271 aa, Zea Mays
MLCSRFLFHGEAQNFCSRDDTIFCGVFDGHGPYGHLVAKRVRDLLPLKLGEGLTTEDGRVTSTGNIKLNTHDVASPEHIDKGSTAISSEAQQNGEYPETFPALRTSFLKAFRVMDRDLKLHKSIDCFFSGTTAVAVIKQEHNLIIGNLGDSRAVLGTRDENNQLIAVQLTVDLKPNIPSEAQRIRQRRGRIFALPEEPEVARVWLPKYNSPGLAMARAFGDFCLKDHGVISTPDVSYHHITEKDEFVVLATDGVSRLSTYAPFIPSVFRSF

SEQ ID NO: 183554 - protein, 92 aa, Zea Mays
MNHQVMVRTDWESTKIDVMYRAIKCKFSTYPHLTNMLLSTAGSVLVEASPHDLFWGGGREGEGLNYLGRLLMQLRSEILGTVPASAEVGEAD

SEQ ID NO: 183555 - protein, 337 aa, Zea Mays
MSQSLNLPEEANLWNLNDAYTIVATQRGARRDFQRKLAMKGVEVVEFDMLNPRAVMSYCYDRGYLAVLWECGGTLAASAISASVIHKVYAFWAPKIIGGLNAPTPVGELGMSQMTQAINLIDVSYEQIDRDMLMSGFIEPIPDLSPVIPSVEEIPSIDPEVSPYETNIISFYKTWDIFGAFSNFSPHSIQMPDENGDYFTWPTVEHYYQAHKFVGVDNPQARDIVQEIKLAKSPEEAARIGRTRQKGFPELVRTDWESTKIDVMYRAIKCKFSTYPHLTNMLLSTAGSVLVEASPHDLFWGGGREGEGLNYLGRLLMQLRSEILGTVPASAEVGEAD

SEQ ID NO: 183556 - protein, 453 aa, Zea Mays
MKAFKLMLWGRICRVNCSSCCLQEALKSCLTVNAPLLYRAAFHVPFSVLKYAMTADGKIAASSGHASWISGKASRGRVFELRGRSDAVIVGGNTVRFDDPRLTARHVKGHVPVRIVMSQSLNLPEEANLWNLNDAYTIVATQRGARRDFQRKLAMKGVEVVEFDMLNPRAVMSYCYDRGYLAVLWECGGTLAASAISASVIHKVYAFWAPKIIGGLNAPTPVGELGMSQMTQAINLIDVSYEQIDRDMLMSGFIEPIPDLSPVIPSVEEIPSIDPEVSPYETNIISFYKTWDIFGAFSNFSPHSIQMPDENGDYFTWPTVEHYYQAHKFVGVDNPQARDIVQEIKLAKSPEEAARIGRTRQKGFPELVRTDWESTKIDVMYRAIKCKFSTYPHLTNMLLSTAGSVLVEASPHDLFWGGGREGEGLNYLGRLLMQLRSEILGTVPASAEVGEAD

SEQ ID NO: 183557 - protein, 275 aa, Zea Mays
MSQSLNLPEEANLWNLNDAYTIVATQRGARRDFQRKLAMKGVEVVEFDMLNPRAVMSYCYDRGYLAVLWECGGTLAASAISASVIHKVYAFWAPKIIGGLNAPTPVGELGMSQMTQAINLIDVSYEQIDRDMLMSGFIEPIPDLSPVIPSVEEIPSIDPEVSPYETNIISFYKTWDIFGAFSNFSPHSIQMPDENGDYFTWPTVEHYYQAHKFVGVDNPQARDIVQEIKLAKSPEEAARIGRTRQKGFPELVCPIIVFRPVQWWFRTGLDIWPAS

SEQ ID NO: 183558 - protein, 317 aa, Zea Mays
MTADGKIAASSGHASWISGKASRGRVFELRGRSDAVIVGGNTVRFDDPRLTARHVKGHVPVRIVMSQSLNLPEEANLWNLNDAYTIVATQRGARRDFQRKLAMKGVEVVEFDMLNPRAVMSYCYDRGYLAVLWECGGTLAASAISASVIHKVYAFWAPKIIGGLNAPTPVGELGMSQMTQAINLIDVSYEQIDRDMLMSGFIEPIPDLSPVIPSVEEIPSIDPEVSPYETNIISFYKTWDIFGAFSNFSPHSIQMPDENGDYFTWPTVEHYYQAHKFVGVDNPQARDIVQEIKLAKSPEEAARIGRTRQKGFPELMV

SEQ ID NO: 183559 - protein, 458 aa, Zea Mays
MPLPQPLLGGASPAPARAASSFLHPLLHTRHRVSTAPAAASSFVPASHSSHANDAMLLRRAADVADRSAGLTSPHPNFGCVIARPQLNTDSADSWVVGEGFLYAQGTPCAELLASQEAGEHARGGTAYLNLEPGDCFGDNTAVGSLVQAGITRVVVGLRHPLKHLRGKAIQALRNEGIQVDVVGEDLQSKLFKEALKSCLTVNAPLLYRAAFHVPFSVLKYAMTADGKIAASSGHASWISGKASRGRVFELRGRSDAVIVGGNTVRFDDPRLTARHVKGHVPVRIVMSQSLNLPEEANLWNLNDAYTIVATQRGARRDFQRKLAMKGVEVVEFDMLNPRAVMSYCYDRGYLAVLWECGGTLAASAISASVIHKVYAFWAPKIIGGLNAPTPVGELGMSQMTQAINLIDVSYEQSLESMEFATLELECFAGSGQFLRFLLWSHTKHTLCYDWKSIWAPA

SEQ ID NO: 183560 - protein, 433 aa, Zea Mays
MAPAPRASSFFSVLLVLLFALSVGCASATGVFQVRRKFPRHGGRGVAEHLAALRRHDANRHGRLLGAVDLALGGVGLPTDTGLYYTRIEIGSPPKGYYVQVDTGSDILWVNCIRCDGCPTRSGLGIELTQYDPAGSGTTVGCEQEFCVANSAGGVPPTCPSTSSPCQFRITYGDGSTTTGFYVTDFVQYNQVSGNGQTTTSNASITFGCGAQLGGDLGSSNQALDGILGFGQSDSSMLSQLAAARRVRKIFAHCLDTVRGGGIFAIGNVVQPKVKTTPLVPNVTHYNVNLQGISVGGATLQLPTSTFDSGDSKGTIIDSGTTLAYLPREVYRTLLAAVFDKYQDLPLHNYQDFVCFQFSGSIDDGFPVITFSFEGDLTLNVYPDDYLFQNRNDLYCMGFLDGGVQTKDGKDMLLLGVHELCRRPGPLKQTSSL

SEQ ID NO: 183561 - protein, 361 aa, Zea Mays
MAPAPRASSFFSVLLVLLFALSVGCASATGVFQVRRKFPRHGGRGVAEHLAALRRHDANRHGRLLGAVDLALGGVGLPTDTGLYYTRIEIGSPPKGYYVQVDTGSDILWVNCIRCDGCPTRSGLGIELTQYDPAGSGTTVGCEQEFCVANSAGGVPPTCPSTSSPCQFRITYGDGSTTTGFYVTDFVQYNQVSGNGQTTTSNASITFGCGAQLGGDLGSSNQALDGILGFGQSDSSMLSQLAAARRVRKIFAHCLDTVRGGGIFAIGNVVQPKVKTTPLVPNVTHYNVNLQGISVGGATLQLPTSTFDSGDSKGTIIDSGTTLAYLPREVYRTLLAAVFDKYQDLPLHNYQDFVCFQFSGR

SEQ ID NO: 183562 - protein, 160 aa, Zea Mays
MTLESYTCENCIWQKEKTLYHLFLRCNFAKACWNSIGLVPPRIANPEEAAANLKQQLNVPFSMEIIILMTWSIWKCRNAWLFQNKDPTVQQCKHEFTKELLLEEEAIEDDVRPCRDLESKKPEAARTAKRWEVVRSLEFSGQPTSPACPHWCVIATPVPY

SEQ ID NO: 183563 - protein, 350 aa, Zea Mays
MVSDGGACPLPAVDVKLLLSDNSRSKVWSAGYLSFALWDSRTKGLLKVVNIDGQVDTRFDILSAQDSYSYETKQTLFSPRKEKARSPVGFLQRSRNALLGAADAVRRVAVKAGFGDDTRRIEAFTMSTDGMIWTGSANGSLAQWDGSGNRLQEFLHHSSSVQCIYNFGTRIWVGYMDGNIQLLDLEGNLLGGWIAHSSPILSMAVGGSYIFTLAGHGGIRGWNLASPGPLDNILRSELMEKDSSYKSFEYMKVLVGSWNVGQEKASYESLRAWLKLPSPEVGLVVLGLQEVDMGAGFLAMSAAKETVGLEGSTNGEWWLDVIGQILKVHSFVRVGSRQMAGLLIAGENKS

SEQ ID NO: 183564 - protein, 415 aa, Zea Mays
MSTDGMIWTGSANGSLAQWDGSGNRLQEFLHHSSSVQCIYNFGTRIWVGYMDGNIQLLDLEGNLLGGWIAHSSPILSMAVGGSYIFTLAGHGGIRGWNLASPGPLDNILRSELMEKDSSYKSFEYMKVLVGSWNVGQEKASYESLRAWLKLPSPEVGLVVLGLQEVDMGAGFLAMSAAKETVGLEGSTNGEWWLDVIGQILKVHSFVRVGSRQMAGLLIAVWVRINLKQFIGDIENAAVPCGLGRAIGNKGAVGLRMRIHGRNICFVNCHFSAHMEAVSRRNEDFDHVFRSMTFSSPSNGLLTTSVSGSAAQLLRGTNGSRLPELSDTDLIVFLGDFNYRLYNISFDEAMGLVSRRCFDWLRENDQLRAEMKSGRVFQGLREGEFKFPPTYKFEKHIAGLSGIKTLFKFLVTVLD

SEQ ID NO: 183565 - protein, 343 aa, Zea Mays
MDRGSWTGGGGVPLVGGTPWASVRVGRLFLWDSRTKGLLKVVNIDGQVDTRFDILSAQDSYSYETKQTLFSPRKEKARSPVGFLQRSRNALLGAADAVRRVAVKAGFGDDTRRIEAFTMSTDGMIWTGSANGSLAQWDGSGNRLQEFLHHSSSVQCIYNFGTRIWVGYMDGNIQLLDLEGNLLGGWIAHSSPILSMAVGGSYIFTLAGHGGIRGWNLASPGPLDNILRSELMEKDSSYKSFEYMKVLVGSWNVGQEKASYESLRAWLKLPSPEVGLVVLGLQEVDMGAGFLAMSAAKETVGLEGSTNGEWWLDVIGQILKVHSFVRVGSRQMAGLLIAGENKS

SEQ ID NO: 183566 - protein, 1112 aa, Zea Mays
MANPGGTNPFASPADAASSPWDDLPDDFFLSTSITSPSPSPPPIPPPIPSTSPRHATPHRSTSLPPASTPSAATSASVSVSASFSDPRPRAAPASHQHQHQPQLLHPSHSLPAFPAAASRSPAAAAQVWPPPPGPHHSGSIPEFAAAPASSAHLPPARTAVRADRPPPLDLRPRPPRESQAGAALRVLACCCDASRSEAGAAARLWAAGEAGVRAWDLADAFRSPSQQRWGDESSAPFRESRRTPPALCLAADPARSVVWSGHADGRIMGWTADPGPEAGECLSWEAHRGPVFALAVSSYGDLWSGSEGGAIKVWYAELIQKSLVSQTEEKHKTLLVERSSIDLRDMVSDGGACPLPAVDVKLLLSDNSRSKVWSAGYLSFALWDSRTKGLLKVVNIDGQVDTRFDILSAQDSYSYETKQTLFSPRKEKARSPVGFLQRSRNALLGAADAVRRVAVKAGFGDDTRRIEAFTMSTDGMIWTGSANGSLAQWDGSGNRLQEFLHHSSSVQCIYNFGTRIWVGYMDGNIQLLDLEGNLLGGWIAHSSPILSMAVGGSYIFTLAGHGGIRGWNLASPGPLDNILRSELMEKDSSYKSFEYMKVLVGSWNVGQEKASYESLRAWLKLPSPEVGLVVLGLQEVDMGAGFLAMSAAKETVGLEGSTNGEWWLDVIGQILKVHSFVRVGSRQMAGLLIAVWVRINLKQFIGDIENAAVPCGLGRAIGNKGAVGLRMRIHGRNICFVNCHFSAHMEAVSRRNEDFDHVFRSMTFSSPSNGLLTTSVSGSAAQLLRGTNGSRLPELSDTDLIVFLGDFNYRLYNISFDEAMGLVSRRCFDWLRENDQLRAEMKSGRVFQGLREGEFKFPPTYKFEKHIAGLSGYDNSEKRRIPAWCDRVLYRDSRTSSQIECSLECPVVCSISLYDSCMEATDSDHKPVKCVFNLDIAHVDKQTMRQKYGEIMGSNKEVLDSLQGLEALPEVDISTNDIILQDQNPFVVKLHNRSTKELACFEIIGQTPKSSGTPFSGFPSWLKVSPAVGIISPRQSVEVTLQHGQIRSQDYLTGTSGDSSGAAQEKVATLLVTVTRVDSTAGRRHKIQVQHRCRRETYSSRGYNLADRFFA

SEQ ID NO: 183567 - protein, 161 aa, Zea Mays
MEPVTSSQRPGSSTSSTSERIGANSAAGAPGLSPSSSIGSLTAEKSTLNPNAKEFKLNPNAKSFTPSASLRPPHPTSSDASYYYPNNMPAMPLGPGLPVGMGFPPAYGAQPVMYNTQPGASPHGYMHPAGPQYGQQMTIGGQTRPVYYYAPEMQQYRGRNF

SEQ ID NO: 183568 - protein, 400 aa, Zea Mays
MMSHEQQIVPPSKGSVNGFPHRKLDKEGSGTQSRINLVRSSSGGFTNSGHGSHSRDRLIYVLTQLIGHHVDVHVNNGSIISGIFHATNPDKDFGVVLKMAQVIKDGSARGQRYPAVLVKKPETMIIPARELVQVFAKDIELGGELPKVPGNDKRKDLLIDSAITRYHYLEERELERWAPDGGDSECIELEKYDRKGNRSWDQFETNAALFGVKSTFNEEIYTTKLERGPHMRELEKHASRIAREIEGEDTRDIHLAEERGLFLGDDLDHDEEIKYSAVRRDTDNSKYKPPFTKVPSSTCHVDSFNRTVNIDPNDSLACSSTMDKESSSHIFDDTDASATIHTNSVSQPTSDYLSDRPLSNDENRLDRKLNKESNENMDNRKLQHEDNLPDGARPLISEVQ

SEQ ID NO: 183569 - protein, 64 aa, Zea Mays
MHLRNLLPPSMERSLLLALWNCALTAVSTAQIQNCLLTKVKISFIQIIEKLSVNAPSNGSKLKS

SEQ ID NO: 183570 - protein, 384 aa, Zea Mays
MTRPCLLRLSELFFLTYDRRFIQEWLSAGNRTCPQTQQVLSNTIITPNHLVRSMISQWCTDNGITLPPVENQDEDLVTNNERETFRKLFERIVSSSSDLSEQREAIKELRLRTKCNSSLRAAIGERPDSISQMISVASSPELENSAEVVEDTVTAILNLSIHESNKKIIGDDPLAVPFLIKALQSGTMEARSNAAAAIFSLSALDGNKARIGELGAMRPLVELLEHGSTAARKDAASAIFNLCTLHENKSRATKSGAVDVTLRAVACAGDGSGSGSLVDESLAVLALLSGDHEAVEEVGETGGVASMLHVVKDDPCKRNKENAAAVLFAVCVYDRTRLREVAEHEKLNGSLGWLARNGTSRARRKAAGILDKMKRSMHHPHYSC

SEQ ID NO: 183571 - protein, 370 aa, Zea Mays
MTYDRRFIQEWLSAGNRTCPQTQQVLSNTIITPNHLVRSMISQWCTDNGITLPPVENQDEDLVTNNERETFRKLFERIVSSSSDLSEQREAIKELRLRTKCNSSLRAAIGERPDSISQMISVASSPELENSAEVVEDTVTAILNLSIHESNKKIIGDDPLAVPFLIKALQSGTMEARSNAAAAIFSLSALDGNKARIGELGAMRPLVELLEHGSTAARKDAASAIFNLCTLHENKSRATKSGAVDVTLRAVACAGDGSGSGSLVDESLAVLALLSGDHEAVEEVGETGGVASMLHVVKDDPCKRNKENAAAVLFAVCVYDRTRLREVAEHEKLNGSLGWLARNGTSRARRKAAGILDKMKRSMHHPHYSC

SEQ ID NO: 183572 - protein, 489 aa, Zea Mays
MAKPTPVASAEEAAAMRRRLRRLVAAVAAGSADAEAFDEAAEALAKLRDAELGPRKDRTGDGRENKRSTEAAVPEHFLCPISSEIMRDPVVLASGQHGQIMKRFSFYGLGVMLASFRQYDTYDRRFIQEWLSAGNRTCPQTQQVLSNTIITPNHLVRSMISQWCTDNGITLPPVENQDEDLVTNNERETFRKLFERIVSSSSDLSEQREAIKELRLRTKCNSSLRAAIGERPDSISQMISVASSPELENSAEVVEDTVTAILNLSIHESNKKIIGDDPLAVPFLIKALQSGTMEARSNAAAAIFSLSALDGNKARIGELGAMRPLVELLEHGSTAARKDAASAIFNLCTLHENKSRATKSGAVDVTLRAVACAGDGSGSGSLVDESLAVLALLSGDHEAVEEVGETGGVASMLHVVKDDPCKRNKENAAAVLFAVCVYDRTRLREVAEHEKLNGSLGWLARNGTSRARRKAAGILDKMKRSMHHPHYSC

SEQ ID NO: 183573 - protein, 873 aa, Zea Mays
MCIAKNEEALAIDPHFAECYGNMANAWKEKGDIDLAIRYYLTAIQLRPNFCDAWSNLASAYTRKGRLNEAAQCCRQALAINPRLVDAHSNLGNLMKAQGFIQEAYSCYIEALRIDPHFAIAWSNLAGLFMEAGDLDKALMYYKEAVKLKPSFADAYLNQGNVYKALGMPQDAIMCYQRALQARPDYAMAYGNLATIYYEQGQLDMAIRCYNQAIVYDPQFIEAYNNMGNALKDAGRVEEAINCYRSCLALQANHPQALTNLGNIYMEWNMISAATSFYKAAISVTSGLSSPLNNLAVIYKQQGNYADAITCYTEVLRIDPTAADALVNRGNTFKEIGRVNEAIQDYVQAATIRPNMPEAHANLASAYKDSGHVETAIISYKQALRLRPDFPEATCNLLHTLQCVCDWENRDGMFRDVEEIIRRQIKMSVLPSVQPFHAIAYPIDPLLALEISRKYAAHCSLIASRFGLPPFVHPPPVPVKAEGKHCRLKVGYVSSDFGNHPLSHLMGSVFGMHDRANIEVFCYALSQNDGTEWRQRIQSEAEHFVDVSAMTSDNIAKLINQDKIQILINLNGYTKGARNEIFAMQPAPIQVSYMGFPGTTGAAYIDYLVTDEFVSPSSYAHIYSEKLVHLPHCYFVNDYKQKNRDCLTPVCPHKRSDYGLPEDKFIFACFNQLYKMDPEIFDTWCNILKRVPNSALWLLRFPAAGETRVRAYAAARGVRSDQIVFTDVAMKNEHIRRSALADLFLDTPLCNAHTTGTDILWAGLPMITLPLEKMATRVAGSLCVATGLGEEMIVSSMKKYEDRAVELALNPVKLQALTNKLKEVRMTCPLFDTARWVRNLERAYYKMWNLYCSSRHPEPFKVVEDDNESPFDR

SEQ ID NO: 183574 - protein, 669 aa, Zea Mays
MAIRCYNQAIVYDPQFIEAYNNMGNALKDAGRVEEAINCYRSCLALQANHPQALTNLGNIYMEWNMISAATSFYKAAISVTSGLSSPLNNLAVIYKQQGNYADAITCYTEVLRIDPTAADALVNRGNTFKEIGRVNEAIQDYVQAATIRPNMPEAHANLASAYKDSGHVETAIISYKQALRLRPDFPEATCNLLHTLQCVCDWENRDGMFRDVEEIIRRQIKMSVLPSVQPFHAIAYPIDPLLALEISRKYAAHCSLIASRFGLPPFVHPPPVPVKAEGKHCRLKVGYVSSDFGNHPLSHLMGSVFGMHDRANIEVFCYALSQNDGTEWRQRIQSEAEHFVDVSAMTSDNIAKLINQDKIQILINLNGYTKGARNEIFAMQPAPIQVSYMGFPGTTGAAYIDYLVTDEFVSPSSYAHIYSEKLVHLPHCYFVNDYKQKNRDCLTPVCPHKRSDYGLPEDKFIFACFNQLYKMDPEIFDTWCNILKRVPNSALWLLRFPAAGETRVRAYAAARGVRSDQIVFTDVAMKNEHIRRSALADLFLDTPLCNAHTTGTDILWAGLPMITLPLEKMATRVAGSLCVATGLGEEMIVSSMKKYEDRAVELALNPVKLQALTNKLKEVRMTCPLFDTARWVRNLERAYYKMWNLYCSSRHPEPFKVVEDDNESPFDR

SEQ ID NO: 183575 - protein, 1026 aa, Zea Mays
MLSLQQQHGGAVAAGGDARHHAPQPSVLGGGADWLVFGGRADLEEPARNAPSPALFLLPPAGLDDRAAQPEPNPKPAQLAGGDRADCFDFGLGEVGTKAVDEERHLALAHQNYRSGKYREALEHGNVVYEKNPRRTDNLLLLGAIYYQIRNYDMCIAKNEEALAIDPHFAECYGNMANAWKEKGDIDLAIRYYLTAIQLRPNFCDAWSNLASAYTRKGRLNEAAQCCRQALAINPRLVDAHSNLGNLMKAQGFIQEAYSCYIEALRIDPHFAIAWSNLAGLFMEAGDLDKALMYYKEAVKLKPSFADAYLNQGNVYKALGMPQDAIMCYQRALQARPDYAMAYGNLATIYYEQGQLDMAIRCYNQAIVYDPQFIEAYNNMGNALKDAGRVEEAINCYRSCLALQANHPQALTNLGNIYMEWNMISAATSFYKAAISVTSGLSSPLNNLAVIYKQQGNYADAITCYTEVLRIDPTAADALVNRGNTFKEIGRVNEAIQDYVQAATIRPNMPEAHANLASAYKDSGHVETAIISYKQALRLRPDFPEATCNLLHTLQCVCDWENRDGMFRDVEEIIRRQIKMSVLPSVQPFHAIAYPIDPLLALEISRKYAAHCSLIASRFGLPPFVHPPPVPVKAEGKHCRLKVGYVSSDFGNHPLSHLMGSVFGMHDRANIEVFCYALSQNDGTEWRQRIQSEAEHFVDVSAMTSDNIAKLINQDKIQILINLNGYTKGARNEIFAMQPAPIQVSYMGFPGTTGAAYIDYLVTDEFVSPSSYAHIYSEKLVHLPHCYFVNDYKQKNRDCLTPVCPHKRSDYGLPEDKFIFACFNQLYKMDPEIFDTWCNILKRVPNSALWLLRFPAAGETRVRAYAAARGVRSDQIVFTDVAMKNEHIRRSALADLFLDTPLCNAHTTGTDILWAGLPMITLPLEKMATRVAGSLCVATGLGEEMIVSSMKKYEDRAVELALNPVKLQALTNKLKEVRMTCPLFDTARWVRNLERAYYKMWNLYCSSRHPEPFKVVEDDNESPFDR

SEQ ID NO: 183576 - protein, 1009 aa, Zea Mays
MLSLQQQHGGAVAAGGDARHHAPQPSVLGGGADWLVFGGRADLEEPARNAPSPALFLLPPAGLDDRAAQPEPNPKPAQLAGAVDEERHLALAHQNYRSGKYREALEHGNVVYEKNPRRTDNLLLLGAIYYQIRNYDMCIAKNEEALAIDPHFAECYGNMANAWKEKGDIDLAIRYYLTAIQLRPNFCDAWSNLASAYTRKGRLNEAAQCCRQALAINPRLVDAHSNLGNLMKAQGFIQEAYSCYIEALRIDPHFAIAWSNLAGLFMEAGDLDKALMYYKEAVKLKPSFADAYLNQGNVYKALGMPQDAIMCYQRALQARPDYAMAYGNLATIYYEQGQLDMAIRCYNQAIVYDPQFIEAYNNMGNALKDAGRVEEAINCYRSCLALQANHPQALTNLGNIYMEWNMISAATSFYKAAISVTSGLSSPLNNLAVIYKQQGNYADAITCYTEVLRIDPTAADALVNRGNTFKEIGRVNEAIQDYVQAATIRPNMPEAHANLASAYKDSGHVETAIISYKQALRLRPDFPEATCNLLHTLQCVCDWENRDGMFRDVEEIIRRQIKMSVLPSVQPFHAIAYPIDPLLALEISRKYAAHCSLIASRFGLPPFVHPPPVPVKAEGKHCRLKVGYVSSDFGNHPLSHLMGSVFGMHDRANIEVFCYALSQNDGTEWRQRIQSEAEHFVDVSAMTSDNIAKLINQDKIQILINLNGYTKGARNEIFAMQPAPIQVSYMGFPGTTGAAYIDYLVTDEFVSPSSYAHIYSEKLVHLPHCYFVNDYKQKNRDCLTPVCPHKRSDYGLPEDKFIFACFNQLYKMDPEIFDTWCNILKRVPNSALWLLRFPAAGETRVRAYAAARGVRSDQIVFTDVAMKNEHIRRSALADLFLDTPLCNAHTTGTDILWAGLPMITLPLEKMATRVAGSLCVATGLGEEMIVSSMKKYEDRAVELALNPVKLQALTNKLKEVRMTCPLFDTARWVRNLERAYYKMWNLYCSSRHPEPFKVVEDDNESPFDR

SEQ ID NO: 183577 - protein, 348 aa, Zea Mays
MLSLQQQHGGAVAAGGDARHHAPQPSVLGGGADWLVFGGRADLEEPARNAPSPALFLLPPAGLDDRAAQPEPNPKPAQLAGGDRADCFDFGLGEVGTKAVDEERHLALAHQNYRSGKYREALEHGNVVYEKNPRRTDNLLLLGAIYYQIRNYDMCIAKNEEALAIDPHFAECYGNMANAWKEKGDIDLAIRYYLTAIQLRPNFCDAWSNLASAYTRKGRLNEAAQCCRQALAINPRLVDAHSNLGNLMKAQGFIQEAYSCYIEALRIDPHFAIAWSNLAGLFMEAGDLDKALMYYKEAVKLKPSFADAYLNQGNVYKALGMPQDAIMCYQRALQARPDYAMAYDTHLG

SEQ ID NO: 183578 - protein, 74 aa, Zea Mays
MVTISFSALNLYVVYALVYVYSCCFVETCRRGPQIVRDFANENAASYNARSHCGSPSCQCTHYSGSRSIVYNNC

SEQ ID NO: 183579 - protein, 80 aa, Zea Mays
MVTISFSALNLYVVYALVYVYSCCFVETCRRGPQIVRDFANELPTMLDLIVDHRHASVLTTLDLDPSFTTTVEKMMSLEC

SEQ ID NO: 183580 - protein, 70 aa, Zea Mays
MSLKITLWGDQASTFSATVFIIKATTSLSSYCLLAFLLKDSKVMIQSFQKNNCIICLKKYGNKCSTYNVG

SEQ ID NO: 183581 - protein, 521 aa, Zea Mays
MKKGENAVFTIPPELAYGEDGSPPVIPPNATLQFDVELLSWVCIKDISKDGGILKKVVAKGDKWENPRDPDEVVVKYEARLEDGTVVSKSDGVEFTVRDGVFCPAISKAVKTMKKNEKAHLTVMPQYGFGVKGRQASGEEASVPPNATLHIDLQVVSWRTVTELGSDKKILKKILKEGEGYDCPNDCAVVRVKLIGKLEDGTLFVKKGHDGEEPFEFKTDEDQVIEGLDKAVLSMKKGEVSLVTIPPHHAFGTNETTKDLATVPPNSYVYYEMELVSFDKEKDSWDLKNVAEKIEAAAKKKEEGNVWFKIGKYARASKRYEKALSFVEYDSSFTEEEKQLSKPLQISCKLNNAACKLRLNDYKEAKELCTEVLESDNTNVKALYRRAQAHMHLVDLDLAEADIKKALEIDPDNRDVKMGYKRLKEKVKEYKRRDAKLYGNMISKLSKLEDTEDNGQMSQAVNKKRELLWPLAEMLRRFFTADGSKGSTLWLVLRLLIPVSVYRCIDLMSTTRICWLCGLRT

SEQ ID NO: 183582 - protein, 454 aa, Zea Mays
MKKGENAVFTIPPELAYGEDGSPPVIPPNATLQFDVELLSWVCIKDISKDGGILKKVVAKGDKWENPRDPDEVVVKYEARLEDGTVVSKSDGVEFTVRDGVFCPAISKAVKTMKKNEKAHLTVMPQYGFGVKGRQASGEEASVPPNATLHIDLQVVSWRTVTELGSDKKILKKILKEGEGYDCPNDCAVVRVKLIGKLEDGTLFVKKGHDGEEPFEFKTDEDQVIEGLDKAVLSMKKGEVSLVTIPPHHAFGTNETTKDLATVPPNSYVYYEMELVSFDKEKDSWDLKNVAEKIEAAAKKKEEGNVWFKIGKYARASKRYEKALSFVEYDSSFTEEEKQLSKPLQISCKLNNAACKLRLNDYKEAKELCTEVLESDNTNVKALYRRAQAHMHLVDLDLAEADIKKALEIDPDNRDVKMGYKRLKEKVKEYKRRDAKLYGNMISKLSKLEDTEDN

SEQ ID NO: 183583 - protein, 1873 aa, Zea Mays
MQEELGQRMHVPHGINLCFSTSSELFQVESSIELGTAEVNPVPSEKLSANSQAVRDDAGAVEGIDMNGKPVQKPKRKKHRPKVIKEGQSAKLQKPKTPKPPKENGNQPTGKRKYVRKKGLSTPAKQIPSEGADTHTRAKPGIAQRCLDFDVEDQHGHLDLVSQTQETEIQTGPGDTQPSISGVERSNAQVSCHWGWGGTSSSIISADPIVDIQGLQADCIPKRVNFDLNNSMASQMPTNYSSRMDSSGQFFQFGLGEKVQTNQLLDYNCNLPARRVSHLSSSVDHMRHPLANFDQYISTSQVCTENSRRHYQMPSSSRISENRTAASQYTERVSMGGNFNPGACIGEGTVIKQMAQCYRLPESPLVPPKHNERDVMNGNLNEFSVYNDYLNFSSNSNYQTGAAFGFHDSPVYSDVLAMGKKREHNAISGHQISFDIDFVNSNSTRKFCIDDLLSTSSQTSYYPEACKRMRPENHSNQLNVTTGKLSSSSAFSGSLNTNNVSTINPGIGTLADIQRLMALEKSQASQQMIDFITSQNNMAGESTELAQQNNSDKGFVALHNKKFQSLTAQNIPLPDSTVNQSGESNILRNGIHQTQPWEITSRSHHSSDNFALPNKWSGYLTAGNTQLSSITVNPSTENYIQSNAIYQYQCLENVVAKVPVLSGTHNTSSQEGHNHSTAATNEHIRTTSEEVVRSFTQRASEPTTHGNYNLNSSRVTAEANSTEKPRKRGRPRKVVKPNGEPKERGTKGKQNVSHEKPTSQKGSHTDILKTNGISYASEPSTGITPRMAIVESKSSDQDKEIHGGVIPQATAISVDLLDGIIQKIKLLSISRPDNVVAEIPKDALVPYEGEFGALVAFEGKTKKNRSRAKVNIDPVTTMMWNLLMGPDMGDGAEGLDKDKEKWLDEERKVFRGRVDSFIARMHLVQGDRRFSRWKGSVVDSVVGVFLTQNVSDHLSSSAFMAVAAKFPAKPEVPEKPVAEMSHTPEQKDSCSCSGLFGDSIKLQGKMFIEEISDVRSLITTEDNEESNSNELIGSSAGYGVNHATGGCHVSYRKSLTESHENGLSGSVFPTTGFSSVVETEDGSLEDVISSQNSAVSSQNSPDYLFHRTDPIGSSSLQNFTEEGYIMRNISNGTGSSTDCSGFLPIQDPKGTLGLSEYYGHNPLLVSGVNKGVLLDLNRSYQPLHTSMPYVQNSESDFTGVSCFSHMDKSFHTGPNRVNLSSVTQSEASLYPTDPLQQDEFSPVIKQNFQPLYSSDKVSLFKEHCSYGNDFSRNKTEAAIMEPLVYSNPQELYTTSTEQMGVEQFQSGCGQQDNDVRVQTTSYERHQSSTLCGNQNSQLEILQGVASGSTQKFIDTQKSPSEVQQNGSKAKKVRGRPKTKTYDWDSLRKEVFSNGGDKQRNNDARDTVDWEAVRQAEVREISETIRERGMNNMLAERIKEFLNRLVTDHGGIDLEWLRDVPPDKAKDFLLSIRGLGLKSVECVRLLTLHHMAFPVDTNVGRICVRLGWVPLQPLPESLQLHLLEMYELHYQMITFGKVFCTKSKPNCNSCPLRAECKHFASAFASARLALPAPEEKRLATSEDPNVVEFCHQTYINSGAVGELEWSANYPKHAVCGNLQPFIEEPLSPEPEPENVEAKDGAIEDFFNEDPDEIPTINLNIEEFTQNLKNYMQANHVEIEYADMSKALVAITPEAASIPTPKLKNVSRLRTEHQVYELPDSHPLLEGFEQREPDDPCPYLLSIWTPGETAQSTNAPKTFCDSGETGQLCGSLTCFSCNSLREMQAQKVRGTLLIPCRTAMRGSFPLNGTYFQVNEVFADHCSSQNPIDVPRSWIWDLPRRTVYFGTSVPTIFRGLTTEEIQQCFWRAERDKKKCG

SEQ ID NO: 183584 - protein, 417 aa, Zea Mays
MAFPVDTNVGRICVRLGWVPLQPLPESLQLHLLEMYELHYQMITFGKVFCTKSKPNCNSCPLRAECKHFASAFASARLALPAPEEKRLATSEDPNVVEFCHQTYINSGAVGELEWSANYPKHAVCGNLQPFIEEPLSPEPEPENVEAKDGAIEDFFNEDPDEIPTINLNIEEFTQNLKNYMQANHVEIEYADMSKALVAITPEAASIPTPKLKNVSRLRTEHQVYELPDSHPLLEGFEQREPDDPCPYLLSIWTPGETAQSTNAPKTFCDSGETGQLCGSLTCFSCNSLREMQAQKVRGTLLIPCRTAMRGSFPLNGTYFQVNEVFADHCSSQNPIDVPRSWIWDLPRRTVYFGTSVPTIFRGLTTEEIQQCFWRGFVCVRGFDRTVRAPRPLYARLHFPASKVVRGKKPGAASVEE

SEQ ID NO: 183585 - protein, 863 aa, Zea Mays
MFIEEISDVRSLITTEDNEESNSNELIGSSAGYGVNHATGGCHVSYRKSLTESHENGLSGSVFPTTGFSSVVETEDGSLEDVISSQNSAVSSQNSPDYLFHRTDPIGSSSLQNFTEEGYIMRNISNGTGSSTDCSGFLPIQDPKGTLGLSEYYGHNPLLVSGVNKGVLLDLNRSYQPLHTSMPYVQNSESDFTGVSCFSHMDKSFHTGPNRVNLSSVTQSEASLYPTDPLQQDEFSPVIKQNFQPLYSSDKVSLFKEHCSYGNDFSRNKTEAAIMEPLVYSNPQELYTTSTEQMGVEQFQSGCGQQDNDVRVQTTSYERHQSSTLCGNQNSQLEILQGVASGSTQKFIDTQKSPSEVQQNGSKAKKVRGRPKTKTYDWDSLRKEVFSNGGDKQRNNDARDTVDWEAVRQAEVREISETIRERGMNNMLAERIKEFLNRLVTDHGGIDLEWLRDVPPDKAKDFLLSIRGLGLKSVECVRLLTLHHMAFPVDTNVGRICVRLGWVPLQPLPESLQLHLLEMYELHYQMITFGKVFCTKSKPNCNSCPLRAECKHFASAFASARLALPAPEEKRLATSEDPNVVEFCHQTYINSGAVGELEWSANYPKHAVCGNLQPFIEEPLSPEPEPENVEAKDGAIEDFFNEDPDEIPTINLNIEEFTQNLKNYMQANHVEIEYADMSKALVAITPEAASIPTPKLKNVSRLRTEHQVYELPDSHPLLEGFEQREPDDPCPYLLSIWTPGETAQSTNAPKTFCDSGETGQLCGSLTCFSCNSLREMQAQKVRGTLLIPCRTAMRGSFPLNGTYFQVNEVFADHCSSQNPIDVPRSWIWDLPRRTVYFGTSVPTIFRGLTTEEIQQCFWRDSFV

SEQ ID NO: 183586 - protein, 1397 aa, Zea Mays
MQEELGQRMHVPHGINLCFSTSSELFQVESSIELGTAEVNPVPSEKLSANSQAVRDDAGAVEGIDMNGKPVQKPKRKKHRPKVIKEGQSAKLQKPKTPKPPKENGNQPTGKRKYVRKKGLSTPAKQIPSEGADTHTRAKPGIAQRCLDFDVEDQHGHLDLVSQTQETEIQTGPGDTQPSISGVERSNAQVSCHWGWGGTSSSIISADPIVDIQGLQADCIPKRVNFDLNNSMASQMPTNYSSRMDSSGQFFQFGLGEKVQTNQLLDYNCNLPARRVSHLSSSVDHMRHPLANFDQYISTSQVCTENSRRHYQMPSSSRISENRTAASQYTERVSMGGNFNPGACIGEGTVIKQMAQCYRLPESPLVPPKHNERDVMNGNLNEFSVYNDYLNFSSNSNYQTGAAFGFHDSPVYSDVLAMGKKREHNAISGHQISFDIDFVNSNSTRKFCIDDLLSTSSQTSYYPEACKRMRPENHSNQLNVTTGKLSSSSAFSGSLNTNNVSTINPGIGTLADIQRLMALEKSQASQQMIDFITSQNNMAGESTELAQQNNSDKGFVALHNKKFQSLTAQNIPLPDSTVNQSGESNILRNGIHQTQPWEITSRSHHSSDNFALPNKWSGYLTAGNTQLSSITVNPSTENYIQSNAIYQYQCLENVVAKVPVLSGTHNTSSQEGHNHSTAATNEHIRTTSEEVVRSFTQRASEPTTHGNYNLNSSRVTAEANSTEKPRKRGRPRKVVKPNGEPKERGTKGKQNVSHEKPTSQKGSHTDILKTNGISYASEPSTGITPRMAIVESKSSDQDKEIHGGVIPQATAISVDLLDGIIQKIKLLSISRPDNVVAEIPKDALVPYEGEFGALVAFEGKTKKNRSRAKVNIDPVTTMMWNLLMGPDMGDGAEGLDKDKEKWLDEERKVFRGRVDSFIARMHLVQGDRRFSRWKGSVVDSVVGVFLTQNVSDHLSRDFLLSIRGLGLKSVECVRLLTLHHMAFPVDTNVGRICVRLGWVPLQPLPESLQLHLLEMYELHYQMITFGKVFCTKSKPNCNSCPLRAECKHFASAFASARLALPAPEEKRLATSEDPNVVEFCHQTYINSGAVGELEWSANYPKHAVCGNLQPFIEEPLSPEPEPENVEAKDGAIEDFFNEDPDEIPTINLNIEEFTQNLKNYMQANHVEIEYADMSKALVAITPEAASIPTPKLKNVSRLRTEHQVYELPDSHPLLEGFEQREPDDPCPYLLSIWTPGETAQSTNAPKTFCDSGETGQLCGSLTCFSCNSLREMQAQKVRGTLLIPCRTAMRGSFPLNGTYFQVNEVFADHCSSQNPIDVPRSWIWDLPRRTVYFGTSVPTIFRGLTTEEIQQCFWRGFVCVRGFDRTVRAPRPLYARLHFPASKVVRGKKPGAASVEE

SEQ ID NO: 183587 - protein, 1533 aa, Zea Mays
MQEELGQRMHVPHGINLCFSTSSELFQVESSIELGTAEVNPVPSEKLSANSQAVRDDAGAVEGIDMNGKPVQKPKRKKHRPKVIKEGQSAKLQKPKTPKPPKENGNQPTGKRKYVRKKGLSTPAKQIPSEGADTHTRAKPGIAQRCLDFDVEDQHGHLDLVSQTQETEIQTGPGDTQPSISGVERSNAQVSCHWGWGGTSSSIISADPIVDIQGLQADCIPKRVNFDLNNSMASQMPTNYSSRMDSSGQFFQFGLGEKVQTNQLLDYNCNLPARRVSHLSSSVDHMRHPLANFDQYISTSQVCTENSRRHYQMPSSSRISENRTAASQYTERVSMGGNFNPGACIGEGTVIKQMAQCYRLPESPLVPPKHNERDVMNGNLNEFSVYNDYLNFSSNSNYQTGAAFGFHDSPVYSDVLAMGKKREHNAISGHQISFDIDFVNSNSTRKFCIDDLLSTSSQTSYYPEACKRMRPENHSNQLNVTTGKLSSSSAFSGSLNTNNVSTINPGIGTLADIQRLMALEKSQASQQMIDFITSQNNMAGESTELAQQNNSDKGFVALHNKKFQSLTAQNIPLPDSTVNQSGESNILRNGIHQTQPWEITSRSHHSSDNFALPNKWSGYLTAGNTQLSSITVNPSTENYIQSNAIYQYQCLENVVAKVPVLSGTHNTSSQEGHNHSTAATNEHIRTTSEEVVRSFTQRASEPTTHGNYNLNSSRVTAEANSTEKPRKRGRPRKVVKPNGEPKERGTKGKQNVSHEKPTSQKGSHTDILKTNGISYASEPSTGITPRMAIVESKSSDQDKEIHGGVIPQATAISVDLLDGIIQKIKLLSISRPDNVVAEIPKDALVPYEGEFGALVAFEGKTKKNRSRAKVNIDPVTTMMWNLLMGPDMGDGAEGLDKDKEKWLDEERKVFRGRVDSFIARMHLVQGDRRFSRWKGSVVDSVVGVFLTQNVSDHLSSSAFMAVAAKFPAKPEVPEKPVAEMSHTPEQKDSCSCSGLFGDSIKLQGKMFIEEISDVRSLITTEDNEESNSNELIGSSAGYGVNHATGGCHVSYRKSLTESHENGLSGSVFPTTGFSSVVETEDGSLEDVISSQNSAVSSQNSPDYLFHRTDPIGSSSLQNFTEEGYIMRNISNGTGSSTDCSGFLPIQDPKGTLGLSEYYGHNPLLVSGVNKGVLLDLNRSYQPLHTSMPYVQNSESDFTGVSCFSHMDKSFHTGPNRVNLSSVTQSEASLYPTDPLQQDEFSPVIKQNFQPLYSSDKVSLFKEHCSYGNDFSRNKTEAAIMEPLVYSNPQELYTTSTEQMGVEQFQSGCGQQDNDVRVQTTSYERHQSSTLCGNQNSQLEILQGVASGSTQKFIDTQKSPSEVQQNGSKAKKVRGRPKTKTYDWDSLRKEVFSNGGDKQRNNDARDTVDWEAVRQAEVREISETIRERGMNNMLAERIKEFLNRLVTDHGGIDLEWLRDVPPDKAKDFLLSIRGLGLKSVECVRLLTLHHMAFPVDTNVGRICVRLGWVPLQPLPESLQLHLLEISTFGLDYAS

SEQ ID NO: 183588 - protein, 775 aa, Zea Mays
MQEELGQRMHVPHGINLCFSTSSELFQVESSIELGTAEVNPVPSEKLSANSQAVRDDAGAVEGIDMNGKPVQKPKRKKHRPKVIKEGQSAKLQKPKTPKPPKENGNQPTGKRKYVRKKGLSTPAKQIPSEGADTHTRAKPGIAQRCLDFDVEDQHGHLDLVSQTQETEIQTGPGDTQPSISGVERSNAQVSCHWGWGGTSSSIISADPIVDIQGLQADCIPKRVNFDLNNSMASQMPTNYSSRMDSSGQFFQFGLGEKVQTNQLLDYNCNLPARRVSHLSSSVDHMRHPLANFDQYISTSQVCTENSRRHYQMPSSSRISENRTAASQYTERVSMGGNFNPGACIGEGTVIKQMAQCYRLPESPLVPPKHNERDVMNGNLNEFSVYNDYLNFSSNSNYQTGAAFGFHDSPVYSDVLAMGKKREHNAISGHQISFDIDFVNSNSTRKFCIDDLLSTSSQTSYYPEACKRMRPENHSNQLNVTTGKLSSSSAFSGSLNTNNVSTINPGIGTLADIQRLMALEKSQASQQMIDFITSQNNMAGESTELAQQNNSDKGFVALHNKKFQSLTAQNIPLPDSTVNQSGESNILRNGIHQTQPWEITSRSHHSSDNFALPNKWSGYLTAGNTQLSSITVNPSTENYIQSNAIYQYQCLENVVAKVPVLSGTHNTSSQEGHNHSTAATNEHIRTTSEEVVRSFTQRASEPTTHGNYNLNSSRVTAEANSTEKPRKRGRPRKVVKPNGEPKERGWLLWSRKALIKIRKFMEVSFLKLQQYQLIF

SEQ ID NO: 183589 - protein, 980 aa, Zea Mays
MQEELGQRMHVPHGINLCFSTSSELFQVESSIELGTAEVNPVPSEKLSANSQAVRDDAGAVEGIDMNGKPVQKPKRKKHRPKVIKEGQSAKLQKPKTPKPPKENGNQPTGKRKYVRKKGLSTPAKQIPSEGADTHTRAKPGIAQRCLDFDVEDQHGHLDLVSQTQETEIQTGPGDTQPSISGVERSNAQVSCHWGWGGTSSSIISADPIVDIQGLQADCIPKRVNFDLNNSMASQMPTNYSSRMDSSGQFFQFGLGEKVQTNQLLDYNCNLPARRVSHLSSSVDHMRHPLANFDQYISTSQVCTENSRRHYQMPSSSRISENRTAASQYTERVSMGGNFNPGACIGEGTVIKQMAQCYRLPESPLVPPKHNERDVMNGNLNEFSVYNDYLNFSSNSNYQTGAAFGFHDSPVYSDVLAMGKKREHNAISGHQISFDIDFVNSNSTRKFCIDDLLSTSSQTSYYPEACKRMRPENHSNQLNVTTGKLSSSSAFSGSLNTNNVSTINPGIGTLADIQRLMALEKSQASQQMIDFITSQNNMAGESTELAQQNNSDKGFVALHNKKFQSLTAQNIPLPDSTVNQSGESNILRNGIHQTQPWEITSRSHHSSDNFALPNKWSGYLTAGNTQLSSITVNPSTENYIQSNAIYQYQCLENVVAKVPVLSGTHNTSSQEGHNHSTAATNEHIRTTSEEVVRSFTQRASEPTTHGNYNLNSSRVTAEANSTEKPRKRGRPRKVVKPNGEPKERGTKGKQNVSHEKPTSQKGSHTDILKTNGISYASEPSTGITPRMAIVESKSSDQDKEIHGGVIPQATAISVDLLDGIIQKIKLLSISRPDNVVAEIPKDALVPYEGEFGALVAFEGKTKKNRSRAKVNIDPVTTMMWNLLMGPDMGDGAEGLDKDKEKWLDEERKVFRGRVDSFIARMHLVQGDRRFSRWKGSVVDSVVGVFLTQNVSDHLSRRIVALALDCLVILSNCRARCSLKR

SEQ ID NO: 183590 - protein, 1929 aa, Zea Mays
MQEELGQRMHVPHGINLCFSTSSELFQVESSIELGTAEVNPVPSEKLSANSQAVRDDAGAVEGIDMNGKPVQKPKRKKHRPKVIKEGQSAKLQKPKTPKPPKENGNQPTGKRKYVRKKGLSTPAKQIPSEGADTHTRAKPGIAQRCLDFDVEDQHGHLDLVSQTQETEIQTGPGDTQPSISGVERSNAQVSCHWGWGGTSSSIISADPIVDIQGLQADCIPKRVNFDLNNSMASQMPTNYSSRMDSSGQFFQFGLGEKVQTNQLLDYNCNLPARRVSHLSSSVDHMRHPLANFDQYISTSQVCTENSRRHYQMPSSSRISENRTAASQYTERVSMGGNFNPGACIGEGTVIKQMAQCYRLPESPLVPPKHNERDVMNGNLNEFSVYNDYLNFSSNSNYQTGAAFGFHDSPVYSDVLAMGKKREHNAISGHQISFDIDFVNSNSTRKFCIDDLLSTSSQTSYYPEACKRMRPENHSNQLNVTTGKLSSSSAFSGSLNTNNVSTINPGIGTLADIQRLMALEKSQASQQMIDFITSQNNMAGESTELAQQNNSDKGFVALHNKKFQSLTAQNIPLPDSTVNQSGESNILRNGIHQTQPWEITSRSHHSSDNFALPNKWSGYLTAGNTQLSSITVNPSTENYIQSNAIYQYQCLENVVAKVPVLSGTHNTSSQEGHNHSTAATNEHIRTTSEEVVRSFTQRASEPTTHGNYNLNSSRVTAEANSTEKPRKRGRPRKVVKPNGEPKERGTKGKQNVSHEKPTSQKGSHTDILKTNGISYASEPSTGITPRMAIVESKSSDQDKEIHGGVIPQATAISVDLLDGIIQKIKLLSISRPDNVVAEIPKDALVPYEGEFGALVAFEGKTKKNRSRAKVNIDPVTTMMWNLLMGPDMGDGAEGLDKDKEKWLDEERKVFRGRVDSFIARMHLVQGDRRFSRWKGSVVDSVVGVFLTQNVSDHLSSSAFMAVAAKFPAKPEVPEKPVAEMSHTPEQKDSCSCSGLFGDSIKLQGKMFIEEISDVRSLITTEDNEESNSNELIGSSAGYGVNHATGGCHVSYRKSLTESHENGLSGSVFPTTGFSSVVETEDGSLEDVISSQNSAVSSQNSPDYLFHRTDPIGSSSLQNFTEEGYIMRNISNGTGSSTDCSGFLPIQDPKGTLGLSEYYGHNPLLVSGVNKGVLLDLNRSYQPLHTSMPYVQNSESDFTGVSCFSHMDKSFHTGPNRVNLSSVTQSEASLYPTDPLQQDEFSPVIKQNFQPLYSSDKVSLFKEHCSYGNDFSRNKTEAAIMEPLVYSNPQELYTTSTEQMGVEQFQSGCGQQDNDVRVQTTSYERHQSSTLCGNQNSQLEILQGVASGSTQKFIDTQKSPSEVQQNGSKAKKVRGRPKTKTYDWDSLRKEVFSNGGDKQRNNDARDTVDWEAVRQAEVREISETIRERGMNNMLAERIKEFLNRLVTDHGGIDLEWLRDVPPDKAKDFLLSIRGLGLKSVECVRLLTLHHMAFPVDTNVGRICVRLGWVPLQPLPESLQLHLLEMYPMLEHIQKYLWPRLCKLDQRTLYELHYQMITFGKVFCTKSKPNCNSCPLRAECKHFASAFASARLALPAPEEKRLATSEDPNVVEFCHQTYINSGAVGELEWSANYPKHAVCGNLQPFIEEPLSPEPEPENVEAKDGAIEDFFNEDPDEIPTINLNIEEFTQNLKNYMQANHVEIEYADMSKALVAITPEAASIPTPKLKNVSRLRTEHQVYELPDSHPLLEGFEQREPDDPCPYLLSIWTPGETAQSTNAPKTFCDSGETGQLCGSLTCFSCNSLREMQAQKVRGTLLIPCRTAMRGSFPLNGTYFQVNEVFADHCSSQNPIDVPRSWIWDLPRRTVYFGTSVPTIFRGLTTEEIQQCFWRGFVCVRGFDRTVRAPRPLYARLHFPASKVVRGKKPGAASVEE

SEQ ID NO: 183591 - protein, 1472 aa, Zea Mays
MQEELGQRMHVPHGINLCFSTSSELFQVESSIELGTAEVNPVPSEKLSANSQAVRDDAGAVEGIDMNGKPVQKPKRKKHRPKVIKEGQSAKLQKPKTPKPPKENGNQPTGKRKYVRKKGLSTPAKQIPSEGADTHTRAKPGIAQRCLDFDVEDQHGHLDLVSQTQETEIQTGPGDTQPSISGVERSNAQVSCHWGWGGTSSSIISADPIVDIQGLQADCIPKRVNFDLNNSMASQMPTNYSSRMDSSGQFFQFGLGEKVQTNQLLDYNCNLPARRVSHLSSSVDHMRHPLANFDQYISTSQVCTENSRRHYQMPSSSRISENRTAASQYTERVSMGGNFNPGACIGEGTVIKQMAQCYRLPESPLVPPKHNERDVMNGNLNEFSVYNDYLNFSSNSNYQTGAAFGFHDSPVYSDVLAMGKKREHNAISGHQISFDIDFVNSNSTRKFCIDDLLSTSSQTSYYPEACKRMRPENHSNQLNVTTGKLSSSSAFSGSLNTNNVSTINPGIGTLADIQRLMALEKSQASQQMIDFITSQNNMAGESTELAQQNNSDKGFVALHNKKFQSLTAQNIPLPDSTVNQSGESNILRNGIHQTQPWEITSRSHHSSDNFALPNKWSGYLTAGNTQLSSITVNPSTENYIQSNAIYQYQCLENVVAKVPVLSGTHNTSSQEGHNHSTAATNEHIRTTSEEVVRSFTQRASEPTTHGNYNLNSSRVTAEANSTEKPRKRGRPRKVVKPNGEPKERGTKGKQNVSHEKPTSQKGSHTDILKTNGISYASEPSTGITPRMAIVESKSSDQDKEIHGGVIPQATAISVDLLDGIIQKIKLLSISRPDNVVAEIPKDALVPYEGEFGALVAFEGKTKKNRSRAKVNIDPVTTMMWNLLMGPDMGDGAEGLDKDKEKWLDEERKVFRGRVDSFIARMHLVQGDRRFSRWKGSVVDSVVGVFLTQNVSDHLSSSAFMAVAAKFPAKPEVPEKPVAEMSHTPEQKDSCSCSGLFGDSIKLQGKMFIEEISDVRSLITTEDNEESNSNELIGSSAGYGVNHATGGCHVSYRKSLTESHENGLSGSVFPTTGFSSVVETEDGSLEDVISSQNSAVSSQNSPDYLFHRTDPIGSSSLQNFTEEGYIMRNISNGTGSSTDCSGFLPIQDPKGTLGLSEYYGHNPLLVSGVNKGVLLDLNRSYQPLHTSMPYVQNSESDFTGVSCFSHMDKSFHTGPNRVNLSSVTQSEASLYPTDPLQQDEFSPVIKQNFQPLYSSDKVSLFKEHCSYGNDFSRNKTEAAIMEPLVYSNPQELYTTSTEQMGVEQFQSGCGQQDNDVRVQTTSYERHQSSTLCGNQNSQLEILQGVASGSTQKFIDTQKSPSEVQQNGSKAKKVRGRPKTKTYDWDSLRKEVFSNGGDKQRNNDARDTVDWEAVRQAEVREISETIRERGMNNMLAERIKEFLNRLVTDHGGIDLEWLRDVPPDKAKQNASAPV

SEQ ID NO: 183592 - protein, 1473 aa, Zea Mays
MQEELGQRMHVPHGINLCFSTSSELFQVESSIELGTAEVNPVPSEKLSANSQAVRDDAGAVEGIDMNGKPVQKPKRKKHRPKVIKEGQSAKLQKPKTPKPPKENGNQPTGKRKYVRKKGLSTPAKQIPSEGADTHTRAKPGIAQRCLDFDVEDQHGHLDLVSQTQETEIQTGPGDTQPSISGVERSNAQVSCHWGWGGTSSSIISADPIVDIQGLQADCIPKRVNFDLNNSMASQMPTNYSSRMDSSGQFFQFGLGEKVQTNQLLDYNCNLPARRVSHLSSSVDHMRHPLANFDQYISTSQVCTENSRRHYQMPSSSRISENRTAASQYTERVSMGGNFNPGACIGEGTVIKQMAQCYRLPESPLVPPKHNERDVMNGNLNEFSVYNDYLNFSSNSNYQTGAAFGFHDSPVYSDVLAMGKKREHNAISGHQISFDIDFVNSNSTRKFCIDDLLSTSSQTSYYPEACKRMRPENHSNQLNVTTGKLSSSSAFSGSLNTNNVSTINPGIGTLADIQRLMALEKSQASQQMIDFITSQNNMAGESTELAQQNNSDKGFVALHNKKFQSLTAQNIPLPDSTVNQSGESNILRNGIHQTQPWEITSRSHHSSDNFALPNKWSGYLTAGNTQLSSITVNPSTENYIQSNAIYQYQCLENVVAKVPVLSGTHNTSSQEGHNHSTAATNEHIRTTSEEVVRSFTQRASEPTTHGNYNLNSSRVTAEANSTEKPRKRGRPRKVVKPNGEPKERGTKGKQNVSHEKPTSQKGSHTDILKTNGISYASEPSTGITPRMAIVESKSSDQDKEIHGGVIPQATAISVDLLDGIIQKIKLLSISRPDNVVAEIPKDALVPYEGEFGALVAFEGKTKKNRSRAKVNIDPVTTMMWNLLMGPDMGDGAEGLDKDKEKWLDEERKVFRGRVDSFIARMHLVQGDRRFSRWKGSVVDSVVGVFLTQNVSDHLSSSAFMAVAAKFPAKPEVPEKPVAEMSHTPEQKDSCSCSGLFGDSIKLQGKMFIEEISDVRSLITTEDNEESNSNELIGSSAGYGVNHATGGCHVSYRKSLTESHENGLSGSVFPTTGFSSVVETEDGSLEDVISSQNSAVSSQNSPDYLFHRTDPIGSSSLQNFTEEGYIMRNISNGTGSSTDCSGFLPIQDPKGTLGLSEYYGHNPLLVSGVNKGVLLDLNRSYQPLHTSMPYVQNSESDFTGVSCFSHMDKSFHTGPNRVNLSSVTQSEASLYPTDPLQQDEFSPVIKQNFQPLYSSDKVSLFKEHCSYGNDFSRNKTEAAIMEPLVYSNPQELYTTSTEQMGVEQFQSGCGQQDNDVRVQTTSYERHQSSTLCGNQNSQLEILQGVASGSTQKFIDTQKSPSEVQQNGSKAKKVRGRPKTKTYDWDSLRKEVFSNGGDKQRNNDARDTVDWEAVRQAEVREISETIRERGMNNMLAERIKEFLNRLVTDHGGIDLEWLRDVPPDKAKKIYADHVS

SEQ ID NO: 183593 - protein, 1502 aa, Zea Mays
MQEELGQRMHVPHGINLCFSTSSELFQVESSIELGTAEVNPVPSEKLSANSQAVRDDAGAVEGIDMNGKPVQKPKRKKHRPKVIKEGQSAKLQKPKTPKPPKENGNQPTGKRKYVRKKGLSTPAKQIPSEGADTHTRAKPGIAQRCLDFDVEDQHGHLDLVSQTQETEIQTGPGDTQPSISGVERSNAQVSCHWGWGGTSSSIISADPIVDIQGLQADCIPKRVNFDLNNSMASQMPTNYSSRMDSSGQFFQFGLGEKVQTNQLLDYNCNLPARRVSHLSSSVDHMRHPLANFDQYISTSQVCTENSRRHYQMPSSSRISENRTAASQYTERVSMGGNFNPGACIGEGTVIKQMAQCYRLPESPLVPPKHNERDVMNGNLNEFSVYNDYLNFSSNSNYQTGAAFGFHDSPVYSDVLAMGKKREHNAISGHQISFDIDFVNSNSTRKFCIDDLLSTSSQTSYYPEACKRMRPENHSNQLNVTTGKLSSSSAFSGSLNTNNVSTINPGIGTLADIQRLMALEKSQASQQMIDFITSQNNMAGESTELAQQNNSDKGFVALHNKKFQSLTAQNIPLPDSTVNQSGESNILRNGIHQTQPWEITSRSHHSSDNFALPNKWSGYLTAGNTQLSSITVNPSTENYIQSNAIYQYQCLENVVAKVPVLSGTHNTSSQEGHNHSTAATNEHIRTTSEEVVRSFTQRASEPTTHGNYNLNSSRVTAEANSTEKPRKRGRPRKVVKPNGEPKERGTKGKQNVSHEKPTSQKGSHTDILKTNGISYASEPSTGITPRMAIVESKSSDQDKEIHGGVIPQATAISVDLLDGIIQKIKLLSISRPDNVVAEIPKDALVPYEGEFGALVAFEGKTKKNRSRAKVNIDPVTTMMWNLLMGPDMGDGAEGLDKDKEKWLDEERKVFRGRVDSFIARMHLVQGDRRFSRWKGSVVDSVVGVFLTQNVSDHLSSSAFMAVAAKFPAKPEVPEKPVAEMSHTPEQKDSCSCSGLFGDSIKLQGKMFIEEISDVRSLITTEDNEESNSNELIGSSAGYGVNHATGGCHVSYRKSLTESHENGLSGSVFPTTGFSSVVETEDGSLEDVISSQNSAVSSQNSPDYLFHRTDPIGSSSLQNFTEEGYIMRNISNGTGSSTDCSGFLPIQDPKGTLGLSEYYGHNPLLVSGVNKGVLLDLNRSYQPLHTSMPYVQNSESDFTGVSCFSHMDKSFHTGPNRVNLSSVTQSEASLYPTDPLQQDEFSPVIKQNFQPLYSSDKVSLFKEHCSYGNDFSRNKTEAAIMEPLVYSNPQELYTTSTEQMGVEQFQSGCGQQDNDVRVQTTSYERHQSSTLCGNQNSQLEILQGVASGSTQKFIDTQKSPSEVQQNGSKAKKVRGRPKTKTYDWDSLRKEVFSNGGDKQRNNDARDTVDWEAVRQAEVREISETIRERGMNNMLAERIKEFLNRLVTDHGGIDLEWLRDVPPDKANKARQRVEGYKQYQSRYRCWVVLATMQHRRTASLLCRR

SEQ ID NO: 183594 - protein, 164 aa, Zea Mays
MMDDALTTGSIKTSDAEKRRLAKASLAYNCESKNCPHFRKLFPEYVEKYNQQLQLENTAAEPVPQENPAPAPSPAAQQAPTVANRAQPLAEARRDKNQKKAVPFWMVLSAKTNLNVEQVFFSIARDIKQRLSETDSKPEDRTIKIKAEGEADAAEAQKSACCDS

SEQ ID NO: 183595 - protein, 83 aa, Zea Mays
MLNLCSLLKLPFKFKFSGRATFNCDVQRYQYHYLKYYHRTEEGEKRWSIFKQEQPGTVPQILCLVEHLQTRTTGDASSSGTLF

SEQ ID NO: 183596 - protein, 108 aa, Zea Mays
MEVAGAREPGSGGGGGGGGGGPAPFLLKTYEMVDDPSSDAVVSWSDASDGSFVVWNQPEFAARMLPTYFKHNNFSSFIRQLNTYVRNNGSTSLLCAVWLLYMVRCSCW

SEQ ID NO: 183597 - protein, 313 aa, Zea Mays
MAAPQPVAPASEAPPSAQMVGNAFVQQYYLVLHQSPDLVYRFYQEASRLARPASAAGAAGMDSVTTMEAISEKIMEMDVSKAEIRTVDSQESLGGGVAVLVTGHLTGRDGVRREFSQSFFLAPQEMGYFVLNDIFRFVGDIPASTAVEAQPEAVAVVPPVAAPLANGTATPAVEPATPDDHGAVPQQEHHVVDRSLPQPEEDEAEVYNPPQEEVVDEEQPVAEVINEVPNNVAPVVATTVASVLQEEAPKKSYASIVKIMKEVPLPAPAPPTRPSPPKLEKQSPPPATPVTDVPPFSSNPENINIQEPEGIYL

SEQ ID NO: 183598 - protein, 472 aa, Zea Mays
MAAPQPVAPASEAPPSAQMVGNAFVQQYYLVLHQSPDLVYRFYQEASRLARPASAAGAAGMDSVTTMEAISEKIMEMDVSKAEIRTVDSQESLGGGVAVLVTGHLTGRDGVRREFSQSFFLAPQEMGYFVLNDIFRFVGDIPASTAVEAQPEAVAVVPPVAAPLANGTATPAVEPATPDDHHVVDRSLPQPEEDEAEVYNPPQEEVVDEEQPVAEVINEVPNNVAPVVATTVASVLQEEAPKKSYASIVKIMKEVPLPAPAPPTRPSPPKLEKQSPPPATPVTDVPPFSSNPENINIQEPEVDAHAIYVRNLPLNATETQLEDEFKKFGTIKQNGIQVRSNKIQGFCYGFVEFEDSTSVQSAIEASPVAIGGRQCYVEEKRAPGSRGSSRGGRFAPGRGNSFRSEGTRGRGNYGGGRGYGRGEFSYRSDYGVRSGGRGGSLRGADVGYQRVDHAGYAGGRGSRTAAAGAPSK

SEQ ID NO: 183599 - protein, 402 aa, Zea Mays
MAAPQPVAPASEAPPSAQMVGNAFVQQYYLVLHQSPDLVYRFYQEASRLARPASAAGAAGMDSVTTMEAISEKIMEMDVSKAEIRTVDSQESLGGGVAVLVTGHLTGRDGVRREFSQSFFLAPQEMGYFVLNDIFRFVGDIPASTAVEAQPEAVAVVPPVAAPLANGTATPAVEPATPDDHGAVPQQEHHVVDRSLPQPEEDEAEVYNPPQEEVVDEEQPVAEVINEVPNNVAPVVATTVASVLQEEAPKKSYASIVKIMKEVPLPAPAPPTRPSPPKLEKQSPPPATPVTDVPPFSSNPENINIQEPEVDAHAIYVRNLPLNATETQLEDEFKKFGTIKQNGIQVRSNKIQGFCYGFVEFEDSTSVQSAIEASPVAIGGRQCYVEEKRAPGSRDYPNLLRD

SEQ ID NO: 183600 - protein, 262 aa, Zea Mays
MDLKGAHYEVKAFEDYKFLNSSYVPVLRQLESANLQKFYFENKLENATKDASNMKFRNPKYLSMLNHLRFYLPEMYPKLHRILFLDDDVVVQRDLTGLWKIDMDGKVNGAVETCFGSFHRYAQYMNFSHPLIKAKFNPNACGWAYGMNFFDLDSWRREKCTEQYHYWQNQNENRTLWKLGTLPPGLITFYSTTKPLEKSWHVLGLGYNPSISMEEIRNAAVVHFNGNMKPWLDIGMNQFRHLWTKYVDYDDSYIRQCNFAPP

SEQ ID NO: 183601 - protein, 126 aa, Zea Mays
MVSLRRRRLLGLCSGKDSLPVDLPKPIENEKTVEVAHSNVKPFSVHPLPLAKTSDVLIKSSNGSDDSKEEKTQYYPGLYFILILYYWHFFTLCPGYLWLWYLNRSLYFRILYSKSQRTCAFFIVTI

SEQ ID NO: 183602 - protein, 134 aa, Zea Mays
MCFSDGWLLITDVGQQADWLIEVYLIQCNVPCVIRRMRPLIILSSCVFSRTVWSLLFATRLPNVSPFLEDKGFFCEDDLIRLGQGTMSDAPPCPNRERNNPLLVVSFHTTYKNRGNGWHVNQHSSYPLSPNTHE

SEQ ID NO: 183603 - protein, 178 aa, Zea Mays
MGSPKAAKSMVKQRIWRHRLVAPFAAVLITAVVVFSGLFAQDPSATSEFTAVNAGNTLPVRDKSESTGAAARGSPNKEDLATAAFEQELDVGNSEPNQAFQGTVPAAGERGTATAVPVQRERSSGGSEPEEKQSPPQDQEGEETSAKSASVLGRWYTNWRKNMSFVLCWSLGSQQTPL

SEQ ID NO: 183604 - protein, 516 aa, Zea Mays
MGSPKAAKSMVKQRIWRHRLVAPFAAVLITAVVVFSGLFAQDPSATSEFTAVNAGNTLPVRDKSESTEPNQAFQGTVPAAGERGTATAVPVQRERSSGGSEPEEKQSPPQDQEGEETSAKSGLVQYTTCTPRTGATVCDLSNQRYDICELCGDARAIGRSSTVMYVPQPLTSNGEEWNIPAQSRKSLPWIKKVTVKTLKASQQAPSCTSRHTMPAIVFALGGFTGNVWHDVSDVLVPLFLTARQFDQDVQLLVTDNRPWFIKKYSAILRRLTRHSVIDFDADDEVRCYPHVIVGLRSHRDLGIDPDSTPQKNYTMVDFRLFVREAYGLPAPGVDIPYRADKDEPEKKKPRMMLIERGKTRRLVNTPDVLLGLGWFGFEVVRADPRTHSDLEEFARLVDSCDAMMGVHGAGLTNMVFLRSGAALVHVVPYGVEFMADGFYGAPARDMGLRHVRYSVGPDESTLLEKYGRNHAVVRDPEAVRSGGWEKVGEVYMTEQDVVLNVTRFGPSLLKAIEFIV

SEQ ID NO: 183605 - protein, 540 aa, Zea Mays
MGSPKAAKSMVKQRIWRHRLVAPFAAVLITAVVVFSGLFAQDPSATSEFTAVNAGNTLPVRDKSESTARGSPNKEDLATAAFEQELDVGNSEPNQAFQGTVPAAGERGTATAVPVQRERSSGGSEPEEKQSPPQDQEGEETSAKSGLVQYTTCTPRTGATVCDLSNQRYDICELCGDARAIGRSSTVMYVPQPLTSNGEEWNIPAQSRKSLPWIKKVTVKTLKASQQAPSCTSRHTMPAIVFALGGFTGNVWHDVSDVLVPLFLTARQFDQDVQLLVTDNRPWFIKKYSAILRRLTRHSVIDFDADDEVRCYPHVIVGLRSHRDLGIDPDSTPQKNYTMVDFRLFVREAYGLPAPGVDIPYRADKDEPEKKKPRMMLIERGKTRRLVNTPDVLLGLGWFGFEVVRADPRTHSDLEEFARLVDSCDAMMGVHGAGLTNMVFLRSGAALVHVVPYGVEFMADGFYGAPARDMGLRHVRYSVGPDESTLLEKYGRNHAVVRDPEAVRSGGWEKVGEVYMTEQDVVLNVTRFGPSLLKAIEFIV

SEQ ID NO: 183606 - protein, 176 aa, Zea Mays
MGSPKAAKSMVKQRIWRHRLVAPFAAVLITAVVVFSGLFAQDPSATSEFTAVNAGNTLPVRDKSESTAARGSPNKEDLATAAFEQELDVGNSEPNQAFQGTVPAAGERGTATAVPVQRERSSGGSEPEEKQSPPQDQEGEETSAKSASVLGRWYTNWRKNMSFVLCWSLGSQQTPL

SEQ ID NO: 183607 - protein, 149 aa, Zea Mays
MGSPKAAKSMVKQRIWRHRLVAPFAAVLITAVVVFSGLFAQDPSATSEFTAVNAGNTLPVRDKSESTGAAARGSPNKEDLATAAFEQELDVGNSEPNQAFQGTVPAAGERGTATAVPVQRERSSGGSEPEEKQSPPQDQEGEETSAKSA

SEQ ID NO: 183608 - protein, 164 aa, Zea Mays
MKAVFKLQVLVNYARSSKEAEEVSKEIEASGGQAITFGGDVSKEADVESMIKVAVDTWGTIDVLVNNAGITRDTLLMRMKKSQWQDVIDLNLTGVFLCTQAATKVMMKKKKGRIINIASVVGLTGNAGQANYAAAKAGVIGFTKTVAREYASRNINGAMVGQRM

SEQ ID NO: 183609 - protein, 180 aa, Zea Mays
MAAATAAAAALASPAGLSTSLARRGLVSFAPALRPGPDRSSRAVALLGVRTHVTAVDQAIVKGDTKLEGPVVVVTGASRGIGKATALALGKAGCKVLVNYARSSKEAEEVSKEIEASGGQAITFGGDVSKEADVESMIKVAVDTWGTIDVLVNNAGCNKSNDEEEKGKNYQYSIGCWSYW

SEQ ID NO: 183610 - protein, 232 aa, Zea Mays
MQLKPPARPKLYSGLMPQEDLDPYRDLIPGLPEDLAKICLALVPRAHFPAMGAVSKRWMSFLESKELVAVRKEVGKLEEWVYVLVPDAGAKGSHWEILECSGQKQSPLPRMPGLTKAGFGVVVIGGKLFVIAGYAADHGKDCASDEVYQYDSCLNRWTVLAKMNVARCDFACAEVNGVIYVAGGFGPNGESLSSVEVYDPEQNKWTLIEGLRRPRWGCFGCSFEGKLSRTAA

SEQ ID NO: 183611 - protein, 176 aa, Zea Mays
MVDRAIWGEHEIACHQRKRISGDLTSIDRQPVTLVGLWLGMKTNANGRTNPSLVSIPAFYHRKRDWSGIVGNGNGYLTLLFILINDCNRVYMWRLEGARKAGTLTHFTTRSVGWFKVAMFADQLYDEDAWTDWCPAQDATSDRVMAVVLDAENLGAYLPTLSFCFPLRFTPFLQMN

SEQ ID NO: 183612 - protein, 56 aa, Zea Mays
MSYIAMAIKISGNNWAFSDTDKVPLSTTEMSLSLLDPRCCPEASARPCCMQLLVLL

SEQ ID NO: 183613 - protein, 264 aa, Zea Mays
MKWIEEEQALENGQINEKLMKTISSKLKEGNKILRRFNRFGKSELYLDMLFFLRFGSARCDSYFNVKFLAEHGERILEDLVISLADVIASIYLELMSVDGDMSAEVVGSSLVLCSLSTRELQKLRNEVAINWWLHQYFKSVVSMYEDRFELYVLCSKKCEKTADNQAERANWWRIASGKPNVLTLDYVNISPFSLPARRTKELRALIGWRYYFSLFLELSDIAMPFIRVAISKVSSAVSYFWVSMIGRSLGLIFSGIRQSLGWK

SEQ ID NO: 183614 - protein, 434 aa, Zea Mays
MDSESMVSPNLILISDEALLTISMVFAYLAGVVPSGQTSPRVRNQNVSQHIPEPSSSHSGRDLKFLPERNAAFDPNDMWSEVSAKLSKALQAHVQDALLDSREDGLMSDRKNYPLSMLAIHAGPRLRLLLITFQLLEMEVRNISGSSELDGIRWLQVSTTLIDSLIQPVFMKWIEEEQALENGQINEKLMKTISSKLKEGNKILRRFNRFGKSELYLDMLFFLRFGSARCDSYFNVKFLAEHGERILEDLVISLADVIASIYLELMSVDGDMSAEVVGSSLVLCSLSTRELQKLRNEVAINWWLHQYFKSVVSMYEDRFELYVLCSKKCEKTADNQAERANWWRIASGKPNVLTLDYVNISPFSLPARRTKELRALIGWRYYFSLFLELSDIAMPFIRVAISKVSSAVSYFWVSMIGRSLGLIFSGIRQSLGWK

SEQ ID NO: 183615 - protein, 456 aa, Zea Mays
MNSCVLMRSQHAAEKARAKSNGLTKEASVPKDANGNAISAQTFTFRELATATRNFRPECFLGEGGFGRVYKGRLESTGQVVAIKQLNRDGLQGNREFLVEVLMLSLLHHQNLVNLIGYCADGDQRLLVYEYMPSGSLEDHLHDIPLDKEALDWNTRMKIAAGAAKGLEYLHDKANPPVIYRDFKSSNILLDESFHPKLSDFGLAKLGPVGDKSHVSTRVMGTYGYCAPEYAMTGQLTVKSDVYSFGVVLLELITGRRAIDSTRPHGEQNLVSWARPLFNDRRKLPKMADPRLEGRYPMRGLYQALAVASMCTQSEAASRPLIADVVTALSYLASQPYDPSTAFASRRLGGSKPGENGGRVVSRNDETGTSRSLGKDREDSPRDLPAILLNKDLERERMVAEAKMWGDRERLVAEAKMWGDRERMVAEAKMWGENWRDKRRAENGQGSLDSPPTRNS

SEQ ID NO: 183616 - protein, 354 aa, Zea Mays
MLSLLHHQNLVNLIGYCADGDQRLLVYEYMPSGSLEDHLHDIPLDKEALDWNTRMKIAAGAAKGLEYLHDKANPPVIYRDFKSSNILLDESFHPKLSDFGLAKLGPVGDKSHVSTRVMGTYGYCAPEYAMTGQLTVKSDVYSFGVVLLELITGRRAIDSTRPHGEQNLVSWARPLFNDRRKLPKMADPRLEGRYPMRGLYQALAVASMCTQSEAASRPLIADVVTALSYLASQPYDPSTAFASRRLGGSKPGENGGRVVSRNDETGTSRSLGKDREDSPRDLPAILLNKDLERERMVAEAKMWGDRERLVAEAKMWGDRERMVAEAKMWGENWRDKRRAENGQGSLDSPPTRNS

SEQ ID NO: 183617 - protein, 303 aa, Zea Mays
MVHTDYIVKSSQKISHFLHRHEPPVLAGDISILKNEVDVVTICKPASVPVHPCGQYRKNTVVGILQAEHGLTPLFPVHRLDRLVSGLLIFAKNADRAECFRQQIEAGLLQKEYVAKVVGVFPDGEQTVDANVNFNAREGRSTVEISGGAGEEPNGKQALTRFQRICTDGTHSIVLCKPVTGRTHQIRVHLKQAGYPIANDELYLSGNFCPRSTKGTNASKKIAPSDPDSSAADHGSKDAGTDVEFDIDPMCTNCPNLAPVGYDRDEEGLWLHCVRYTGPDWSYECPYPDWAFLGSVSTKKMKS

SEQ ID NO: 183618 - protein, 304 aa, Zea Mays
MSFSHLQIFSSSLFLKVFFSSRHEPPVLAGDISILKNEVDVVTICKPASVPVHPCGQYRKNTVVGILQAEHGLTPLFLHRLDRLVSGLLIFAKNADRAECFRQQIEAGLLQKEYVAKVVGVFPDGEQTVDANVNFNAREGRSTVEISGGAGEEPNGKQALTRFQRICTDGTHSIVLCKPVTGRTHQIRVHLKQAGYPIANDELYLSGNFCPRSTKGTNASKKIAPSDPDSSAADHGSKDAGTDVEFDIDPMCTNCPNLAPVGYDRDEEGLWLHCVRYTGPDWSYECPYPDWAFLGSVSTKKMKS

SEQ ID NO: 183619 - protein, 305 aa, Zea Mays
MSFSHLQIFSSSLFLKVFFSSRHEPPVLAGDISILKNEVDVVTICKPASVPVHPCGQYRKNTVVGILQAEHGLTPLFPVHRLDRLVSGLLIFAKNADRAECFRQQIEAGLLQKEYVAKVVGVFPDGEQTVDANVNFNAREGRSTVEISGGAGEEPNGKQALTRFQRICTDGTHSIVLCKPVTGRTHQIRVHLKQAGYPIANDELYLSGNFCPRSTKGTNASKKIAPSDPDSSAADHGSKDAGTDVEFDIDPMCTNCPNLAPVGYDRDEEGLWLHCVRYTGPDWSYECPYPDWAFLGSVSTKKMKS

SEQ ID NO: 183620 - protein, 67 aa, Zea Mays
MTGLPRFSFKSNTLDPVFLGFSFSQFTVQNPLLKIQHTLSHPAFLIGSIFTAFLCCDVPALKKKCML

SEQ ID NO: 183621 - protein, 112 aa, Zea Mays
MAAPPGGAGIVWQTPANPPESHDYIIRNGRRYVRPYYFEFISHVKNRWAGKTIVDLFTDEFKGRSRDYYVHAVKCGRLQVDGQMVHTDYIVKSSQKISHFLHRYIILYMLIS

SEQ ID NO: 183622 - protein, 199 aa, Zea Mays
MAAPPGGAGIVWQTPANPPESHDYIIRNGRRYVRPYYFEFISHVKNRWAGKTIVDLFTDEFKGRSRDYYVHAVKCGRLQVDGQMVHTDYIVKSSQKISHFLHRHEPPVLAGDISILKNEVDVVTICKPASVPVHPCGQYRKNTVVGILQAEHGLTPLFPVHRLDRLVSGLLIFAKNADRAECFRQQLLHQKWRYSKHME

SEQ ID NO: 183623 - protein, 56 aa, Zea Mays
MSFSHLQIFSSSLFLKVFFSSRHEPPVLAGDISILKNEVDVVTICKPASVPVGLYL

SEQ ID NO: 183624 - protein, 590 aa, Zea Mays
MSISPHERTGGAYYPRPHNPSPSPQHGSDRRRHGRRSPPASVSPPGAAAEASDGGVGSSSNPVVPAIGESINAPEKVVGFIISGEENDTCTQEVGNVSECHSSEQGDSGLPVDNFGSVGSYPERPKMVGSLQADHLASGSTGLGNGTQIAARKNQTVNANHLLNFQYDPISRPQPRGPRTYLPRRQRKIKPYNKDLFIQANYKFVVLDTGNYQIDSMDPDKMLQWEDIICVRYYSPSEVQCPICLERPLCPQITSCGHIYCFPCILRYLMMGKDDYRGECWKKCPLCFMMISSKDLYTIQITQVQNVRAGDVVTFTLLSRSRNSLTPSIKSSSSESSTTDEEHYNVFSKFILTSDVELSVRDAKLDLSNWLHMADLGLVDDLEKLPFVSAALEQLEEKTKYWIDYRNYGGSPPSKDSFSPGSSFKSRNSFDVNTSQQMSEHKISLSDRDMVNGISELSMSPELSKTSGKGTISKVNEKCTTTIDSNEHDPYTFYQVSDGQHLILHPLNMRCLLNHFGGSDMLPPRITAKILELETVTQSEAIRKRYRFLSHFSLTTTFQCLLTHWLHSWMKSRSVRNKENEPPRRKKVRE

SEQ ID NO: 183625 - protein, 598 aa, Zea Mays
MSISPHERTGGAYYPRPHNPSPSPQHGSDRRRHGRRSPPASVSPPGAAAEASDGGVGSSSNPVVPAIGESINAPEKVVGFIISGEENDTCTQEVGNVSECHSSEQGDSGLPVDNFGSVGSYPERPKMVGSLQADHLASGSTGLGNGTQIAARKNQTVNANHLLNFQYDPISRPQPRGPRTYLPRRQRKIKPYNKDLFIQANYKFVVLDTGNYQIDSMDPDKMLQWEDIICVRYYSPSEVQCPICLERPLCPQITSCGHIYCFPCILRYLMMGKDDYRGECWKKCPLCFMMISSKDLYTIQITQVQNVRAGDVVTFTLLSRSRNSLTPSIKSSSSESSTTDEEHYNVFSKFILTSDVELSVRDAKLDLSNWLHMADLGLVDDLEKLPFVSAALEQLEEKTKYWIDYRNYGGSPPSKDSFSPGSSFKSRNSFDVNTSQQMSEHKISLSDRDMVNGISELSMSPELSKTSGKGTISKVNEKCTTTIDSNEHDPYTFYQVSDGQHLILHPLNMRCLLNHFGGSDMLPPRITAKILELETVTQSEAIRKRYRFLSHFSLTTTFQFCEIDLSDVVSPNSLAPFLDEIKKREKQRKRAAKKKVRE

SEQ ID NO: 183626 - protein, 55 aa, Zea Mays
MEKLLEFFRDNKRIDDIFTFLRLVAAIWICSHRQEFEPLIPELSQGYTLTEIIFR

SEQ ID NO: 183627 - protein, 300 aa, Zea Mays
MASCSGKNQEDTETEDSAHLLREQQESNAAAAVSAEPPSLAPQSEITEEEVHGPPEAGDRDPSAATAAAAERKGDETMSLFRRGSEGGKPPLPPRPPSISRTRGPSSAGGKPPLPPRPPSASRTRVPSSSGGKPPSPPSPPRSIFHEVWGSSMAMRDGDRESRFDLKDVFDELMVECRRNGETDQKAEAEVKDKKPLWRKFFDRIGNSNRNYTTPDVNYQKVHITELIRHYDLFAMVAVQGVELHLHALNLCREYSEFRPVHGDGECFYRSFIFSYLVNVLPFPLNNIYVLWLTPQFAPL

SEQ ID NO: 183628 - protein, 561 aa, Zea Mays
MASGSGRARGGGIRIQEPGSRHRDESNAGAAAAAAEPPPPSPSTDGLQERPHGPLGAESGSPSAAAAALKGKGVLAPSPLPSPTRSEETNSLVSSDIVSDEEAEELRSANTLADGDRRFGVSWKSPLVEAMMEVPKVTRHIDSKTAFDNLSMEQQWALAEEIEMQQRQQAQQRKCLWITFKGGMSNMFLDWIGRQMHNFNSDSTVIIPHVNHQTIPMTGIIEHYNLMETDAGRGVIFHSNVLNLRRAYSEFRPVHGDGDCFYRSFMFSYLEQVLDRQDTHEEHRLLAAVEGVARHHAHLEWNSEFSLRHKAFKTLIKKVMRWKRHNRWKNVLTTDSYSKQKLLKFFSGCGRPDNIFAFLRLVAAIWIYSHSEEFEPLIPELDEYDTLREWCSQEVIRHKVFTDHVQMTALVTALGVPLRVEYLLQVGDGQDLYDRQEDSQDYTPTSTCWSSHRRQLPHVHVVPRVTVLYTNAHYDIIYPHRRDGPPVPSIDERCCQQTALVQRPTTESSGQQIAQRDSCSGTGESSSQHIAQVEISTDENSDQHAELKLTSTDAHEYDDHC

SEQ ID NO: 183629 - protein, 165 aa, Zea Mays
MYHRKNGENFFVPASNAHECHSKEVLKSQLYVEKYVESNRHTFLDYISVGCQLNFMVGVDFTASNGNPRLPDSLHYIDPSGRPNVYQKAILEIGDVLQYYDPPKRFPAWGFGARPIDGPVSHCFNLNGSTYQPEVDGIQGIMSAYISALRNVSLAGPTLFGWRGN

SEQ ID NO: 183630 - protein, 230 aa, Zea Mays
MYHRKNGENFFVPASNAHECHSKEVLKSQLYVEKYVESNRHTFLDYISVGCQLNFMVGVDFTASNGNPRLPDSLHYIDPSGRPNVYQKAILEIGDVLQYYDPPKRFPAWGFGARPIDGPVSHCFNLNGSTYQPEVDGIQGIMSAYISALRNVSLAGPTLFGQLISTAMAIASQSLAENQHKYFILLIVTDGVVTDFQETIDAIIKASDFPISIIVVGVGGADFKEMEVIF

SEQ ID NO: 183631 - protein, 200 aa, Zea Mays
MYHRKNGENFFVPASNAHECHSKEVLKSQLYVEKYVESNRHTFLDYISVGCQLNFMVGVDFTASNGNPRLPDSLHYIDPSGRPNVYQKAILEIGDVLQYYDPPKRFPAWGFGARPIDGPVSHCFNLNGSTYQPEVDGIQGIMSAYISALRNVSLAGPTLFGQLISTAMAIASQSLAENQHKYFILLIVTTSNYFPGWRGN

SEQ ID NO: 183632 - protein, 53 aa, Zea Mays
MLYFTGSIWLSKDLACGSAHSHDDMQMQCISIVSNQHASGLNNVTPKCYFHRI

SEQ ID NO: 183633 - protein, 314 aa, Zea Mays
MGGVGEGDAWADQEQGNGGGSRGVGGGGGEAKRSEIYTYEAAWHIYAMNWSVRRDKKYRLAIASLLEQVTNRVEVVQLDEASGDIAPVLTFDHQYPPTKTMFMPDPHALRPDLLATSADHLRIWRIPSSDDAEDGAASANNNNGSVRCNGTQQPGIELRSELNGNRNSDYCGPLTSFDWNDADPRRIGTSSIDTTCTIWDVEREAVDTQLIAHDKEVYDIAWGGAGVFASVSADGSVRVFDLRDKEHSTIIYESGSGGSSGGASSSPPQGARGRHRWDRQRAETLVWRRRQTGISGTRHHLAGLVRQVGPRLVG

SEQ ID NO: 183634 - protein, 59 aa, Zea Mays
MERRRWRSTIRQARRSTGEEAVVAGAMLPARDTAVLVVTRDCTLQDVSSAGGSYMTFMI

SEQ ID NO: 183635 - protein, 344 aa, Zea Mays
MGGYELVRSDDAAGAAGADLESGSGASKVAGAPPPSPAPSASPAARQQRLASLDVFRGITVLLMIIVDDAGGFLPALNHSPWDGVTVADFIMPFFLFIVGVSLTLAYKRVPDRVEATRKAVLRALKLFCLGLVLQGGFFHGVHSLTFGVDLTKIRLMGILQRIAIAYLLAAVCEIWLKGDDDVDSGYGLLRRYRYQLFVGLVLSIAYSILLYGMYVPDWEYQIAGPGSSSTEKSFSVKCGVRGDTGPACNAVGMVDRTVLGIDHLYRRPVYARTKECSIDYPENGPLPPDAPSWCQAPFDPEGLLSSVMAIVTCLIGLQFGHVIIHFESTGEESPVGWSLPSAC

SEQ ID NO: 183636 - protein, 127 aa, Zea Mays
MSCLYSMAAAFGSGALFSIVSGMGTPNPVANAVTTGVAFAVFQGGFFMIGQKFSKPPSEDTYYSRTRSMLHKLGLEKYEKNFKRGLLNDQTLPLLTDSALRDVKIPPGPRLLILDQIKRDPELVQAK

SEQ ID NO: 183637 - protein, 709 aa, Zea Mays
MMKDAKWPHAVSSAGGRRGPPASSSNAGASYTLLASSPPSSVRNDGCSPHYPPAPASDDDGLSSFDASVAAAKLPFQQLHRNRPQLGVADWLPLQRQSSGSSVGGDDGEVSSTVSFTIANAAEYRYKGDADRAPSSSSKSWAQQAEEAYNLQLALALRLCSEASAAADPNFLDSSIAAADHLQPIASPQSLSHRFWVNGCLSYSDKVSDGFYFIQGMDPFIWTLCNDLHDGGRVPTIESLKAVNPTDSAIEVVIVDKVADYDLRQLISMAIDVSLNRTDSKEIATRLAAVVSTKMGGSVAATEEHELGPRWRDSVGFLKISSGSVVLPIGKLSVGFCCHRALLFKTLADSINLPCRIVKGCKYCKAGAATSCLVRFGHDRECLIDLIGNPGFLSEPDSLLNGLSSISVSSPLRPPKHDSADNSDNFKLFAKKYFLDCQSLNLMFSDPAAGTVIDLDEVMGSNLGLNSSHATNSDCQATFTHLKAGTRRSSQDGSFIMQRSSQEDTQSGLSDPFSDMSLEIEDLIIPWSELVLKEKIGAGSFGTVHRADWNGSDVAVKILMEQDFHPERLKEFLREVAIMRSLRHPNIVLLMGAVTQPPNLSIVTEYLSRGSLYRLLHRHAARENLEERRRLSMAFDVAKGMNYLHKRNPPIVHRDLKSPNLLVDKKYTVKVCDFGLSRLKANTFLSSKTAAGTLRCNLMGAYDIAAAME

SEQ ID NO: 183638 - protein, 205 aa, Zea Mays
MRKRMESDDDLIEEAKLRTVWWALCIFAVSYFLTRSFGTVHRADWNGSDVAVKILMEQDFHPERLKEFLREVAIMRSLRHPNIVLLMGAVTQPPNLSIVTEYLSRGSLYRLLHRHAARENLEERRRLSMAFDVAKGMNYLHKRNPPIVHRDLKSPNLLVDKKYTVKVCDFGLSRLKANTFLSSKTAAGTLRCNLMGAYDIAAAME

SEQ ID NO: 183639 - protein, 281 aa, Zea Mays
MLNQFRAFCFTILLFMIQHQPLFYWNFLQTSKQGGFPNIQSTQHVPSTSISSGLPLPQQLPVYSQPTLPLGPFTSLVGYPYLPQNYYLPSSPFQQAYSSNGPFHQSAAPAMPGAGMKYPMPQYKSSPPASTLPQPSSLSGYGGFGSANNIPRNFSQNQGAAAAPTTLGFDEALGTQFKHPNHYAALQQSDNSAMWLHGGAGSRTISAVPPGNFYGFQGQSKHGGFRQAHHPSQYGGLGYPSFYQSQTSLPQEHPQSPTEGSLNNPYGVPSQPSHQLWQHIY

SEQ ID NO: 183640 - protein, 60 aa, Zea Mays
MAHHGQKVRDFHHHAPTEMLITKLSQLDGTLSLHSQDFDSCCQRRREWCTLSSAISRKNR

SEQ ID NO: 183641 - protein, 88 aa, Zea Mays
MCNDTCEIEVVFWGELHRREEGSWLTTDKRFVISITTLPQVVYDQAGVGGSPRTKDGTLSLHSQDFDSCCQRRREWCTLSSAISRKNR

SEQ ID NO: 183642 - protein, 87 aa, Zea Mays
MAKFICCRLQQTMSMKSLTSGLYSISADLDQFLFIRRLQMFSLPYKNTLFHLLIINCCTVHGLLSHSTSYDFRILTAVVNEGENGVL

SEQ ID NO: 183643 - protein, 66 aa, Zea Mays
MIKLVWEAHHGQKVRDFHHHAPTEMLITKLSQLDGTLSLHSQDFDSCCQRRREWCTLSSAISRKNR

SEQ ID NO: 183644 - protein, 80 aa, Zea Mays
MIKLVWEAHHGQKVRDFHHHAPTGRKARSCHHKLLANLAICHENKTGQHYSLRGNNLRFLFASANLIYQLIFFHFLPISY

SEQ ID NO: 183645 - protein, 59 aa, Zea Mays
MVYSKLSNFQKKSLTCKLVSIFLAYSNHSIVQRTPIQFRGFLLCSQAPVEKQGPVITNS

SEQ ID NO: 183646 - protein, 83 aa, Zea Mays
MPRQMCTSLGRKARSCHHKLLANLAICHENKTGQHYSLRALEVVCLQIRNCPQYCFYDVNTMNRVAVYAHENASMPHLGLVGK

SEQ ID NO: 183647 - protein, 61 aa, Zea Mays
MPRQMCTSLGRKARSCHHKLLANLAICHENKTGQHYSLRVLLLSFGGCLFTNTELSPILFL

SEQ ID NO: 183648 - protein, 173 aa, Zea Mays
MGMNMVTTVMAFSVSAFFVLFVFTRLLCARLHLSRAAAAAQGYNVHRVPGGVRGQGRGARAARLRPRLPRDLHRRLAEAAPHLPRLPRLPARQERLPRHAGRLQPPRRRRRRRSHRPACSRVLVRRVTAGSRTPATDRRHWAGGWLAGDRLRRARLLARSEPCCCCCWLVTIL

SEQ ID NO: 183649 - protein, 183 aa, Zea Mays
MSDSKGGAGGMGMNMVTTVMAFSVSAFFVLFVFTRLLCARLHLSRAAAAAQGYNVHRVPGGVRGQGRGARAARLRPRLPRDLHRRLAEAAPHLPRLPRLPARQERLPRHAGRLQPPRRRRRRRSHRPACSRVLVRRVTAGSRTPATDRRHWAGGWLAGDRLRRARLLARSEPCCCCCWLVTIL

SEQ ID NO: 183650 - protein, 108 aa, Zea Mays
MSDSKGGAGGMGMNMVTTVMAFSVSAFFVLFVFTRLLCARLHLSRAAAAAQGYNVERGTHGLEPSVVTTFPTVKLGDGGQQPPPVQEESQLRYPFALAFALLCSSCFS

SEQ ID NO: 183651 - protein, 212 aa, Zea Mays
MYDFMALDRPSTPTIDRGIALHKMIRLITMGLGGEGYLNFMGNEFGHPEWIDFPRGPQRLPSGKFIPGNNNSYDKCRRRFDLGDADYLRYHGMQEFDQAMQHLEQKYEFMTSDHQYISRKHEEDKVIVFEKGDLVFVFNFHCNNSYFDYRIGCRKPGVYKVVLDSDAGLFGGFSRIHHAAEHFTADCSHDNRPYSFSVYTPSRTCVVYAPVE

SEQ ID NO: 183652 - protein, 293 aa, Zea Mays
MPTFALPVHDGGVGFDYRMHMAVADKWIDLLKQSDETWKMGDIVHTLTNRRWLEKCVTYAESHDQALVGDKTIAFWLMDKDMYDFMALDRPSTPTIDRGIALHKMIRLITMGLGGEGYLNFMGNEFGHPEWIDFPRGPQRLPSGKFIPGNNNSYDKCRRRFDLGDADYLRYHGMQEFDQAMQHLEQKYEFMTSDHQYISRKHEEDKVIVFEKGDLVFVFNFHCNNSYFDYRIGCRKPGVYKVVLDSDAGLFGGFSRIHHAAEHFTADCSHDNRPYSFSVYTPSRTCVVYAPVE

SEQ ID NO: 183653 - protein, 429 aa, Zea Mays
MAFAVSGAVLGGAVRAPRLTGGGEGSLVFRHTGLFLTRGARVGCSGTHGAMRAAAAARKAVMVPEGENDGLASRADSAQFQSDELEVPDISEETTCGAGVADAQALNRVRVVPPPSDGQKIFQIDPMLQGYKYHLEYRYSLYRRIRSDIDEHEGGLEAFSRSYEKFGFNRSAEGITYREWAPGAFSAALVGDFNNWDPNADRMSKNEFGVWEIFLPNNADGTSPIPHGSRVKVRMDTPSGIKDSIPAWIKYSVQAPGEIPYDGIYYDPPEEVKYVFRHAQPKRPKSLRIYETHVGMSSPEPKINTYVNFRDEVLPRIKKLGYNAVQIMAIQEHSYYGSFGYHVTNFFAPSSRFGTPEELKSLIDRAHELGLLVLMDVVHSHASSNTLDGLNGFDGTDTHYFHSGPRGHHWMWDSRLFNYGNWEMVARGI

SEQ ID NO: 183654 - protein, 673 aa, Zea Mays
MAFAVSGAVLGGAVRAPRLTGGGEGSLVFRHTGLFLTRGARVGCSGTHGAMRAAAAARKAVMVPEGENDGLASRADSAQFQSDELEVPDISEETTCGAGVADAQALNRVRVVPPPSDGQKIFQIDPMLQGYKYHLEYRYSLYRRIRSDIDEHEGGLEAFSRSYEKFGFNRSAEGITYREWAPGAFSAALVGDFNNWDPNADRMSKNEFGVWEIFLPNNADGTSPIPHGSRVKVRMDTPSGIKDSIPAWIKYSVQAPGEIPYDGIYYDPPEEVKYVFRHAQPKRPKSLRIYETHVGMSSPEPKINTYVNFRDEVLPRIKKLGYNAVQIMAIQEHSYYGSFGYHVTNFFAPSSRFGTPEELKSLIDRAHELGLLVLMDVVHSHASSNTLDGLNGFDGTDTHYFHSGPRGHHWMWDSRLFNYGNWEVLRFLLSNARWWLEEYKFDGFRFDGVTSMMYTHHGLQVTFTGNFNEYFGFATDVDAVVYLMLVNDLIHGLYPEAVTIGEDVSGMPTFALPVHDGGVGFDYRMHMAVADKWIDLLKQSDETWKMGDIVHTLTNRRWLEKCVTYAESHDQALVGDKTIAFWLMDKDMYDFMALDRPSTPTIDRGIALHKMIRLITMGLGGEGYLNFMGNEFGHPEWIDFPRGPQRLPSGKFIPGNNNSYDKCRRRFDLVNFL

SEQ ID NO: 183655 - protein, 597 aa, Zea Mays
MSKNEFGVWEIFLPNNADGTSPIPHGSRVKVRMDTPSGIKDSIPAWIKYSVQAPGEIPYDGIYYDPPEEVKYVFRHAQPKRPKSLRIYETHVGMSSPEPKINTYVNFRDEVLPRIKKLGYNAVQIMAIQEHSYYGSFGYHVTNFFAPSSRFGTPEELKSLIDRAHELGLLVLMDVVHSHASSNTLDGLNGFDGTDTHYFHSGPRGHHWMWDSRLFNYGNWEVLRFLLSNARWWLEEYKFDGFRFDGVTSMMYTHHGLQVTFTGNFNEYFGFATDVDAVVYLMLVNDLIHGLYPEAVTIGEDVSGMPTFALPVHDGGVGFDYRMHMAVADKWIDLLKQSDETWKMGDIVHTLTNRRWLEKCVTYAESHDQALVGDKTIAFWLMDKDMYDFMALDRPSTPTIDRGIALHKMIRLITMGLGGEGYLNFMGNEFGHPEWIDFPRGPQRLPSGKFIPGNNNSYDKCRRRFDLGDADYLRYHGMQEFDQAMQHLEQKYEFMTSDHQYISRKHEEDKVIVFEKGDLVFVFNFHCNNSYFDYRIGCRKPGVYKVVLDSDAGLFGGFSRIHHAAEHFTADCSHDNRPYSFSVYTPSRTCVVYAPVE

SEQ ID NO: 183656 - protein, 575 aa, Zea Mays
MVHETRSRVHAAAQEEGKLASKKQKPDNETKERGQNVPSKNKKSADNEGKDGEPEAPTKSKKLKAEESEPNGREAAAREFAEFCKAIGERLSLEDMRKILQANEQDASGSEDAVVPRCEDMMFYGPLEKCPVCEGQLEFKEWKYKCTGNYSEWARCTFSTNDPSRRSGSIEVPDDIKDDFIRKWLKQQEGKEFPKRDLDEEAHIFSGMMIALSGRMSRSHGYFKEQIMKHGGKVKNSVLGATCVVASPAERDKGGSGGFAEALERGTPVVSENWIIDSIEKKEAQPFAAYDIVTDVVPEGRGLPLGQLDPSEEAIETLAAEVKLAGKRSVHKDSKLDKDGGCVFEKDGIIYNCAFAVCDLGCQMNELCIMQLVMVPGNRLHLFYKKGPIGHDQMAEERVEDFGSRVNDAIKEFVRLFEEVTGNEFEPWERQKKFEKKSMKMYPLDMDVGVDVRHGGAALRQLGSAAAHCKLDPSVSFLLKQLCGQEIYRYALMEMAQDLPDLPIGMLTDLHLKRGEEMLLQMRRDAETVAESGPEADAFWTDASSKWFTLFPTTRPYTMRGFEQIADNVSRQCAI

SEQ ID NO: 183657 - protein, 470 aa, Zea Mays
MPDERLVMVPGNRLHLFYKKGPIGHDQMAEERVEDFGSRVNDAIKEFVRLFEEVTGNEFEPWERQKKFEKKSMKMYPLDMDVGVDVRHGGAALRQLGSAAAHCKLDPSVSFLLKQLCGQEIYRYALMEMAQDLPDLPIGMLTDLHLKRGEEMLLQMRRDAETVAESGPEADAFWTDASSKWFTLFPTTRPYTMRGFEQIADNVASGFETVRDINDASRLIGDAFRSTLLDDPLSECYKKLGCCISAVAEGSEDYKMVLKYLEKTYEPVEVEDVVYGVSVERIYAVESSAFPLYEEIRNLPNKILLWCGTRSSNLLRHLHKGFLPAVCHLPVPGYMFGKAIVCSDAAAEAARYGFTAVDRPEGYLVLAVASLGEEIEEVTGTPGAEEARVLEEKKVGVKGVGRKTTDESEHFSWRDGVKVPCGKLVPSANKDGPLEYNEYAVYDPKQVSICFLVGVKYEEQNMEVVPPDDQ

SEQ ID NO: 183658 - protein, 883 aa, Zea Mays
MVHETRSRVHAAAQEEGKLASKKQKPDNETKERGQNVPSKNKKSADNEGKDGEPEAPTKSKKLKAEESEPNGREAAAREFAEFCKAIGERLSLEDMRKILQANEQDASGSEDAVVPRCEDMMFYGPLEKCPVCEGQLEFKEWKYKCTGNYSEWARCTFSTNDPSRRSGSIEVPDDIKDDFIRKWLKQQEGKEFPKRDLDEEAHIFSGMMIALSGRMSRSHGYFKEQIMKHGGKVKNSVLGATCVVASPAERDKGGSGGFAEALERGTPVVSENWIIDSIEKKEAQPFAAYDIVTDVVPEGRGLPLGQLDPSEEAIETLAAEVKLAGKRSVHKDSKLDKDGGCVFEKDGIIYNCAFAVCDLGCQMNELCIMQLVMVPGNRLHLFYKKGPIGHDQMAEERVEDFGSRVNDAIKEFVRLFEEVTGNEFEPWERQKKFEKKSMKMYPLDMDVGVDVRHGGAALRQLGSAAAHCKLDPSVSFLLKQLCGQEIYRYALMEMAQDLPDLPIGMLTDLHLKRGEEMLLQMRRDAETVAESGPEADAFWTDASSKWFTLFPTTRPYTMRGFEQIADNVASGFETVRDINDASRLIGDAFRSTLLDDPLSECYKKLGCCISAVAEGSEDYKMVLKYLEKTYEPVEVEDVVYGVSVERIYAVESSAFPLYEEIRNLPNKILLWCGTRSSNLLRHLHKGFLPAVCHLPVPGYMFGKAIVCSDAAAEAARYGFTAVDRPEGYLVLAVASLGEEIEEVTGTPGAEEARVLEEKKVGVKGVGRKTTDESEHFSWRDGVKVPCGKLVPSANKDGPLEYNEYAVYDPKQVSICFLVGVKYEEQNMEVVGPILVSGAGSGDALAVGWNGNVRGARTSWAACRLLVLCQLPCLWLCVLLGSW

SEQ ID NO: 183659 - protein, 473 aa, Zea Mays
MNELCIMQLVMVPGNRLHLFYKKGPIGHDQMAEERVEDFGSRVNDAIKEFVRLFEEVTGNEFEPWERQKKFEKKSMKMYPLDMDVGVDVRHGGAALRQLGSAAAHCKLDPSVSFLLKQLCGQEIYRYALMEMAQDLPDLPIGMLTDLHLKRGEEMLLQMRRDAETVAESGPEADAFWTDASSKWFTLFPTTRPYTMRGFEQIADNVASGFETVRDINDASRLIGDAFRSTLLDDPLSECYKKLGCCISAVAEGSEDYKMVLKYLEKTYEPVEVEDVVYGVSVERIYAVESSAFPLYEEIRNLPNKILLWCGTRSSNLLRHLHKGFLPAVCHLPVPGYMFGKAIVCSDAAAEAARYGFTAVDRPEGYLVLAVASLGEEIEEVTGTPGAEEARVLEEKKVGVKGVGRKTTDESEHFSWRDGVKVPCGKLVPSANKDGPLEYNEYAVYDPKQVSICFLVGVKYEEQNMEVVPPDDQ

SEQ ID NO: 183660 - protein, 398 aa, Zea Mays
MAAAAAISLSFHFRFRPPFPSPRTPTRHAPFSLFSPSLLAPCRLRVAPGRPSPSPWRPDVRARAGSTIGAPPALVRPGGAVETDRLPSDVRDRAMEAVDHFGGRVTIGDVASRAGLQLAQAERALQALAADTEGFLEVSEDGEVLYVFPKDYRAKLAGKSFRMRVEPLVDKAKQVGAYLVRVSFGTALIASIVLVYTTIIAILSSSSSDEDGRGRRRRSYGSTIIIPTDMFWYLDADYYRRRRVENENGMNFIESVFSFVFGDGDPNDGLEEKRWKMIGQYISSNGGVVTAEELAPFLDVPPPSEESKDDESFVLPVLLRFQGHPEIDEQLHTKGVFGRAPALALRQLWQQSRTKRRRREISCIDSHRCNVLLHQKVVGAGNMWVPNGLQCLAELKST

SEQ ID NO: 183661 - protein, 263 aa, Zea Mays
MAAAAAISLSFHFRFRPPFPSPRTPTRHAPFSLFSPSLLAPCRLRVAPGRPSPSPWRPDVRARAGSTIGAPPALVRPGGAVETDRLPSDVRDRAMEAVDHFGGRVTIGDVASRAGLQLAQAERALQALAADTEGFLEVSEDGEVLYVFPKDYRAKLAGKSFRMRVEPLVDKAKQVGAYLVRVSFGTALIASIVLVYTTIIAILSSSSTSSSTSSDEDGRGRRRRSYGSTIIIPTDMFWYLDADYYRRRRVENENGMNFIESVI

SEQ ID NO: 183662 - protein, 209 aa, Zea Mays
MAAAAAISLSFHFRFRPPFPSPRTPTRHAPFSLFSPSLLAPCRLRVAPGRPSPSPWRPDVRARAGSTIGAPPALVRPGGAVETDRLPSDVRDRAMEAVDHFGGRVTIGDVASRAGLQLAQAERALQALAADTEGFLEVSEDGEVLYVFPKDYRAKLAGKSFRMRVEPLVDKAKQVGAYLVRVSFGTALIASIVLVYTTIIAILSSSRYV

SEQ ID NO: 183663 - protein, 432 aa, Zea Mays
MAAAAAISLSFHFRFRPPFPSPRTPTRHAPFSLFSPSLLAPCRLRVAPGRPSPSPWRPDVRARAGSTIGAPPALVRPGGAVETDRLPSDVRDRAMEAVDHFGGRVTIGDVASRAGLQLAQAERALQALAADTEGFLEVSEDGEVLYVFPKDYRAKLAGKSFRMRVEPLVDKAKQVGAYLVRVSFGTALIASIVLVYTTIIAILSSSSSDEDGRGRRRRSYGSTIIIPTDMFWYLDADYYRRRRVENENGMNFIESVFSFVFGDGDPNDGLEEKRWKMIGQYISSNGGVVTAEELAPFLDVPPPSEESKDDESFVLPVLLRFQGHPEIDEQGNILYRFPSLQRTASSKSGRSREYVGTKWSAMFSGVEKYLEEKPWKFRSVYIITILSEVELIQDAICPLRGKVCLGFSPSLTQFIWEPPALGLPYALYTPTC

SEQ ID NO: 183664 - protein, 439 aa, Zea Mays
MAAAAAISLSFHFRFRPPFPSPRTPTRHAPFSLFSPSLLAPCRLRVAPGRPSPSPWRPDVRARAGSTIGAPPALVRPGGAVETDRLPSDVRDRAMEAVDHFGGRVTIGDVASRAGLQLAQAERALQALAADTEGFLEVSEDGEVLYVFPKDYRAKLAGKSFRMRVEPLVDKAKQVGAYLVRVSFGTALIASIVLVYTTIIAILSSSSDEDGRGRRRRSYGSTIIIPTDMFWYLDADYYRRRRVENENGMNFIESVFSFVFGDGDPNDGLEEKRWKMIGQYISSNGGVVTAEELAPFLDVPPPSEESKDDESFVLPVLLRFQGHPEIDEQGNILYRFPSLQRTASSKSGRSREYVGTKWSAMFSGVEKYLEEKPWKFSKANATEKAMVAGLGGLNLFGVIILGNLLKQMTVTPGGLISFAAQLYPLLQVWLGLICLFSTL

SEQ ID NO: 183665 - protein, 307 aa, Zea Mays
MSCLAAPPAAPPKAGERMLRAAAPLRSPSPCRGLHYAVRGTGGREAGCGRRQLALLRCSPAGESRASGDGGLSSFCIIEGPETIEDFAQMQSQEIEDNIMSRRNKIFLLMEEVRRLRVQQRIRTSESKDANTEGNEMPEIPSTIPFMPDASPKTMKQLYMTSFSVISGIIIFGGLIAPVLELKLGLGGTSYEDFIRTLHLPLQLSQVDPIVASFSGGAVGVISALMLVEVRNVRQQEKKRCTYCHGTGYLPCARCSASGMLLNTKQFSLLGHNMWSMKGRCQNCSGAGKVMCPTCLCTGMAMASYQQ

SEQ ID NO: 183666 - protein, 205 aa, Zea Mays
MSCLAAPPAAPPKAGERMLRAAAPLRSPSPCRGLHYAVRGTGGREAGCGRRQLALLRCSPAGESRASGDGGLSSFCIIEGPETIEDFAQMQSQEIEDNIMSRRNKIFLLMEEVRRLRVQQRIRTSESKDANTEGNEMPEIPSTIPFMPDASPKTMKQLYMTSFSVISGIIIFGGLIAPVLELKLGLGGTSYEDFIRTLHLPLQLR

SEQ ID NO: 183667 - protein, 102 aa, Zea Mays
MISAYFCRYLGKDPSSSLDAQQESIQPKNQSQKLFHLTVQRQHRSSPLSRVWELMCVQGVVKVSFAPIMDHSPSHKSQLLPTIQTRNLLRNQLFHRPRKGSM

SEQ ID NO: 183668 - protein, 187 aa, Zea Mays
MPSYGGTPLPTTTTPSTTIVPFPSATAPLPLPISALVPSGQPYLYPSTRLPSHTPHPRFPASPRMLFLHTITLLQAPSPPPSLPQIILPYHQHNPRRTAPKRRDAQQESIQPKNQSQKLFHLTVQRQHRSSPLSRVWELMCVQGVVKVSFAPIMDHSPSHKSQLLPTIQTRNLLRNQLFHRPRKGSM

SEQ ID NO: 183669 - protein, 250 aa, Zea Mays
MSTTTEAAKSGSAAPVRCQRIGCDAIFTNDDNREGSCQYHPSVPMFHDGMKEWSCCKQRSHDFSLFLQIPGCTTGKHTTEKPITKAVSSNRTKATPIQSSKQGVGVDVCARCRQGFFCSDHGSQPKPQKPAATDDTNKEPVEKSAVPPPKKRIDVNELRTCKNKGCGKSYKEKDNHDSACDYHPGPAVFHDRMRGGNAVMFMSRSLTSLWRYLHAQRVGIMLMRCEFTPCLRLFSCCIVTCHVNTISAVY

SEQ ID NO: 183670 - protein, 127 aa, Zea Mays
MSTTTEAAKSGSAAPVRCQRIGCDAIFTNDDNREGSCQYHPSVPMFHDGMKEWSCCKQRSHDFSLFLQIPGPLSRVWELMCVQGVVKVSFAPIMDHSPSHKSQLLPTIQTRNLLRNQLFHRPRKGSM

SEQ ID NO: 183671 - protein, 268 aa, Zea Mays
MPSYGGTPLPTTTTPSTTIVPFPSATAPLPLPISALVPSGQPYLYPSTRLPSHTPHPRFPASPRMLFLHTITLLQAPSPPPSLPQIILPYHQHNPRRTAPKRRGTGPRLQTYHSCTTGKHTTEKPITKAVSSNRTKATPIQSSKQGVGVDVCARCRQGFFCSDHGSQPKPQKPAATDDTNKEPVEKSAVPPPKKRIDVNELRTCKNKGCGKSYKEKDNHDSACDYHPGPAVFHDRMRGWKCCDVHVKEFDEFMEIPTCTKGWHNADAV

SEQ ID NO: 183672 - protein, 129 aa, Zea Mays
MHAHRLDPRTMGLRRKRGEIHQINLWRSTSVLLARGPGKPFTYRGRKEGPISSENYAKPLEQNREFGIVDQCVRSSSVAGTVGTNLISCIWMEVNLISCILFQSSMKQPVTSHIILLGYLLLPRAAKVA

SEQ ID NO: 183673 - protein, 251 aa, Zea Mays
MSGVGSGRPPAAQKILQSLRPPLSFATPSRSPFAAPDDYHRFPTPAAATAPAATSGGVGAGAPPRDTIEEGLFIRTPLKRKATSEENDAAAEPSDCIITSPMPTSVSGKTVKASKAKAKNSKTGPQTPTSNVGSPLNPPTPVGTCRYDSSLGLLTKKFINLLKQAPDGILDLNNAAETLEVQKRRIYDITNVLEGIGLIEKTLKNRIRWKALDDSSVQLDNGISALQAEVENLSLQEQALDERISALYPIQ

SEQ ID NO: 183674 - protein, 224 aa, Zea Mays
MSGVGSGRPPAAQKILQSLRPPLSFATPSRSPFAAPDDYHRFPTPAAATAPAATSGGVGAGAPPRDTIEEGLFIRTPLKRKATSEENDAAAEPSDCIITSPMPTSVSGKTVKASKAKAKNSKTGPQTPTSNVGSPLNPPTPVGTCRYDSSLGLLTKKFINLLKQAPDGILDLNNAAETLEVQKRRIYDITNVLEGIGLIEKTLKNRIRWKALDDSSVQLDNGRS

SEQ ID NO: 183675 - protein, 245 aa, Zea Mays
MSGVGSGRPPAAQKILQSLRPPLSFATPSRSPFAAPDDYHRFPTPAAATAPAATSGGVGAGAPPRDTIEEGLFIRTPLKRKATSEENDAAAEPSDCIITSPMPTSVSGKTVKASKAKAKNSKTGPQTPTSNVGSPLNPPTPVGTCRYDSSLGLLTKKFINLLKQAPDGILDLNNAAETLEVQKRRIYDITNVLEGIGLIEKTLKNRIRWKALDDSSVQLDNGISALQAEVENLSLQEQALDERIR

SEQ ID NO: 183676 - protein, 461 aa, Zea Mays
MSGVGSGRPPAAQKILQSLRPPLSFATPSRSPFAAPDDYHRFPTPAAATAPAATSGGVGAGAPPRDTIEEGLFIRTPLKRKATSEENDAAAEPSDCIITSPMPTSVSGKTVKASKAKAKNSKTGPQTPTSNVGSPLNPPTPVGTCRYDSSLGLLTKKFINLLKQAPDGILDLNNAAETLEVQKRRIYDITNVLEGIGLIEKTLKNRIRWKALDDSSVQLDNGISALQVLTKILSNQVLCIPFSDMREKLRGLTEDENNKRWLYVTEDDIKGLPSFQNETLIAIKAPHGTTLEVPDPDEAGDYLQRRYRIVLRSTMGPIDVYLVSQFDEKFEELGGVATPVKHSSVPRHQPAEDFNTYAGQSSTPMDVAHDVQHGQKIPQDPSALHDFGGMTRISPSDVHTDSDYWLLTEGDVSMTDMWKTGQEVQWDQMDFLSEDVVTPRAHNQQPVTVDGPHMEVPSMDP

SEQ ID NO: 183677 - protein, 481 aa, Zea Mays
MSGVGSGRPPAAQKILQSLRPPLSFATPSRSPFAAPDDYHRFPTPAAATAPAATSGGVGAGAPPRDTIEEGLFIRTPLKRKATSEENDAAAEPSDCIITSPMPTSVSGKTVKASKAKAKNSKTGPQTPTSNVGSPLNPPTPVGTCRYDSSLGLLTKKFINLLKQAPDGILDLNNAAETLEVQKRRIYDITNVLEGIGLIEKTLKNRIRWKALDDSSVQLDNGISALQAEVENLSLQEQALDERISDMREKLRGLTEDENNKRWLYVTEDDIKGLPSFQNETLIAIKAPHGTTLEVPDPDEAGDYLQRRYRIVLRSTMGPIDVYLVSQFDEKFEELGGVATPVKHSSVPRHQPAEDFNTYAGQSSTPMDVAHDVQHGQKIPQDPSALHDFGGMTRISPSDVHTDSDYWLLTEGDVSMTDMWKTGRILDDHALRCLNFLTWKIEEVQWDQMDFLSEDVVTPRAHNQQPVTVDGPHMEVPSMDP

SEQ ID NO: 183678 - protein, 89 aa, Zea Mays
MVHVLPLPRPHPAPHPAILGQVRYKQRLSWTRFGDLLKERRSTSCFFGFCVCRMKADLMLRRSSMSSMHENPRKRMSSKGSRRITCSWE

SEQ ID NO: 183679 - protein, 238 aa, Zea Mays
MRSYFWLDFQQLNDIYRYKTEEYSHTAVNKFNVIPDSIPDWLFDFMPCQGGFFIGNVSPARMDFRWFALGNMIAILSSLATPEQSVAIMDLIEERWEELIGEMPLKICYPAIENHEWRIVTGCDPKNTRWSYHNGGSWPVLLWLLTAACIKTGRPQIARRAIDLAERRLLKDGWPEYYDGKLGRYVGKQARKFQTWSIAGYLVAKMMLEDPSHLGMISLEEDRAMLKPVLKRSASWTN

SEQ ID NO: 183680 - protein, 80 aa, Zea Mays
MEQRQTSSWIKAKSLTAAKTTFDTQFLKLFPFLGRCTKQEGPPKELRETCLLPSIFPLPLTKKTRNCHRLSHICSTIFPR

SEQ ID NO: 183681 - protein, 90 aa, Zea Mays
MDGKGDGELEKQSVQMHSDVQQISKDPPTMVKASSREDAQPMTESSNAEVNTSSAVAAGESESHEIGSPKSLKDAIKPKHKRKKKKSDRS

SEQ ID NO: 183682 - protein, 208 aa, Zea Mays
MEHLRWRPTVNERDFIECALQSDLRVDGRHSFDFRKLKITFGREDGSSEVQLGETHVMGYVTVQLVQPYRDRPNEGTLAIFTEFSPMADPSFEPGRPGELAIELGRVIDRGLRESRAVDMESLCVVAGKHVWSVRVDLHILDNGGNLIDAANIAALAALSTFRRPECTVGGDDGQQVTVHDPEVRDPLPLTIHHMPIAVTFAYFGEGS

SEQ ID NO: 183683 - protein, 221 aa, Zea Mays
MSGLCVWTFTSWITEALSTFRRPECTVGGDDGQQVTVHDPEVRDPLPLTIHHMPIAVTFAYFGEGNIVVLDPTYKEEAVMGGRMTAIVNSNGDVCAIQKAGGEGVMSSVIMQCLRIASVKAADITSKIKKAVDSYTTEKALKKVKRLPTSVPQKINVTNVTMDGKGDGELEKQSVQMHSDVQQISKGDENQQSIKRNSPLTRDRIAKHKQTSTFIGGPSNW

SEQ ID NO: 183684 - protein, 362 aa, Zea Mays
MEHLRWRPTVNERDFIECALQSDLRVDGRHSFDFRKLKITFGREDGSSEVQLGETHVMGYVTVQLVQPYRDRPNEGTLAIFTEFSPMADPSFEPGRPGELAIELGRVIDRGLRESRAVDMESLCVVAGKHVWSVRVDLHILDNGGNLIDAANIAALAALSTFRRPECTVGGDDGQQVTVHDPEVRDPLPLTIHHMPIAVTFAYFGEGNIVVLDPTYKEEAVMGGRMTAIVNSNGDVCAIQKAGGEGVMSSVIMQCLRIASVKAADITSKIKKAVDSYTTEKALKKVKRLPTSVPQKINVTNVTMDGKGDGELEKQSVQMHSDVQQISKGDENQQSIKRNSPLTRDRIAKHKQTSTFIGGPSN

SEQ ID NO: 183685 - protein, 715 aa, Zea Mays
MSHVEPAAAGVDQVGEGTVVPHDNGVSGTGGDVATTEAQVAVAVSTSGDERRGDYGDDAENEEEEEAATVQGSKEGTDELLRKVVCSEEAAYKLYCDYGHRMGFSIRKGKQSYFTGTKRIRTKDYFCSKEGLKEGEKLTDANFNDPHTRTNCRAMVRFRVNDQGEWKVIRLVSDHNHNLARPEERHLLRSARSLIAGRSSSVEVMLYGGYQVQGGAPQLPTGSTSATNNVENQKQDLLLGYGAATKTLTIGTGDVQSLVSHLKSRANEDGMFYWDVQLDRGGRMTNFFWRDGRSRTDYDCFCDVVVFDSTYRLSKHNLICAPFVGVNHHWQTTMYGCALLADESTSAFVWLFKSFLESMGNRHPQSIFTNLDQVVTKAVEEVFPNARHRIAHWHIQKNAHSRLGALNVSKTFNKMFTKCIQGCDSEAEFEETWAQMLCEFKLQDNKWLKKLYKLKQKWCSALNNCTFDGGIEYEPQCDSMSNMFNNVSDKLTSLCAIAVAVDKQTEDWREKELDEDARCFQRPPACIIKYSDILNHAAKVYTHRIYKLFETDFLDGCGATKFKELPCQDNNTYQFEMTMQGRGSRVCTVHFNMSMMQLSCSCSKFETMGLLCPHALKALSIKNICKIPESYILKRWTKDAKKWVFNPKQYESSYQECMNDEAAYCNYVMRYAYDLVTKSQGQDALRKALWETLESGEKELERYLENVTQHAPYAT

SEQ ID NO: 183686 - protein, 72 aa, Zea Mays
MEKYELLKDIGSGNFGVARLMRNKDTKELVAMKYIPRGLKIDENVAREIINHRSLRHHNIIRFKELGPPLLS

SEQ ID NO: 183687 - protein, 372 aa, Zea Mays
MPVSSALRSGREQSIQHKSTAFAPKMPQVRSAVTPSLAPALALPVQPLRVAAEVQSPLRHGQQAPGQVNQSGPPAGAETKKALGTTLAPVPCDSEENEDGSEFCAITLDDLFPEDAKQPETVDTKAKQPETTGPKAKQPENADPKAMHQETMDPKSKQPDTLKVGILDPKDKDMLEFDQYVASQGAHLNTDDLNKSKCTNSASQAQGLVGSQKNPLKLTPVDGKANPVTAAGRGKPVAAGVASTGKKATIPISHLAAGTPRGIVDTVNANAPIRRTLTRRAAALVPAGCQAPPPKHAIDAKGCQMTNSIATFVSSGVPASSQASTPAKDANKASPPSSSCQPKPDSVAVNGAIRAVKSVAKKGNLPAAAARQ

SEQ ID NO: 183688 - protein, 663 aa, Zea Mays
MAAAAPAAGKGKRKRHLSEDDVCLLQRYNPGTILTALQEVAQHAEGRIIDWRAVVAKSATGITSAREYQMLWRYLAYHHDLNESIEAGDLPLGDDSDLELELEPNPSETKEALSEASALAKALISRSSREQASGHRINLDVPALNTQNEKIVRVPSKQLAQSHRVTNVTCPVSNPKQLSHIVPSPTHLDPNGASKKRKKAKAWSKEEDADLAAGVQKYGEGNWEVILHKCNFDNTRTPDQLSQRWALKRPGGSTKPASTKHASVGSEERSATIKALHLAVGPMPVSSALRSGREQSIQHKSTAFAPKMPQVRSAVTPSLAPALALPVQPLRVAAEVQSPLRHGQQAPGQVNGVSGVSAVNQSGPPAGAETKKALGTTLAPVPCDSEENEDGSEFCAITLDDLFPEDAKQPETVDTKAKQPETTGPKAKQPENADPKAMHQETMDPKSKQPDTLKVGILDPKDKDMLEFDQYVASQGAHLNTDDLNKSKCTNSASQAQGLVGSQKNPLKLTPVDGKANPVTAAGRGKPVAAGVASTGKKATIPISHLAAGTPRGIVDTVNANAPIRRTLTRRAAALVPAGCQAPPPKHAIDAKGCQMTNSIATFVSSGVPASSQASTPAKDANKASPPSSSCQPKPDSVAVNGAIRAVKSVAKKGNLPAAAARQ

SEQ ID NO: 183689 - protein, 336 aa, Zea Mays
MEKLVDIVHFLHVEIQDTFGPCVGESSESQESRQTLGSAGLSLHYANIISQIDNIVSRSSVPPQSTRDALYQSLPPNVKSALRTRLITPTESQEVPITRTRSSMEKTLQWIVPVANNTARAHHGFGWVGEWANTGQGEGRRMRTGPGGVAPHPDQLQQAGKQVAEPIPRPFPDPRGPAGGGSSSSHFRAPRWAHPRRARDAAGRLHPAAVPRGREEQEPGAGGGPRQQGGAEQERQAEQERPVVAGARRQGLPAGDGQVGRRLVARRRRLRHRPDQGAGGRGGQSGRAEADAAVKLWLWVPENSGRRQQRAGGHGFRNGMGWETNNGSLSCGLLAD

SEQ ID NO: 183690 - protein, 90 aa, Zea Mays
MASGGLAAASEVAVVFLIRPVLAIAFVFTLILLSWYVAWRTVLVHVPLVQEIAGLRPKKPSKPKPANRGRFAKFYQNQAEAAQSDGQVHR

SEQ ID NO: 183691 - protein, 285 aa, Zea Mays
MRLPLLPRSPPLAAAAAAAAMPPRRRRVVKATPLKPSSPQLSSTPPPTPSVEVPKTEPPDHHDPTPSARRRLPLAAGAVEAQEEWHPLPLSTADLSLPLTLPTGQTFLWRRTSLSPLRFTGAVGSHLVSLSHLPDSDDGRLAFLLHNDGGCPASSLPAARAALLDYLNAAVSLADLWRQFAAADERFADVSARLGGGGARVLRQDPVECVFQFLCSSNNNIARIEKMVWTLAGYGERLGEVGGFVFHRFPTIERLARVSEQELREAGFGYRCWSKGRCLHCSVLP

SEQ ID NO: 183692 - protein, 273 aa, Zea Mays
MKYGRVDVTAAEQCPPEGRLPDAGPRDPAEHLREVFYRMGLDDKEIVALSGAHTLGRARPDRSGWGKLETKYTKDGPGEPGGQSWTVEWLKFDNSYFKDMKFLSQLPWKEQKEQDLLVLPTDAALFEDPSFKVYAEKYAEDQEAFFKDYGEAHAKLSDLGAKFDPPEGFSLDDDTCSSPSDEKTEEPTLVAVGAAVATATADDNNGAAPQPEPFIAANYSYGKRELSDAMKQKIRAEYEGFGGSPDKPMQSNYFLNIMILIAGLAFLTSLLGN

SEQ ID NO: 183693 - protein, 470 aa, Zea Mays
MARRRRAAILPRFPPNSQSSRARCHGGAPRRLPPPCRLAVPVRPPRNGRSRSRRLFPLPMLRPRGAAPTLPPAPLLAASDAVQLKAAREDIKELLKSTYCHPIMVRLGWHDSGTYDKNIKDWPQRGGANGSLRFDAELSHGANAGLINALKLIQPIKDKYPGITYADLFQLASATAIEEAGGPKIPMKYGRVDVTAAEQCPPEGRLPDAGPRDPAEHLREVFYRMGLDDKEIVALSGAHTLGRARPDRSGWGKLETKYTKDGPGEPGGQSWTVEWLKFDNSYFKEMKLFFLNEIQDMKFLSQLPWKEQKEQDLLVLPTDAALFEDPSFKVYAEKYAEDQEAFFKDYGEAHAKLSDLGAKFDPPEGFSLDDDTCSSPSDEKTEEPTLVAVGAAVATATADDNNGAAPQPEPFIAANYSYGKRELSDAMKQKIRAEYEGFGGSPDKPMQSNYFLNIMILIAGLAFLTSLLGN

SEQ ID NO: 183694 - protein, 368 aa, Zea Mays
MAASDAVQLKAAREDIKELLKSTYCHPIMVRLGWHDSGTYDKNIKDWPQRGGANGSLRFDAELSHGANAGLINALKLIQPIKDKYPGITYADLFQLASATAIEEAGGPKIPMKYGRVDVTAAEQCPPEGRLPDAGPRDPAEHLREVFYRMGLDDKEIVALSGAHTLGRARPDRSGWGKLETKYTKDGPGEPGGQSWTVEWLKFDNSYFKDMKFLSQLPWKEQKEQDLLVLPTDAALFEDPSFKVYAEKYAEDQEAFFKDYGEAHAKLSDLGAKFDPPETEEPTLVAVGAAVATATADDNNGAAPQPEPFIAANYSYGKRELSDAMKQKIRAEYEGFGGSPDKPMQSNYFLNIMILIAGLAFLTSLLGN

SEQ ID NO: 183695 - protein, 254 aa, Zea Mays
MDVLMSQQLNSVRPRGGFLMLAHVILLNTLSGAHTLGRARPDRSGWGKLETKYTKDGPGEPGGQSWTVEWLKFDNSYFKDMKFLSQLPWKEQKEQDLLVLPTDAALFEDPSFKVYAEKYAEDQEAFFKDYGEAHAKLSDLGAKFDPPEGFSLDDDTCSSPSDEKTEEPTLVAVGAAVATATADDNNGAAPQPEPFIAANYSYGKRELSDAMKQKIRAEYEGFGGSPDKPMQSNYFLNIMILIAGLAFLTSLLGN

SEQ ID NO: 183696 - protein, 578 aa, Zea Mays
MAETNDASPSSKLHTRLRLWEFPDCYVFEPIDGLADLYLSVSRTSGTMNLVQDLPSRGSTTKHKVQTVYGVIGVLKLAVGSYFVVITDRDCVGSYFGHAIFKVTGLKILPCNNAHNTTSTDQKKMETKFSELLDSAERTIGLHFSYDINLTLSAQRLHDLGDEYRALPLWRQAEPRFLWNGYLLEPLIENKLNQYLLPVIQGSFQNIQAEVGSEMVNVTLIARRCTRRIGTRMWRRGADAEGYAANFVESEQIMQSKGFTASYVQVRGSMPFLWEQIVDLTYKPSFDIVRQEEAPRVLERHFHDLQKKYGAVLAVDLVNTGGGEGRLRERYAKSIEPILSEDLRYVHFDFHRICGHIHFERLSQLYDQIKDYLQKHKYFLINDKGEKIEEQTGTTRTNCIDCLDRTNVTQSMIGRKILESQLQRIGVLGAGDTISKHPTFDTNYKILWANHGDAISIQYSGTPALKGDFVRYGKRTTQGILNDLRNALGRYYLNNFVDGTKQDAMDLLQGHYMTSVSRDMAVPSKAGLLQSYASFRLAFALVMGALMFMLMSLRQGSKHLLSVFLSNIIYGLNKVTIS

SEQ ID NO: 183697 - protein, 221 aa, Zea Mays
MAGMLDLMLSTNMLSVYQYKLPEPLCLLRADNNLPPWRPGLKEMFDAIICDPPYGVRAGGRKSGGRKLIKGVKGPYTVPDEKRDNHIPSTAPYSLAECVHDLLHLAARMVVMGGRLVFFYPVLRGEDGTANPQFPEHPCFKLITSSEQILSFRYSRVLLTMVKVAPYTEEIEKLAAERHREFRENHQKWMEEGNLHSAVFEPAQDGKPDRDSKPKYRGKYV

SEQ ID NO: 183698 - protein, 236 aa, Zea Mays
MRQQSVSDKLNLEPDISHWIVRSYLLHYGYQDTLNAFDMANATDRPTSRQNGNAEPPEMYGLSHRKLLRQLIMSGDIDSTFKRLREWYPQVIKDEQSVICFLLRSQRFIEYIRAEQLEVAVKYGRANLASFFTHKAFEGLLKDSVALLAYEKPTESCLGYLMDSSQREFVADAVNAAVLSTNPTVKDPESCLYSCLERLLKQLTVCSFERRAFNNYQGDAFLLHKEVQNYERSRRS

SEQ ID NO: 183699 - protein, 207 aa, Zea Mays
MRQQSVSDKLNLEPDISHWIVRSYLLHYGYQDTLNAFDMANATDRPTSRQNGNAEPPEMYGLSHRKLLRQLIMSGDIDSTFKRLREWYPQVIKDEQSVICFLLRSQRFIEYIRDSVALLAYEKPTESCLGYLMDSSQREFVADAVNAAVLSTNPTVKDPESCLYSCLERLLKQLTVCSFERRAFNNYQGDAFLLHKEVQNYERSRRS

SEQ ID NO: 183700 - protein, 203 aa, Zea Mays
MVTNQDADAAAPGAGATVDPMRLASRWRSRPEWNCASAELEAEPSELNTVNSSGLFSVVSTDKLSVKYLGSHHHGHDVGVVQADRPAPTRRAVYYFEMGVRNAGYKGQTSIGFTSESFKMRRQPGWETNSCGYHGDDGHLYRGQGKGESFGPKFTSGDIIGAGINYLSQEFFFTKNGTLVGAIPKEIKGPLYPTIAVHSYGEE

SEQ ID NO: 183701 - protein, 179 aa, Zea Mays
MTKNEERSTNIATVIRGYYGLIDTDIKLKILRELVEEAIQTSAIKEILSDRVDQKQVLNATKRENTRKDKQEKNLNTEIAMKSQENQTDDVQVGHGGVDELVRRKEENDKSNISRSRTEGKRHLVQHLETEIEKLSIRSSPLGKDRQYNRYWFFKREGRLFVETADSREWGYYNTKEEL

SEQ ID NO: 183702 - protein, 99 aa, Zea Mays
MKSQENQTDDVQVGHGGVDELVRRKEENDKSNISRSRTEGKRHLVQHLETEIEKLSIRSSPLGKDRQYNRYWFFKREGRLFVETADSREWGYYNTKEEL

SEQ ID NO: 183703 - protein, 196 aa, Zea Mays
MKVSSVTWAEYLCDFLEMTKNEERSTNIATVIRGYYGLIDTDIKLKILRELVEEAIQTSAIKEILSDRVDQKQVLNATKRENTRKDKQEKNLNTEIAMKSQENQTDDVQVGHGGVDELVRRKEENDKSNISRSRTEGKRHLVQHLETEIEKLSIRSSPLGKDRQYNRYWFFKREGRLFVETADSREWGYYNTKEEL

SEQ ID NO: 183704 - protein, 534 aa, Zea Mays
MVTRHAAGTLPPRALAATTADSQVSPVPSSVRTALLDPHWRQAMEEEYAALVANQTWDLVPHPPGTNVVTGKWIWTHKRRADGTLDQYKARWVLRGFTQRPGVDYDETFSPVVKPATVRTVLSLALARSWPVHQLDVKNAFLHGALTETVYRCQPAGFVDSSRPDMVCRLNRSLYGLKQAPRVWHSRLATFLVTLGFVEAKSDTSLFVHHHGAEAAYLLLYVDDIVLTASSPSLLRRFVDALQREFPVKDLGVLHHFLGVTAEPRPSGLLLHQRQYTLDILERAQMRDCKPCSTPVDTQAKLSEATGAPVADPTGYRSLAGALQYLTFTRPDISYAVQQVCLHMHDPREPHLAALKRLLRYLRGTVDYGLLLHRSTSSELVVYTDVDWAGCPDTRRSTSGYAVFLGGNLVSWSSKRQPVVSRSSAEAEYRVVANGVAEAVWLRQLLTELHSPLSRSTVVYCDNVSAVYLSTNPVQHQRTKHVEIDLHFVRDYVAAGTVRVLHVPTTSQFADIFTKGLPSSTFAEFRSSLNISSG

SEQ ID NO: 183705 - protein, 325 aa, Zea Mays
MGGSQYDDEWVLPSADITLVLVGKLGYGKSATGNSILGREAFVSEYSHSGVTNTCQLGSTTLMDGRTINVIDTPGLFDMSIASDDAGKEIVKCMNMAKDGIHAVLMVFSGTSRFSREDASTIETIKVFFGEKIVDHMVLVFTYGDLVGESKLKNMLNDAPEYLQNVVELCQNRVVVFDNRTKDRRLQAQQLDKLLYVVDSVCANNGGKPFTDQMFTRIKEVHDREKEVHTLGYSDEQISELKEEIHRTRDEQLAQITSMVEEKLNRTVEKLQQQLMEEQNARLEAEKVAHEAMRKSEAQIQELKERLEKARLENEEFRRMAQSSK

SEQ ID NO: 183706 - protein, 210 aa, Zea Mays
MVALFGPSVDEMNEKASHTPDFRSSVGSDRKKLKISSNRYVSRGSRNEDVHTRHSPQDYSHSKQERSSHNMNYEYRRHKRDSSAADKHRRQDVGDTNDRQFSTMGNDSKSHRHKHEERHRSDHGNGEKEDDSKTRPRKHCSVRRGSLEVGYSDWSPDFTGTDNSKGPSGEKSTSRGQVEVRRMTREGNITVETGGTAALKRVPQIQAVEI

SEQ ID NO: 183707 - protein, 231 aa, Zea Mays
MSALAAGGGAAADGAPEATAAPTRREKRRERKKERRRRARRQAAARARAAVEAEAPAVDPEEERRLLEIQEAEAAAESERALRAFEDAERRWLEAAAARAAEKAAAAAAEEDARAAEASARNKPKDGQGNQSEEDSEWEYVEDGPAEIIWKGNEIIVKKKKVKVPKGSKEKLQIQEDKAHCPFHLKTGACRFGLRCSRVHFYPDKSITLLMKNMYNGPGLALEQDEGLEVC

SEQ ID NO: 183708 - protein, 257 aa, Zea Mays
MSALAAGGGAAADGAPEATAAPTRREKRRERKKERRRRARRQAAARARAAVEAEAPAVDPEEERRLLEIQEAEAAAESERALRAFEDAERRWLEAAAARAAEKAAAAAAEEDARAAEASARNKPKDGQGNQSEEDSEWEYVEDGPAEIIWKGNEIIVKKKKVKVPKGSKEKLQIQEDKAHCPFHLKTGACRFGLRCSRVHFYPDKSITLLMKNMYNGPGLALEQDEGLETRDRLHVLSCYLQNFDLRHTVIRPVDFT

SEQ ID NO: 183709 - protein, 355 aa, Zea Mays
MSALAAGGGAAADGAPEATAAPTRREKRRERKKERRRRARRQAAARARAAVEAEAPAVDPEEERRLLEIQEAEAAAESERALRAFEDAERRWLEAAAARAAEKAAAAAAEEDARAAEASARNKPKDGQGNQSEEDSEWEYVEDGPAEIIWKGNEIIVKKKKVKVPKGSKEKLQIQEEDRPTSNPLPPQSVALAAHRREPSLSAQEVLDKVAQETPNFGTEQDKAHCPFHLKTGACRFGLRCSRVHFYPDKSITLLMKNMYNGPGLALEQDEGLEFTDEEIEQSYEEFYEDVHTEFLKFGELVNFKVCRNGSFHLRGNVYVHYKSLDSALLAYSSMNGRYFAGKQVITLFPSSSIM

SEQ ID NO: 183710 - protein, 317 aa, Zea Mays
MSALAAGGGAAADGAPEATAAPTRREKRRERKKERRRRARRQAAARARAAVEAEAPAVDPEEERRLLEIQEAEAAAESERALRAFEDAERRWLEAAAARAAEKAAAAAAEEDARAAEASARNKPKDGQGNQSEEDSEWEYVEDGPAEIIWKGNEIIVKKKKVKVPKGSKEKLQIQEEDRPTSNPLPPQSVALAAHRREPSLSAQEVLDKVAQETPNFGTEQDKAHCPFHLKTGACRFGLRCSRVHFYPDKSITLLMKNMYNGPGLALEQDEGLEFTDEEIEQSYEEFYEDVHTEFLKFGELVNFKGRGCLSERELEN

SEQ ID NO: 183711 - protein, 169 aa, Zea Mays
MTPEAEKKIGVTELRLRIGVTWFHKRANPLRMERGRIADDISERRWRAGGRREERETEERTDRSGGGETEGEGVRGCARLREEGELSMDEAFMVKPAGATLAYGDMALGWAWRLGVPTQYTVLGLGRYYGLSWWPMHDTVYGLDLVRAGSCFLVPCPGWLTVLVLYGHL

SEQ ID NO: 183712 - protein, 383 aa, Zea Mays
MEWALQCIHMHHCSEDTHMYRWNYNTLQEVQLHVSAFRTFLDIAGDNLSGKIFTEAFDAVCFPLTLFSSLFEPGWSSGSSAVSIKGLLSLLVEGGADNVNQCFLEAARFGSTELVRILLKVAYQNSLAVDTDLALVYASHYCKFKTMECLVDEGNVSSFLGPLIKAAERGCLQVVHWFVSRGVSDIEMCLALTTAASSGHFVVASYMLAHIPQQILEALSTQILKAARGQGSRPLDGVTFLLRSNFLRDAAATYEAADIIATGGTNGELPDLVAFLKEHWSQDAFAEGVSAGEMHFVNVMRVLRRGASPICLEDLPPEMVLGITYLPLYRECLSAGGQLLPQRLRGELLEAVHRLGEPVGPESQGKDLVLALERHMPSFLVGS

SEQ ID NO: 183713 - protein, 237 aa, Zea Mays
MECLVDEGNVSSFLGPLIKAAERGCLQVVHWFVSRGVSDIEMCLALTTAASSGHFVVASYMLAHIPQQILEALSTQILKAARGQGSRPLDGVTFLLRSNFLRDAAATYEAADIIATGGTNGELPDLVAFLKEHWSQDAFAEGVSAGEMHFVNVMRVLRRGASPICLEDLPPEMVLGITYLPLYRECLSAGGQLLPQRLRGELLEAVHRLGEPVGPESQGKDLVLALERHMPSFLVGS

SEQ ID NO: 183714 - protein, 237 aa, Zea Mays
MVEQGKPRSIPTKAKKSPFVEVEVDEIGQASGVVFARESPLAPKSDQGCSVSHSHGDDETHESDGCVQSQGLDEHGWVDFGHSLQLVLFSRQWSLAESLVDLADQQPMLDYGLSIALDAIWFLRTKQDLEGLNSLISKIVASGAKDFARAILRTSLLASCVAACQSKAITVGNSKEIVAERLHDRLRDCPGAEHLKIEAGAKVQKFMEWALQCIHMHHCSEDTHMYRWNYNTLQEFI

SEQ ID NO: 183715 - protein, 56 aa, Zea Mays
MAEAEATVGRLMLYSYWRSSCSHRARIALNLKGVDYEYKAVNLLKGEQSDPDDFVE

SEQ ID NO: 183716 - protein, 152 aa, Zea Mays
MSATGAGDAAAGAGARRQEGRAARILARDDWRRRIRARAGRALSLKMWFARRAMEGLGQSAVRAEGASAGEQGEARRGPRERERRRNSAQRERRSRAREKKSRGAARRKTQGGMEGARRAARRGKNQGTWRMGAPSCAGETTTLGLGLGRMH

SEQ ID NO: 183717 - protein, 520 aa, Zea Mays
MFCSCARCSWEHCFLDSVSPCTDSAPPQASKMDGFVDPFVPEQAWPQDAMFIGSSWPCAGAGATSLADPAGTYAYLGAQAAPGQGAGFHLQDGSSTALVPPLELHQQFLSAHLPGDDVTVTQEEGLGFEVNSALVAGMLGPVLSAPCAVSLADSAPVVCSSSNDSSGGSEQSGLPPPPRFLVLGEQPASWPSAFPRISSLAGEETSRSFGFGAVSDNDLVRGSSCVADVNKYPQIGNARLHVEDDVEFNTGKMLSFAPGLDFGDLQLSQKELSGLRHLNSGQQLSSFDATRNPEQSSNEASGGGTGLNAPPFMVPANGAAGNGAPKPRVRARRGQATDPHSIAERLRREKISDRMKNLQELVPNSNRTDKASMLDEIIEYVKFLQLQVKVLSMSRLGATEAVVPLLTQSQTENSGGGLLLSPRSGSGRQQQARGGSLPPPSSEVRDGAAFEQEVAQLMESDMTTAMQYLQSKGLCLMPVALASAISGQKGASSAAVQPENGGAKEMLRAVKPLASPIHGR

SEQ ID NO: 183718 - protein, 290 aa, Zea Mays
MFCSCARCSWEHCFLDSVSPCTDSAPPQASKMDGFVDPFVPEQAWPQDAMFIGSSWPCAGAGATSLADPAGTYAYLGAQAAPGQGAGFHLQDGSSTALVPPLELHQQFLSAHLPGDDVTVTQEEGLGFEVNSALVAGMLGPVLSAPCAVSLADSAPVVCSSSNDSSGGSEQSGLPPPPRFLVLGEQPASWPSAFPRISSLAGEETSRSFGFGAVSDNDLVRGSSCVADVNKYPQIGNARLHVEDDVEFNTGKMLSFAPGLDFGDLQLSQKVRIRRLLSSACLFCSPVCHM

SEQ ID NO: 183719 - protein, 253 aa, Zea Mays
MDGFVDPFVPEQAWPQDAMFIGSSWPCAGAGATSLADPAGTYAYLGAQAAPGQGAGFHLQDGSSTALVPPLELHQQFLSAHLPGDDVTVTQEEGLGFEVNSALVAGMLGPVLSAPCAVSLADSAPVVCSSSNDSSGGSEQSGLPPPPRFLVLGEQPASWPSAFPRISSLAGEETSRSFGFGAVSDNDLVRGSSCVADVNKYPQIGNARLHVEDDVEFNTGKMLSFAPGLDFGDLQLSQKRSASPELWAAALVV

SEQ ID NO: 183720 - protein, 248 aa, Zea Mays
MVSKLKNEYFLELLGYCLEDGNRMVAYQFATMGSLHNILHGKKGVQGAEPGPVLNWAQRVKIAYGAARGLEYLHEKVQPSIVHRDIRSSNVLIFDDFSSKIADFNLTNQGTDTAARLHSTRVLGTFGYHAPEYAMTGQINQKSDVYSFGVILLELLTGRKPVDHTMPKGQQSLVTWATPRLSEDKVKQCVDPKLNSDYPPKAVAKLAAVAALCVQYESDFRPNMTIVVKAITPLLNAPKPAAPAAPQS

SEQ ID NO: 183721 - protein, 252 aa, Zea Mays
MKGKGGPVDRRSSARWRLLVLCAFSFGIGMLFTDRFWTAPDTSSHTMSQRWRQEQELQLVSEDCNTKRKHGEDKDIMGEVTKTHEAIQSLDKSISTLQMELAAKRSTLELLRSSGSPVTSETNQPRKKAFVVIGVNTAFSSRKRRDSVRETWMPQGEKLQQLEEQKGIVIRFTIGHSATSNSILDKAIDSEDAQHHDFLRLDHVEGYHELSAKTKIFFSTAVGIWDADFYVKECLPLPLLGINRNQELILAA

SEQ ID NO: 183722 - protein, 179 aa, Zea Mays
MKGKGGPVDRRSSARWRLLVLCAFSFGIGMLFTDRFWTAPDTSSHTMSQRWRQEQELQLVSEDCNTKRKHGEDKDIMGEVTKTHEAIQSLDKSISTLQMELAAKRSTLELLRSSGSPVTSETNQPRKKAFVVIGVNTAFSSRKRRDSVRETWMPQGEKLQQLEEQKGIVIRFTIGHSYS

SEQ ID NO: 183723 - protein, 117 aa, Zea Mays
MYLLFLLEKNGMLLKKIHFYAHIGMLLKKIHFYAHITSQINRMVNQCCEEGCCLELFGEALAFYFVRGVVCFAGRGSGFLGSRCAYGYGAICVDWQCWHPAVRVCVSEWADLLDVPL

SEQ ID NO: 183724 - protein, 179 aa, Zea Mays
MGYQHPNSEGTMNLHFIFGSWNYSPSPCSFIQKSAVVSRERATQKKYTCRVSVLRQQLPGRGLCLSEGKALFPLPGAGVGEGHRGREPMDSNNLLAAWPVLGPGVAGAVFGAGWWFWVDAVVCSAAAVPFLHYLPGFFASFAALMFNCVNREDIGDGYYSPYDDSEWSGLIYWTCHSED

SEQ ID NO: 183725 - protein, 214 aa, Zea Mays
MGYQHPNSEGTMNLHFIFGSWNYSPSPCSFIQKSAVVSRERATQKKYTCRVSVLRQQLPGRGLCLSEGKALFPLPGAGVGEGHRGREPMDSNNLLAAWPVLGPGVAGAVFGAGWWFWVDAVVCSAAAVPFLHYLPGFFASFAALMFNCVNREDIGDGYYSPYDDSEWSSGFLFRTWCRLFRWPGQWVSWFKMRLRIRGHLRGLAVLASCSACLC

SEQ ID NO: 183726 - protein, 254 aa, Zea Mays
MMRGVGGPLLTIGDLLSDLAVDDPLVGVGDASVPSSPSAAQQAGKANPSDLSRLFEKSAVVSRERATQKKYTCRVSVLRQQLPGRGLCLSEGKALFPLPGAGVGEGHRGREPMDSNNLLAAWPVLGPGVAGAVFGAGWWFWVDAVVCSAAAVPFLHYLPGFFASFAALMFNCVNREDIGDGYYSPYDDSEWRVKLWLFISYVVSFVSLAGAVGFLVQDALTDTGPSAWTGSAGILQCVFVLVSGLIYWTCHSED

SEQ ID NO: 183727 - protein, 67 aa, Zea Mays
MMRGVGGPLLTIGDLLSDLAVDDPLVGVGDASVPSSPSAAQQAGKANPSDLSRLFEAVHIAKIQEAL

SEQ ID NO: 183728 - protein, 91 aa, Zea Mays
MMRGVGGPLLTIGDLLSDLAVDDPLVGVGDASVPSSPSAAQQAGKANPSDLSRLFEIPKCCWISVPLIFNLSGFWSVVWCRKALRLSHRCW

SEQ ID NO: 183729 - protein, 213 aa, Zea Mays
MIVSSFLPLRSSVFVLPSSAASRSRPATATLLPFPRITLSRRRRLAAAATESSSSSSEEGEGEAAGGSTNGSLPGLPPVEEEEELCPVDCVTEFKTDEEFQRHLNRSRATGALVVVDFYRPSCGSCKYIEKAFTRLCKGSGDDGAPVVFLKHNVIDEYDEQSEVADRLRIKIVPLFHFYVDGVLVESFPTRDKERIIAVIRKYTSVEPEPEPD

SEQ ID NO: 183730 - protein, 262 aa, Zea Mays
MSSRSGSTGGGSTGGGSSAGGGGAVPLAVLLRREVASERTASERPELHWGLFSQAKKGEDFTFLKPECERVPDVPSSSFSAFGLFDGHNGNGAAIYTKENLLNNILSAVPADLNREDWLAALPRALVAAFVKTDKDFQTKGTTVTFVIIDGLVITVASVGDSRCVLQAEGSIYHLSSDHRFDASKEEVDRVTECGGDVGRLNVVGGAEIGPLRCWPGGLCLSRSIGDQDVGEFIVPVPLVKQVKVSLFNSSHQLRRTALVLL

SEQ ID NO: 183731 - protein, 253 aa, Zea Mays
MSSRSGSTGGGSTGGGSSAGGGGAVPLAVLLRREVASERTASERPELHWGLFSQAKKGEDFTFLKPECERVPDVPSSSFSAFGLFDGHNGNGAAIYTKENLLNNILSAVPADLNREDWLAALPRALVAAFVKTDKDFQTKDGLVITVASVGDSRCVLQAEGSIYHLSSDHRFDASKEEVDRVTECGGDVGRLNVVGGAEIGPLRCWPGGLCLSRSIGDQDVGEFIVPVPLVKQVKVSLFNSSHQLRRTALVLL

SEQ ID NO: 183732 - protein, 302 aa, Zea Mays
MSSRSGSTGGGSTGGGSSAGGGGAVPLAVLLRREVASERTASERPELHWGLFSQAKKGEDFTFLKPECERVPDVPSSSFSAFGLFDGHNGNGAAIYTKENLLNNILSAVPADLNREDWLAALPRALVAAFVKTDKDFQTKARSSGTTVTFVIIDGLVITVASVGDSRCVLQAEGSIYHLSSDHRFDASKEEVDRVTECGGDVGRLNVVGGAEIGPLRCWPGGLCLSRSIGDQDVGEFIVPVPLVKQVKLSTAGGRLIIASDGVWDVLSPEVAFNCSRELPPVPAAEQIVKVTSFLCAAINLE

SEQ ID NO: 183733 - protein, 187 aa, Zea Mays
MSSRSGSTGGGSTGGGSSAGGGGAVPLAVLLRREVASERTASERPELHWGLFSQAKKGEDFTFLKPECERVPDVPSSSFSAFGLFDGHNGNGAAIYTKENLLNNILSAVPADLNREDWLAALPRALVAAFVKTDKDFQTKGTTVTFVIIDGLVITVASVGDSRCVLQAEGSIYHLSSDHRFDASKEE

SEQ ID NO: 183734 - protein, 79 aa, Zea Mays
MHNYEFPNTCFDPFCLTIIFYLHVNCSNYMVQMSWVRDEGGPRGSKSLVYSMMTIASRSRWCLWMLQQERSKVLLDGCS

SEQ ID NO: 183735 - protein, 267 aa, Zea Mays
MPSIAPPSSSVAALTRQPVQFFKGCSVSKETKGPVRSFFTANSKSTKVKSAGLKVASSFKNDGGYPAGGVSWKDDTLLPKSTTIRGQDHSVADPVLPMDSMITPEILSANVERVIDMFADDDTDTELDLDSPTEGFTSIAEAIEDIQQGKLVIVVDDESRENEGDLIMAASLVTPEAMAFIVRHGTGIVCVSMKEDDLERLSLPLMVTTKENEEKLCTAFTVTVDAKEGTTTGVSAKDRAKTVMTLASPDSKPEDLNRPGIGGKETG

SEQ ID NO: 183736 - protein, 377 aa, Zea Mays
MAFIVRHGTGIVCVSMKEDDLERLSLPLMVTTKENEEKLCTAFTVTVDAKEGTTTGVSAKDRAKTVMTLASPDSKPEDLNRPGHIFPLKYREGGVLKRAGHTEASVDLAMLAGLPPVAVLCEIVDDADGSMARLPKLRVFAEKENLKIISIADLIRYRRKRDRLIERASVARLPLKWGNVHAYCYKSVIDGIEHIAMVKGDIGDGQDILVRVHSECLTGDIFGSARCDCGDQLAMAMEMIEKAGRGVLVYLRGHEGRGIGLGHKLRAYNLQDDGRDTVEANEELGLPVDSREYGIGAQILRDLGVRSMKLMTNNPAKYSGLKGYGLSIAGRVPLITPITSENRRYLETKRTKMGHVYGLANAQANLANGSQSTEENH

SEQ ID NO: 183737 - protein, 457 aa, Zea Mays
MDSMITPEILSANVERVIDMFADDDTDTELDLDSPTEGFTSIAEAIEDIQQGKLVIVVDDESRENEGDLIMAASLVTPEAMAFIVRHGTGIVCVSMKEDDLERLSLPLMVTTKENEEKLCTAFTVTVDAKEGTTTGVSAKDRAKTVMTLASPDSKPEDLNRPGHIFPLKYREGGVLKRAGHTEASVDLAMLAGLPPVAVLCEIVDDADGSMARLPKLRVFAEKENLKIISIADLIRYRRKRDRLIERASVARLPLKWGNVHAYCYKSVIDGIEHIAMVKGDIGDGQDILVRVHSECLTGDIFGSARCDCGDQLAMAMEMIEKAGRGVLVYLRGHEGRGIGLGHKLRAYNLQDDGRDTVEANEELGLPVDSREYGIGAQILRDLGVRSMKLMTNNPAKYSGLKGYGLSIAGRVPLITPITSENRRYLETKRTKMGHVYGLANAQANLANGSQSTEENH

SEQ ID NO: 183738 - protein, 79 aa, Zea Mays
MIPVLMNAVGGILVGLVTTYAGGVRKGFVIVSALLVTALLQFIFDGKPPSLYCLIALPLVASSIFIYQKHPYVDRKKKD

SEQ ID NO: 183739 - protein, 347 aa, Zea Mays
MGSSSAPAAAAAAAPSRRKVALYLALLTLQYGAQPLISKRFVREDTIVTSLVLATEAAKVICAIILLIAEGSLKKQFSNWTLTGSLTASGLPAAIYALQNSLLQVSYKHLDSLTFSILNQTKLLWTAFFTFLILGQKQSSRQVLALALLIGAAVLLSVGESSSKGSKGGGSDYILLYGIIPVTVASVLSGLASSLCQWASQVKKHTSYMMTIEMSFIGSMCLLASTYRSPDGEAIRKYGFFHEWTFWTVQKLQWIFIDVWDPNHHSLPQIPVLMNAVGGILVGLVTTYAGGVRKGFVIVSALLVTALLQFIFDGKPPSLYCLIALPLVASSIFIYQKHPYVDRKKKD

SEQ ID NO: 183740 - protein, 244 aa, Zea Mays
MAKLARSPTTSPPAAAADKHRSAAGSGLRSLASAASGWWDRWTVIGSGLSKLERAFGDQFPEGERYFGLENFGNTCYCNSVLQALYYCAPFREQLLEYYRRNRNLEDAEENLLTCLADLFSQISASKKKTGVIAPKRFIQMVRKLNEYFRGYMHQDAHEFLNFLLNEIVDILEKESSSAKDSPGTTSSENVSNGAAVDGVRKEPLVTWVHKNFQFARSREENEDKKGATNISDPPKALQVHRAA

SEQ ID NO: 183741 - protein, 612 aa, Zea Mays
MNRRTSDTVVLTMDGANSDALYSLRQSLKDANNVLQSWDPTLVNPCTWFHVTCNNDNSVIRVDLGNAQLSGVLVPQLGQLKNLQYLELYSNNISGTIPPELGNLTNLVSLDLYMNNFSGNIPDSLGNLVKLRFLRLNNNSLVGPIPVSLTNISTLQVLDLSNNNLSGQVPSTGSFSLFTPISFANNPNLCGPGTSKPCPGAPPFSPPPPFNPPSPPTQSTGASSTGAIAGGVAAGAALVFAVPAIAFAMWRRRKPEEHFFDVPAEEDPEVHLGQLKKFSLRELQVATDNFSNKNILGRGGFGKVYKGRLADGSLVAVKRLKEERTPGGELQFQTEVEMISMAVHKNLLRLRGFCMTPTERLLVYPYMANGSVASRLRERQPSEPPLSWEPRRRIALGSARGLSYLHDHCDPKIIHRDVKAANILLDEDFEAVVGDFGLAKLMDYKDTHVTTAVRGTIGHIAPEYLSTGKSSEKTDVFGYGIMLLELITGQRAFDLARLANDDDVMLLDWVKGLLKEKKVEMLVDPDLQKAYEEVEVESLIQVALLCTQGSPLDRPKMSEVVRMLEGDGLAERWDEWQKVEVVRQEAESAPLRNDWIVDSTYNLRAVELSGPR

SEQ ID NO: 183742 - protein, 59 aa, Zea Mays
MRAARCRASPLACLAVCRRCKTAIYFRASKNRQSSLATNGSNSSSSTRLKILSICLVKA

SEQ ID NO: 183743 - protein, 59 aa, Zea Mays
MRASRCRASPLACLAVCRRCKTAIYFRASKNRQSSLATNGSNSSSSTRLKILSICLVKA

SEQ ID NO: 183744 - protein, 77 aa, Zea Mays
MSLFSHIFLLNVPFMVLLIAQGRVNVAAEYYKQQVEMLEGFSEMGAFTDHAFLPVMSKVCYIWTFCLNIREGNLCGC

SEQ ID NO: 183745 - protein, 80 aa, Zea Mays
MDKPSLTQNRRGSMVRHITLEVDCFFLYFLEGRFIFGRLAQALAQVYDILNHFVCSHARRRQRNCTQQALDIQGPRAYLI

SEQ ID NO: 183746 - protein, 122 aa, Zea Mays
MGVVRRLLLRYQWRLTAMEDLSIEAKEAAVRIPHPPCGGLPPSTHPPHPLSSPSIASSSYYRKYKEDMLMVSMMEGPRRTEKPTGVIFRKVCFYSWIKTHLASRVVVHRVLKADRKLWLAAG

SEQ ID NO: 183747 - protein, 194 aa, Zea Mays
MDKPSLTQNRRGSMVRHITLEVDCFFLYFLEGRFIFGRLAQALAQVYDILNHFVCSHARRRQRNCTQQALDIQAQGRVNVAAEYYKQQVEMLEGFSEMGAFTDHAFLPVMSKEEHEKVIRSEPLAIWLSNIANMVLFAAKVYALVRSGSLAIIASTLDSLLDFLSRYILWFTAFSMQTPNPYRNPIGKSVCSRW

SEQ ID NO: 183748 - protein, 82 aa, Zea Mays
MGIQLRFRLSPSAVVSPPRATCVPLPFLRFDGQATCWPRMALRPAKHPSSLSPGGPAPRRLYRARSARSPPIGNRCTLPQLL

SEQ ID NO: 183749 - protein, 266 aa, Zea Mays
MSSSSTSSCHGSGNPSPPAAAGAVSVAAAAAGPAAWPRRQCRDVFWLVVFLLHLLVFGAALALFGLNRFHQADRFNIGRYANLTAEPWGTPAGPPDPAPAPPPPSVYRSEDPSVPPSELTETYWKYYGAAGAVGAALACAWLAAAAWRKDGGKVVMRTAVHCLTAYLAVVSVLCFWGKHFFWGVALAVGAGLHFLYVMSVLDRFPFTMLVLQKAVRMVRELPDVMRIAYAFVLVMLCWMALWSFGISGIVAFGIPNGGQWWLLLVS

SEQ ID NO: 183750 - protein, 413 aa, Zea Mays
MSSSSTSSCHGSGNPSPPAAAGAVSVAAAAAGPAAWPRRQCRDVFWLVVFLLHLLVFGAALALFGLNRFHQADRFNIGRYANLTAEPWGTPAGPPDPAPAPPPPSVYRSEDPSVPPSELTETYWKYYGAAGAVGAALACAWLAAAAWRKDGGKVVMRTAVHCLTAYLAVVSVLCFWGKHFFWGVALAVGAGLHFLYVMSVLDRFPFTMLVLQKAVRMVRELPDVMRIAYAFVLVMLCWMALWSFGISGIVAFGIPNGGQWWLLLIFSVSLFWTGAVLSNTVHVIVSGMVFLVLIHGGPAAATMPPKPLLKSLQYAVTTSFGSICYGSLFTAAIRTLRWEIRGIRSKIGSNECLLCCIDFLFHIVETLVRFFNKYAYVQLMDRVSIAQLGMLGSCFNPQASNHLLLMTVQVLSF

SEQ ID NO: 183751 - protein, 390 aa, Zea Mays
MSSSSTSSCHGSGNPSPPAAAGAVSVAAAAAGPAAWPRRQCRDVFWLVVFLLHLLVFGAALALFGLNRFHQADRFNIGRYANLTAEPWGTPAGPPDPAPAPPPPSVYRSEDPSVPPSELTETYWKYYGAAGAVGAALACAWLAAAAWRKDGGKVVMRTAVHCLTAYLAVVSVLCFWGKHFFWGVALAVGAGLHFLYVMSVLDRFPFTMLVLQKAVRMVRELPDVMRIAYAFVLVMLCWMALWSFGISGIVAFGIPNGGQWWLLLIFSVSLFWTGAVLSNTVHVIVSGMVFLVLIHGGPAAATMPPKPLLKSLQYAVTTSFGSICYGSLFTAAIRTLRWEIRGIRSKIGSNECLLCCIDFLFHIVETLVRFFNKYAYVQVSMFISSVVFKM

SEQ ID NO: 183752 - protein, 287 aa, Zea Mays
MVLWNFWHCCLWHTKWWAMVASFGELIFSVSLFWTGAVLSNTVHVIVSGMVFLVLIHGGPAAATMPPKPLLKSLQYAVTTSFGSICYGSLFTAAIRTLRWEIRGIRSKIGSNECLLCCIDFLFHIVETLVRFFNKYAYVQIAVNGQSFNRSARDAWELFQSTGIESLVAYDCSGAILLMSTILGGLITGTCMGVWTYFKQSDKAVMVGSTSMLMGMILVGLTVVVVESAVTSIYICYAEDPLLIQRWDPEFFEQMSEALHQRLQYRSARARQILNGRLDHLPHTSSI

SEQ ID NO: 183753 - protein, 525 aa, Zea Mays
MSSSSTSSCHGSGNPSPPAAAGAVSVAAAAAGPAAWPRRQCRDVFWLVVFLLHLLVFGAALALFGLNRFHQADRFNIGRYANLTAEPWGTPAGPPDPAPAPPPPSVYRSEDPSVPPSELTETYWKYYGAAGAVGAALACAWLAAAAWRKDGGKVVMRTAVHCLTAYLAVVSVLCFWGKHFFWGVALAVGAGLHFLYVMSVLDRFPFTMLVLQKAVRMVRELPDVMRIAYAFVLVMLCWMALWSFGISGIVAFGIPNGGQWWLLLIFSVSLFWTGAVLSNTVHVIVSGMVFLVLIHGGPAAATMPPKPLLKSLQYAVTTSFGSICYGSLFTAAIRTLRWEIRGIRSKIGSNECLLCCIDFLFHIVETLVRFFNKYAYVQIAVNGQSFNRSARDAWELFQSTGIESLVAYDCSGAILLMSTILGGLITGTCMGVWTYFKQSDKAVMVGSTSMLMGMILVGLTVVVVESAVTSIYICYAEDPLLIQRWDPEFFEQMSEALHQRLQYRSARARQILNGRLDHLPHTSSI

SEQ ID NO: 183754 - protein, 87 aa, Zea Mays
MPLPLQRRAVRLAYEAIVAMPRLDSKRLALALKKEFDTAYGPAWHCIVGTSFGSYVTHSLGGFLYFSVDKAYILLFRTAVEPLAHPR

SEQ ID NO: 183755 - protein, 190 aa, Zea Mays
MVSLTLRVLSRPDVEHLPDIFTSLGLEYDEKVLPSIGNEVLKAVVAQFNADQLLTERPHVSALVRESLTKRAREFNIVLDDVAITHLAYGQEFAQAVEKKQVAQQEAERSRFLVARAEQERRAAIVRAEGESEAARLISEATTTAGNGLIELRRIEAAKEIASVLSRTPNVSYIPAGDNGQMLLGLNAAR

SEQ ID NO: 183756 - protein, 469 aa, Zea Mays
MRPPACLDARGPRAHECVPARGGQLALLYAALYTVAAGAGGLKANVSGFGSDQFDGRDPREERAMVFFFNRFYFCVSLGSLFAVTVLVYVQDNVGRGWGYGVSAVAMALAVAVLVAGTPRYRYRRPQGSPLTAVGRVLAAAWRKRRLPLPADAAELHGFAAAKVAHTDRLRWLDKAAIVEAEPAGKQRASAAAASTVTEVEEVKMVAKLLPIWSTCILFWTVYSQMTTFSVEQATRMDRHLRPGSGAGGFAVPAGSFSVFLFLSILLFTSLNERLLVPLAARLTGRPQGLTSLQRVGAGLALSVAAMAVSALVERKRRDAANGPGHVAVSAFWLVPQYFLVGAGEAFAYVGQLEFFIREAPERMKSMSTGLFLVTLSMGFFLSSLLVFAVDAATAGTWIRNNLDRGRLDLFYWMLALLGVANFAVFVVFARRHQYKATSLPASVAPDGTGHKEMDDFVAVTEAVEGVDV

SEQ ID NO: 183757 - protein, 118 aa, Zea Mays
MAVGLAPARRSRPNGASAGSSGGARGGCPATGRALRRPWWHAGTTSPADRVCCPRPARVRGPQRATGSPGGAGAGESPSAAWVCVPRRARSASVAWPRQAISAWSSSRQREVALSRGL

SEQ ID NO: 183758 - protein, 479 aa, Zea Mays
MMVLTSVATTSFAILLLFSLPSCLHLRATPFSAEGVGACASSPYSFDTSPDTDSRSGYCTSTRTFHIMRAPSFSPSSDVPFVFPAFATFFLPNLLPPPTVATASRPTLVDAGKVKNRFRTSRGTEASAVPHSGSPPRLPERFAAQSLRIGFNPVDLSARRRHGTPEVAFDSAGAVEAGMGLGEAAGRLLAAVDWEREAYPAYDDFLALPAFVLFFPTVRFLLDRFVFKGHQRANNDTEEARKKIRKFKESAWKCVYFLSGELLSLSVTYNEPWFTNTRYFWVGPGEQVWPDQKIKLKLKAVYMYAAGFYTYSIFALMFWETRRSDFGVSMSHHVATVVLIVLSYVFRFARVGSIVLAIHDASDVFLEVGKMSKYSHCDWLANVSFLFFVISWVLLRLTYFPFWILRSTSYEVLLTLDKKKHNFDGPIYYYVFNSLLFSLLVLHIYWWVLIYRMLVRQIKTRNVGDDVRSDSEGEDDHED

SEQ ID NO: 183759 - protein, 499 aa, Zea Mays
MTRKMVEDKSSSQDTVQKSGHAVLGNVSYDKDVVEIKLADAIDSDNYVGNFVKDVCVDDGALLHRTASEEKPVDRRSSLDLSCQMIGADSDISYYGKEDHSRTSAHELKPEAVALAPLCNIGADSGREYDLEDRTGTGSIAGSPGEKKISLQELLLLESAEESRNTGAVNSESSEKHKCPLNEEEAAQTSKDGDPDAETVLANTFEHISDGISSKEKGSGCPATMARDQVDTATALDVREPQKLDRYNPSVDRRSREYTSVPECSIPGITDAASSTGSICSFHNATSSTATAGLGEGETLEPGADTLSAGSSDIGSSEKSHDNHSGSMFSKPIAGAYGNGKKQEKHGQMDEEHGIGTADDAAASTSSASTLAQDGSAPAVQETVPGSSSSSSRPAARAGDDPDLSGPSIMSGPVSMSGHIAYSGNVSLRSDSSTTSTQSFAFPGCRGSGPAAPSGWRRQSAGAAVDGIASGGKGSSAVNSDRPWRAALPSYLKSSHLLS

SEQ ID NO: 183760 - protein, 226 aa, Zea Mays
MACPNLLKAAVLSTMTLLSVPLEASAEMCQPPSSFANMPIFIVVALIGAAVGGLLARQRKAELKRLNNQLRQINAALRRQAQIESFAPGLTYAPVGRTNETDVIVDPRKQQLVTNLRNGKNYMRNQDLDKAIVEFRTALELAESIGDRFEEKKAARGLGASLQRLGKYREAMRQYSKVLELSKETGEDSGCTEAYGAIADCYTELGDLERAAKVYDKYISRLQPGE

SEQ ID NO: 183761 - protein, 297 aa, Zea Mays
MLRKNPEHRPTAGELLRHPHLQPYLSESSNCSPIYLPVKPTKGNLVDKQSKKPSSGRKRAVKANGSNGTLETAAEHAVEARDSSTNFSDVSTIGTQEALILQMPVDPDAGSKEEQNVDVVPFQHAAENLMATTDRQVDATIRLKAIRTSNAKEAAPVTVADQKFNEAPIPNEELTIGVVQEQRKDVKPRSYQAGKPEMCDTTVTEESSPISTLKLAHTESAPAEWDHLNIVQQRADALESLLELCAKLLEQERLDELAGVLRPFGEGAVSSRETAIWLTKSLMTPPPKFGESPTKLL

SEQ ID NO: 183762 - protein, 503 aa, Zea Mays
MEQYEVVEQIGRGAYGSAYLVLHKAERKRYVMKKIRLSKQNDKFQRTAYQEMSLMASLSNPYIVEYKDGWVDEGTSVCIVTSYCEGGDMAERIKKARGILFSEERVCRWFTQLLLALDYLHCNRVLHRDLKVVGTPNYMCPEILADIPYGYKSDIWSLGCCMFEILAHRPAFKATDMAALVNKINRSSISPMPPIYSSALKQIVKSMLRKNPEHRPTAGELLRHPHLQPYLSESSNCSPIYLPVKPTKGNLVDKQSKKPSSGRKRAVKANGSNGTLETAAEHAVEARDSSTNFSDVSTIGTQEALILQMPVDPDAGSKEEQNVDVVPFQHAAENLMATTDRQVDATIRLKAIRTSNAKEAAPVTVADQKFNEAPIPNEELTIGVVQEQRKDVKPRSYQAGKPEMCDTTVTEESSPISTLKLAHTESAPAEWDHLNIVQQRADALESLLELCAKLLEQERLDELAGVLRPFGEGAVSSRETAIWLTKSLMTPPPKFGESPTKLL

SEQ ID NO: 183763 - protein, 112 aa, Zea Mays
MPCGLQRGNKSLRGKSTCRKQVCSFIPKGAFLCSPSTQSHHNCWYTVLIVAHVITKVQEYQKSRALMTCRFLHAASSIVHLQNHNGVCSSPSCIKELCAACKPCFAGALDTH

SEQ ID NO: 183764 - protein, 91 aa, Zea Mays
MPCGLQRGNKSLRGKSTCRKQVCSFIPKGAFLCSPSTQSHHNCCSHRCSCYHKSTRVSEIQSLDDMPFPPRSIFNRASAESQWCLFISIVH

SEQ ID NO: 183765 - protein, 85 aa, Zea Mays
MDKMTLIEVGPRFCLNPIKIFGGSFGGPTWYENPYYISPNQIRALEKRQKAGKYAKKVKAKVRRKMHEMENTLEPDEFAELWKGE

SEQ ID NO: 183766 - protein, 294 aa, Zea Mays
MAKKRKHTDAQAETAGAEKPDDSAPARPERTLFGFKDPAPDAVPDSAASRAAVAPFRNREKKDSKVESKQSKGNALNEMLELRSCSSCLFFECRKQKDLYLWMVKSPGGPSVKFLVNAVHTMEELKLTGNHLKGSRPLLTFSTNFDEQPHWKLVKEIITHIFATPKDHRKAKPFHDHVFVFSIVDGHVWFRNYQISVPHNEIDKVDKGGMDKMTLIEVGPRFCLNPIKIFGGSFGGPTWYENPYYISPNQIRALEKRQKAGKYAKKVKAKVRRKMHEMENTLEPDEFAELWKGE

SEQ ID NO: 183767 - protein, 329 aa, Zea Mays
MDKIQSDCPYPGCFFCVMKEANPSKRRASVLKFFRELPSQDDDGQVLPVSGLWNTAMAHPNDPEFINLGIFECMAALIWKGLKNRRWLAHDQNIYVPYYAAHIIGSYTMNMEEFAECAVRAGVIPPLVELLRGRLTWVEQRVAVRALGHLATYPSTFPAVADNGEVLELATQLASSSLEIVYTHFYQFVDRRLDYHCGLLTRGMGGVEMESRKAEEWASQLQCWSLQLINCFAFKPEFLHDICKPDFLVKLPGMWGGLVNENSPAGVGLLRTICQSKVGRGDAANIPGTIDALCNIARSSDDWQYMAVDCLIWLVQDASTCHKTKLRQH

SEQ ID NO: 183768 - protein, 813 aa, Zea Mays
MSDWSSPAAPTFFPFGPQAEGWDVTFKVKYGDTLKRFYGCANGSHFDMNLSALRARIDTAFKFALRQRLNPLRITVQLKKNQPTEKKDTSAPVKSAAQDPLSQLMSAIEGLKPVQEDSLAHIKSAIGEAIKSIPEPIPDALAKLSHEILDAAPPPLAELMKPFAQLMAPNNNGNGPSDVHAEGSSSSSSAQVPAEAKNEPKVRPSLGLKTVLKEAAGPVPNAGASQVQQPLMYPSVEEMLFPCNSVDKSVCKGKIDAQSKGKSVTSSGIQPAPHSLRTHAPPPPHPCISEWSRAQRSQHRQLKFEDNAKATNDSRWRIPMYKMPYAPPPPAVPPPGYVPSPHFPYPGRLLSSGHPYGDLAGNMENSAPHSLHRWIQCDGCGAQPIVGPRYKSNVKEDYDLCDSCFQRMGNEMEYTKIDKPILPHRFLRDPHVYRKVHHPRVLMKSRREKLESRFILDVTVLDGTLMTPSTPFTKIWRMHNNGSVVWPRGTQLVWVGGDQFALQTSVPLEIPVDGFPVDKEIDVPVDFVAPTRPGRYISYWRLASPSGQKFGQRVWVHIQVEDPSFVNDNNRNAAINLNLPPESYSSNTTNLIDVNIEPADSALSAHAKRTKEFHFCSTDFPEPSKSVPFTLATTSLSAAAPTNQTGDVPMSSTPAAACLPSVNVPMHEVVTTHTPSPITPVLPTTIHFSAPVSAPAIAPELASGAVGVPPPVSAVVPELSELDVHNEEKLLRELEEMGFRQVDLNKEILRQNNYNLEQSVDDLCGVNEWDPLLAELEEMGFDDTEMNKELLAKNEGSIKRAVMELIAREKKDK

SEQ ID NO: 183769 - protein, 828 aa, Zea Mays
MIWILFCGIIVKIVKYGDTLKRFYGCANGSHFDMNLSALRARIDTAFKFGPDVDFVLTYTDEDGDIVMLDDDDDLRDAALRQRLNPLRITVQLKKNQPTEKKDTSAPVKSAAQDPLSQLMSAIEGLKPVQEDSLAHIKSAIGEAIKSIPEPIPDALAKLSHEILDAAPPPLAELMKPFAQLMAPNNNGNGPSDVHAEGSSSSSSAQVPAEAKNEPKVRPSLGLKTVLKEAAGPVPNAGASQVQQPLMYPSVEEMLFPCNSVDKSVCKGKIDAQSKGKSVTSSGIQPAPHSLRTHAPPPPHPCISEWSRAQRSQHRQLKFEDNAKATNDSRWRIPMYKMPYAPPPPAVPPPGYVPSPHFPYPGRLLSSGHPYGDLAGNMENSAPHSLHRWIQCDGCGAQPIVGPRYKSNVKEDYDLCDSCFQRMGNEMEYTKIDKPILPHRFLRDPHVYRKVHHPRVLMKSRREKLESRFILDVTVLDGTLMTPSTPFTKIWRMHNNGSVVWPRGTQLVWVGGDQFALQTSVPLEIPVDGFPVDKEIDVPVDFVAPTRPGRYISYWRLASPSGQKFGQRVWVHIQVEDPSFVNDNNRNAAINLNLPPESYSSNTTNLIDVNIEPADSALSAHAKRTKEFHFCSTDFPEPSKSVPFTLATTSLSAAAPTNQTGDVPMSSTPAAACLPSVNVPMHEVVTTHTPSPITPVLPTTIHFSAPVSAPAIAPELASGAVGVPPPVSAVVPELSELDVHNEEKLLRELEEMGFRQVDLNKEILRQNNYNLEQSVDDLCGVNEWDPLLAELEEMGFDDTEMNKELLAKNEGSIKRAVMELIAREKKDK

SEQ ID NO: 183770 - protein, 100 aa, Zea Mays
MKPRAPSSKKAESGGRKRVHRERELWFIVVASAGLVRGASPKCLRLRRGGVRLGESLERDKLLTGTTKPSHDVESSIAAIITRHYQVPPEKDCYDEFGEV

SEQ ID NO: 183771 - protein, 90 aa, Zea Mays
MKPRAPSSKKAESGGRKRVHRERELWFIVVASAGLVRGASPKCLRLRRGGVRLGESLERDKLLTGTTKPSHDVESSIAAIITSTTGERLL

SEQ ID NO: 183772 - protein, 395 aa, Zea Mays
MARSWLITCRGIAKKIRYTNPGANHHISELVAEARRECPNCSYIIDNSDVAMQWPGLPAGVKFDPSELELLEHLEQKVGLGDSRPHVLIDEFIPTIDNDEGICYSHPENLPDGSNAHFFHRVSKAYGCGQRKRRRTINCSDHTVSDEHVRWHKTGRSKAIYENGVIKGWKKIMVLYKISQRGRKPDRANWVMHQYHLGEEEDEKDGELVVSKIFCQLPNKSMEISETETAYEEPGAPASVIGPKTPKTVTPQPRHPKNSPCETEQSIFILQDQLLLDGEDEPTMPIVSLADDAMNPAWCAVAEEEQVVGEASRAQSNSDEPLLCREDPNSLNDEALLPWDYPILSQCRSEIFDRNLNGYGLPDLHNVDLGTPPDLQLADFQFGSQESLGSWLDRI

SEQ ID NO: 183773 - protein, 95 aa, Zea Mays
MVPWMPAPLLAAPAFLLALPPAMDTVGPPVPISPHPHPLAAAPSYSWWLSLLPWTPIAAAHSFCSPWMKAQASAPPLGFLQSQQHVEPLQPRKFR

SEQ ID NO: 183774 - protein, 119 aa, Zea Mays
MANASPQWLTLAHLPTSLPLPRPAMAIAFDSPTSSPAEIPALKYARFCCLDLVPLLSPRFCHHRHQLRAFPPLLPPRRGLLCVTPLELAILLPARLRGACETVPVAAETRHGDMEGLQN

SEQ ID NO: 183775 - protein, 185 aa, Zea Mays
MPASSEAAGALGGGGDVEQDYEIRNDEGFVYKVPRGLYHEAAPSTTQSAAGTDPKAAGLRRRCRALLRLRAKRLRDLSRWEALASELFAPLSAPQPPAPPSQAPPASSHSVAASSSSSPTSVLDELLAQVDIQAELMKKVHQWCDEANAICDAGESAIVASMVALPLWGGNPADLVTWMDRVGAK

SEQ ID NO: 183776 - protein, 78 aa, Zea Mays
MYSKYLFRHLIEHLARMVHQQQLASNSSRSHVSSPPFALPQLHHSYPTWTDFLLSGLGRRARAKATFTAANIREIGKP

SEQ ID NO: 183777 - protein, 234 aa, Zea Mays
MLKKKFRVDGSGYTTGARHGQQTLPRFNCRGRLVPVQSTFPSSSPTPPAAEPQPARMGNIFVKKPKITEVDRAILTLKTQRRKLAQFQQQLSDIELASKQKAVFESLKAGNAALKSIQNEINIDDVQKLMDDTAEAKAYQDEINAVLGEQLSAEDEEAVMAEFENLEAQLAVESLPDTPVTEVRPEEKMKAPADTEAVPEDIDEAIELPDVPMKAPERPEAPEKTKVLEEPLPA

SEQ ID NO: 183778 - protein, 144 aa, Zea Mays
MLKKKFRVDGSGYTTGARHGQQTLPRFNCRGRLVPVQSTFPSSSPTPPAAEPQPARMGNIFVKKPKITEVDRAILTLKTQRRKLAQFQQQLEKVIEAEKEAARQLVQQKKRDRALIALKKKKAQEELLKQVDTWQMNVEQQILN

SEQ ID NO: 183779 - protein, 168 aa, Zea Mays
MMTCKMNVRLSSSRTPCRRVDGFLSPSPESVLFSTSSHLPCTMHIHYPLEITHALSGLRSSHGPPASSFFFSFMPFTCCCTPVPKRTWSTYISRDETLAATESCAVPSCCVGTNTNCARLQLVHIDAHQKETKRDLFLYTTLMCGNPSALHLPAQGNVARLAAGAVAD

SEQ ID NO: 183780 - protein, 94 aa, Zea Mays
MRQFSSLHQVPLYVATKMASIRKSSFMVPSADTYARAAVRHIGYEPRCTPYWPHSVVWFLISILPESLIDSVRLGMCIKIRKKGLAKDAKKKAL

SEQ ID NO: 183781 - protein, 85 aa, Zea Mays
MILLLRGKKKIGMLTNSQDASMLSTRARVLMCNARCPYTWRQRWHPSGSLPSWSHLLTPMLVLPFVTLDTSLGAHHTGHTLSCGS

SEQ ID NO: 183782 - protein, 263 aa, Zea Mays
MAGTCAHVEFLRAQPAWALALAAVGLLVAVRAAARFALWVYAAFLRPGKPLRRRYGAWAVVTGATDGIGRAVAFRLAASGLGLVLVGRNQEKLAAVAAEIKARHPKVPEVRTFVLDFAGEGLAAAVEALKDSIRGLDVGVLVNNAGVSYPYARYFHEVDEELMRTLIRVNVEGVTRVTHAVLPAMVERKRGAIVNIGSGAASVVPSDPLYSVYAATKAYVDQFSRCLYVEYKSKGIDVQCQVTNLSLHRMYLVSNYQPFIQLS

SEQ ID NO: 183783 - protein, 212 aa, Zea Mays
MSYRTLSIISTGSIEKTSSPDEISKCKNSMMETAHNVNGKGTTAQFETKMDQAEPARSGVRSKICNSVVPANESEHRSTKQEGRMSSNREVPESLLPTKDEIPEPDHHSPPEINFQLCIPDTTQKWLDLSKSLSNAVRRQRRHDYDVIMLKDPKKRLWPVVYHDSLLFVGFTAGWKHFVASNDLRAGDVCELVKEPDDGEPVYSVRMSDHKI

SEQ ID NO: 183784 - protein, 183 aa, Zea Mays
MSYRTLSIISTGTTAQFETKMDQAEPARSGVRSKICNSVVPANESEHRSTKQEGRMSSNREVPESLLPTKDEIPEPDHHSPPEINFQLCIPDTTQKWLDLSKSLSNAVRRQRRHDYDVIMLKDPKKRLWPVVYHDSLLFVGFTAGWKHFVASNDLRAGDVCELVKEPDDGEPVYSVRMSDHKI

SEQ ID NO: 183785 - protein, 483 aa, Zea Mays
MASTRSSSLPSRGATDGEKRLEALALGRVAEAADAVASAACAGEVVRAIHAVASLLFPVDSEAVAGTVEEPFRSQILDAVTVTLSNEERESWRHAFYHGPAFPTMSKILLGNVALKWLPKINVSARQEIYDSFFVKGPPTEVIQALVPALSEKEFSKEDHQTFCLNLERLLILWLLDNKGVFQIVVDFICSKKHGEDILSPDKTISVSRVAQLLASVPDKARLGASAALTSPSFFKHVVSQLLAGAEATTIELAADKEANEHYVLSSMFHFVGEVLSRVCRRGSTGVLVAELIPKVRNHIHRCVPPDHRATIPEMVQHVCQSQFWFNMVEAMRDQHSIERLTEELLRQLASQHISDEEAYWILWTLFNQSFKRLTVMRAMFVDKFLLWKTFPLCCLRWILHYAVFECPPNSTTEILMQRTPNFFGILQSLVSIWSRKEFIQSYSVEQQAYITAAIGLCLEKLTKKELETTKDVLNSILQGVSC

SEQ ID NO: 183786 - protein, 189 aa, Zea Mays
MQQQRRAPLLPKIEDDGNPRFVIFIRTANVYFWYPLNIITGGTTAKIMLAAKDNFLGKYIYKDTLARNLAAVIYKDEDVIIDTAKEQYRVLKTENQFRYGYKVVEKGNIRSALTTSNVIELPKKDELKTVVDKVKDFFGDVTAGAKESFAQRRRNDSVSHTSKAPAVVSLSMSENCSVISPASFFLFVL

SEQ ID NO: 183787 - protein, 258 aa, Zea Mays
MDHQVGLLDIDICGPSIPKMLGLEGQDIHQSNLGWSPVYVESNLGVMSIGFMLPNPDDAVIWRGPRKNGLIKQFLKDVDWGEIDYLVVDAPPGTSDEHISIVQYLQATGIDGAIIVTTPQQVSLIDVRKEINFCKKVGVPVLGVVENMSGLRQPLSDLRFIKSDEAGKTDATEWALNYIKEKAPELLSVMACSEVFDSSKGGAEKMCHEMGVPFLGKVPMDPQLCKAAEEGRSCFADQKCSASAPALRNIVKKLIKAE

SEQ ID NO: 183788 - protein, 712 aa, Zea Mays
MVVNAEQICDPLAPGHMTPTVLMEFGQQRPMKRGYEEMVFRAASSRGYAETVGESGVAAGSPLRVDSEDSSVPKRKCISLNSVGFDVKREILVPSKMSSSERRYLRKRFRAELDSVRDLLKKPEFAAPVPLNRAPALSSSAAPRAKKPQKSQRGGTNVIRGAKGRFLPTKPRPETSTVLSEAAAFKQCEAILKKLMTQKYSHIFNVPVDIVKLQIPDYFDIVKTPMDLGTVKKKLESGSYTSPSDFAADVRLTFNNAMAYNPRGHAVHDMAIQLNKMFESRWRPIEKKLASAATEKHVEVDRADSKRRKTPPVDRSDVSMECARQTEPETPKMTAEEREAFGNCLASISDELPPHIFELLQQCIDSNADLSGDGEIEIDIHAVSDDLLFELKKHVDKYLQEKEQSQQVKSEPSENEAVNVSGLSHSSTNPCKGGEPIEEDVDICGNASPIMLDKDAQIRNSKCGSPSSSSSDSESSSSDSDSGSDSESESEKVGSPGKLAKGTKKPDQLVEQEKSDVISPADANRPAAIVGLHGEDSESKPAPGGENSEPDTQVSPDRLLRAALLRSRYADVIVKARGILSQGGDKQEELEKLQKEEKERLLAEGTAAMEACRAEAEAEKKRKRNFEREKARQALQEMERTVEINDNLHLKDLELLGTATTEHIVSSVDETSPERSHDGMAGYHPGAVNPLEQLGLFIKVDDEEDDEQCSLH

SEQ ID NO: 183789 - protein, 112 aa, Zea Mays
MAACSSRSRRQRSTHCHCQHPVAATKSAMGVPPSSSLLPLFCLESSRRGGAPPAPRDQHPHSCRSAADQRQRYRSHSLCARVRLQQALYPSLQTFKASSNRCLSKLQGLKAP

SEQ ID NO: 183790 - protein, 121 aa, Zea Mays
MQDLSAFRSVKKAMISYAPLFFHLLLHQGVRALHVSLDPPSRKSWHEFLHLGQRNFTEPLMVQGISSRYALYRRNKSIKDMQNVYKRIRWCTRECILPSQGHMPATYLAGQTQLLTRSSLP

SEQ ID NO: 183791 - protein, 752 aa, Zea Mays
MATGVAPAPLPHVRVHHGGVGFTRSVDFAKVLSAPGAGTMRASSSRGRALVAKSSSTGSETMELEPSSEGSPLLVPRQKYCESTHQTRRRKTRTVMVGNVPLGSDHPIRIQTMTTSDTKDVAKTVEEVMRIADKGADLVRITVQGRKEADACFEIKNTLVQKNYNIPLVADIHFAPTVALRVAECFDKIRVNPGNFADRRAQFEKLEYTDDDYQKELEHIEKVFSPLVEKCKQYGRAMRIGTNHGSLSDRIMSYYGDSPRGMVESALEFARICRKLDFHNFVFSMKASNPVIMVQAYRLLVAEMYNLGWDYPLHLGVTEAGEGEDGRMKSAIGIGTLLMDGLGDTIRVSLTEPPEEEIDPCQRLANLGTQAANLQIGVAPFEEKHRRYFDFQRRSGQLPLQKEGEEVDYRNVLHRDGSVLMSVSLDQLKAPDLLYRSLAAKLVVGMPFKDLATVDSILLRELPPVEDAEARLALKRLVDISMGVLAPLSEQLTKPLPHAIVLVNLDELSSGAHKLLPEGTRLAVTLRGDESYEQLDILKDVDDITMLLHNVPYGEEKTGRVHAARRLFEYLQANGLNFPVIHHINFPETIDRDGLVIGAGANVGALLVDGLGDGVFLEAADQEFEFLRDTSFNLLQGCRMRNTKTEYVSCPSCGRTLFDLQEISAEIREKTSHLPGVSIAIMGCIVNGPGEMADADFGYVGGAPGKIDLYVGKASGILRSQCVTVANLPKATNNLAWSSCCWARIPRASPSC

SEQ ID NO: 183792 - protein, 509 aa, Zea Mays
MRIGTNHGSLSDRIMSYYGDSPRGMVESALEFARICRKLDFHNFVFSMKASNPVIMVQAYRLLVAEMYNLGWDYPLHLGVTEAGEGEDGRMKSAIGIGTLLMDGLGDTIRVSLTEPPEEEIDPCQRLANLGTQAANLQIGVAPFEEKHRRYFDFQRRSGQLPLQKEGEEVDYRNVLHRDGSVLMSVSLDQLKAPDLLYRSLAAKLVVGMPFKDLATVDSILLRELPPVEDAEARLALKRLVDISMGVLAPLSEQLTKPLPHAIVLVNLDELSSGAHKLLPEGTRLAVTLRGDESYEQLDILKDVDDITMLLHNVPYGEEKTGRVHAARRLFEYLQANGLNFPVIHHINFPETIDRDGLVIGAGANVGALLVDGLGDGVFLEAADQEFEFLRDTSFNLLQGCRMRNTKTEYVSCPSCGRTLFDLQEISAEIREKTSHLPGVSIAIMGCIVNGPGEMADADFGYVGGAPGKIDLYVGKTVVQRAIAMEGATDALIQLIKDHGRWVDPPAEE

SEQ ID NO: 183793 - protein, 341 aa, Zea Mays
MVGAAGPWTRLAFQTRGASRNAGEARRGELACSTYHSITVALLERQNGILRVLMGAETLASGPGRVLKAPKAKVSLCASCEASRDRRSSRVANMALLLTGRVLVVACVLVACSSSCGCPVAAAAAMTTVDGITAIYSFGDSITDTGNLVREGATDMLRYIGSRPYGIDLLRGVPTPTGRCSNGYLMIDFLAKYLGLPLLNPYLDKAADFTHGVNFAVAGATALGATALAERGVTMPHTNSSLDVQLQWFRDFMASATTNSSQEVRRKLASSLVMLEIGGNDFNYAFLQLQTRPTGGGYGSGNVTRIVEILEQVGALVPQVVQSITNAAKYVQTNLLLRPPS

SEQ ID NO: 183794 - protein, 126 aa, Zea Mays
MAKYNVVQKNKRQCNQDRKRAAHGEPGTGKLKQRTAPVSMSGKRKKKLERRLNRKQKEAAMIKALENNMGDVDMVSVEEAAKGKSQVKFSVKKNSRIQIKRLKGKGRKKAKNAKPPAKEKVDAMVE

SEQ ID NO: 183795 - protein, 246 aa, Zea Mays
MQRNGVVECSVCHSRVVVPSPRSVSRAYDKHRSKMSSKFRALNVFLVVGDCILVGLQPILVFMSKVDGKFQFSPISVNFLTEVMKVIFAIVMLIIQSRKQKVGEKPLLARSTFIQAARNNVLLAVPALLYAINNYLKFIMQLYFNPATVKMLSNLKVLVIAVLLKFIMRRRFSVIQWEALALLLIGISINQLRTVPAGNTAFGLPVTAIAYIYTLIFVTVPSMASVYNEYALKSQYDTSIYLQVKY

SEQ ID NO: 183796 - protein, 96 aa, Zea Mays
MTMIHVSKTRYILLSINNSVSSSGYCRCFLPVWWLSEAAIPTPSTAYAVSTGAVQPQSTIATTNMIASAGHSMFLSCKFQEINLFSVATGRKLILF

SEQ ID NO: 183797 - protein, 142 aa, Zea Mays
MARGGRHGRQGEEYPGRRGSGSHIGDGVGDVWSRRKRRPLQRHRGGGAQSKRFVWEPIEVRHGSRKSQIRAGRAARCDDGTREGEAEGGGEAGQADGAVRASATTPAAAVDLNSQTFPGNVVGVNMPASSAPTATTLAPEGR

SEQ ID NO: 183798 - protein, 408 aa, Zea Mays
MDAIRKQLDQLMGANRNGDVREVSRKYYDRDVCRLYLAGLCPHDLFQLTKMDMGPCPKLHSLQLRKEYEEAKAKGTDNYDRELEETIERLIVECERKIQRALKRLEEEDAKAAIAISVTEVTQTKEVMELSKQIRQKMKDIDAFDLEGNTEGKIRATEELDKLKEQRAEEQAKMLLEAFNKDRASLINSLQNATQTTTPVPPAAPDARTQEMINEKLKKAEELGENGMVDEAQKLLDEAEALKKLATRPQAVPDSTKMSAHVQITDQKLRLCDICGAFLSVYDSDRRLADHFGGKLHMGYMLIRERLSELQEEKNKKRKLDRAEYDRRERSGERARDSSRDRYIDRSSSRDREYDRRRSHDRYHDRERERDSRQSRSYDSRSHRRSYSPRGSSRDYDRSGRHERRDRY

SEQ ID NO: 183799 - protein, 363 aa, Zea Mays
MYGRSAASTMIATSAASTSPASAPTTSSSLPRWTWARARSCTRCNCAKNMKKPKPKIQRALKRLEEEDAKAAIAISVTEVTQTKEVMELSKQIRQKMKDIDAFDLEGNTEGKIRATEELDKLKEQRAEEQAKMLLEAFNKDRASLINSLQNATQTTTPVPPAAPDARTQEMINEKLKKAEELGENGMVDEAQKLLDEAEALKKAVPDSTKMSAHVQITDQKLRLCDICGAFLSVYDSDRRLADHFGGKLHMGYMLIRERLSELQEEKNKKRKLDRAEYDRRSRERSGERARDSSRDRYIDRSSSRDREYDRRRSHDRYHDRERERDSRQSRSYDSRSHRRSYSPRGSSRDYDRSGRHERRDRY

SEQ ID NO: 183800 - protein, 484 aa, Zea Mays
MEFLLPVFLKLFPNMLPSTFQDKMKEEEALKRKLKARMEYAKFLQDTAKEMAKEVQTSRSGDIKQTAEDLDEFLNKVRRGERVSNDEILSFAKLFNDELTLDNMSISRLVNMCKYMGIRPFGTDHYLRFMLRKKLQDIKNDDKMIQAEGVESLSEEELRQACRERGHLGLLSTEEMRQQLRDWLDLSLNHAVPSSLLILSRAFTVSGKVKPEEAVVATLSSLPDEVVDTVGTVLPSEDSVSERRRKLEFLEMQEELIKEEEKRKEKEEKAKQEEEEKAKLKETKGSAEDLALKEMIEATAREEELRKAKQHDREKLCNIGRALAVLASASSVSKERQEFLGLVNKEIELYNSMLEKEGAEEAKRAYIAAREESDHHAEAAAEEKISSALIEKVDAMLQELEKEIDDVDAQIGNRWQLLDKDHDGKVTPEEVAAAAAYLKDTIGKEGVQELISNLSKDTEGKILVEDIVKLASQTENNEEEEEAR

SEQ ID NO: 183801 - protein, 384 aa, Zea Mays
MAARAITRRRKYLFDHVKTPNLSSSSSTFQHGRIGSEDEPKITLLFLEQSSRDSRSEKEQYCVNLTNRNLAGIANRFLRRPAHGISLSYYGIGKNDFGLPLGARSMLQSVRASSTATAGQPKLDIDDEQSGDQKQNRKKKETSPEECDQAVEGLSTAKAKAKAKQVQESLKASQSAMQKFWARLLGIGPALRAVASMSRADWAAKLKHWKAEFVTTLQHYWLGTKLLWADVRISSRLLVKLAGGKSLSRRERQQLTRTTADIFRLVPFAVFIVVPFMEFLLPVFLKLFPNMLPSTFQDKMKEEEALKRKLKARMEYAKFLQDTAKEMAKEVQTSRSGDIKQTAEDLDEFLNKVRRGERVSNDEILSFAKLFNDELTLDNMNHAW

SEQ ID NO: 183802 - protein, 669 aa, Zea Mays
MAARAITRRRKYLFDHVKTPNLSSSSSTFQHGRIGSEDEPKITLLFLEQSSRDSRSEKEQYCVNLTNRNLAGIANRFLRRPAHGISLSYYGIGKNDFGLPLGARSMLQSVRASSTATAGQPKLDIDDEQSGDQKQNRKKKETSPEECDQAVEGLSTAKAKAKAKQVQESLKASQSAMQKFWARLLGIGPALRAVASMSRADWAAKLKHWKAEFVTTLQHYWLGTKLLWADVRISSRLLVKLAGGKSLSRRERQQLTRTTADIFRLVPFAVFIVVPFMEFLLPVFLKLFPNMLPSTFQDKMKEEEALKRKLKARMEYAKFLQDTAKEMAKEVQTSRSGDIKQTAEDLDEFLNKVRRGERVSNDEILSFAKLFNDELTLDNMSISRLVNMCKYMGIRPFGTDHYLRFMLRKKLQDIKNDDKMIQAEGVESLSEEELRQACRERGHLGLLSTEEMRQQLRDWLDLSLNHAVPSSLLILSRAFTVSGKVKPEEAVVATLSSLPDEVVDTVGTVLPSEDSVSERRRKLEFLEMQEELIKEEEKRKEKEEKAKQEEEEKAKLKETKGSAEDLALKEMIEATAREEELRKAKQHDREKLCNIGRALAVLASASSVSKERQEFLGLVNKEIELYNSMLEKEGAEEAKRAYIAAREESDHHAEAAAEEKISSALIEKL

SEQ ID NO: 183803 - protein, 205 aa, Zea Mays
MAARAITRRRKYLFDHVKTPNLSSSSSTFQHGRIGSEDEPKITLLFLEQSSRDSRSEKEQYCVNLTNRNLAGIANRFLRRPAHGISLSYYGIGKNDFGLPLGARSMLQSVRASSTATAGQPKLDIDDEQSGDQKQNRKKKETSPEECDQAVEGLSTAKAKAKAKQVQESLKASQSAMQKFWARLLGIGPALRAVASMSRSQFLHT

SEQ ID NO: 183804 - protein, 336 aa, Zea Mays
MPAADAKHYGHFEVYNTLRARGAKVPKTRKTPMAVSNPKQVPEYELNPLELEFRRGEEVTKGTYLAKWYGSKVFVKILDKDSFSDAESINAFKHELTLLEKARHPNLVQFVGAVTQNVPMMIVSEYHQKGDLASYIEMKGRLKPHKAIRFALDIARGLNYLHECKPEPIIHGNLSPKNIIRDDEGQLKVAGFGSLSLSKVSEDKVQMAQPVTKFDNVYIAPEVYKNEPFDRSVDVFAFGLILYEMIEGAPAFHPKPQEEAAKMICLEGLRPPFKNKPKYYPSDVKELIQECWDPMPSVRPTFAEIIVRLNKIHANCAKQGSWRDTFKLPWKQTGER

SEQ ID NO: 183805 - protein, 145 aa, Zea Mays
MAVSNPKQVPEYELNPLELEFRRGEEVTKGTYLAKWYGSKVFVKILDKDSFSDAESINAFKHELTLLEKARHPNLVQFVGAVTQNVPMMIVSEYHQKGDLASYIEMKGRLKPHKAIRFALDIARGLNYLHECKPEPIIHGNLSPK

SEQ ID NO: 183806 - protein, 241 aa, Zea Mays
MDAAAKKMTRSISRQLSSGAARLWRQLSLDPHTPRRGGPGPVPAAGAGQTRFAIARQSSLDPTPRGGPDGSSAHQQLAVPENLDATMRLLFAACQGDAAGVEELLRSGVDVDSIDLDGRTALHIAACEGQGEVVRLLLDWKANINARDRWGSTPAADAKHYGHFEVYNTLRARGAKVPKTRKTPMAVSNPKQVPEYELNPLELEFRRGEEVTKGTYLAKWYGSKVFVKILDKDSFSDAESM

SEQ ID NO: 183807 - protein, 604 aa, Zea Mays
MSRIPKQLRPSLPKVPRSTSSVTNNLESHKKIAPVKAELVHRVTGFPARLKINPVSSGPSIEKAVVPAVTAIHEEATVKCKKNPAHPQISPSTPFDSTVSKLAKPSALRLPSPSLGFFTQEKAHVPHGDAAKRNVGRCFSSNTSALDRPPRYRQSEESRLHLAKQLSTNGTVASNLVLPVTREGHLKSLVVPENESSSKVIITYLEKSGNVNNQAMPKADFLLAGTGATDTTQPMNLEKKDDAGNSETLLVEGMDDIKEIEPLDNFYAPEAICSSTIRPVEDSFSLEASYSSTKPIVESKLSLSCISSKVHSSSELSCQGKSVSDPSAAMDMENSNVGDTALSASLSKGRSCTPALDLLQGFYSFDRQNIECPMLMESVSTICADQLPHCDSLSDETPALAGSHSDLNDSLCDEAKPALSKEPNTEGEMELQTNSTIAVKETPLLDVGCGHIHNYRTTDCSTRLEAPTPCVERRHALLVEPNMEEKMVLDTNRLSAIQYTPHIEKNKALERSPANTIRKDHLKNLIPFTEEWLAVMESCGQFWNKRPVLCKILLLTKHLQNRVLGHRLNGRRKMLDHLTVRSTPKASEPLVPNCRRLSSHSITV

SEQ ID NO: 183808 - protein, 618 aa, Zea Mays
MSRIPKQLRPSLPKVPRSTSSVTNNLESHKKIAPVKAELVHRVTGFPARLKINPVSSGPSIEKAVVPAVTAIHEEATVKCKKNPAHPQISPSTPFDSTVSKLAKPSALRLPSPSLGFFTQEKAHVPHGDAAKRNVGRCFSSNTSALDRPPRYRQSEESRLHLAKQLSTNGTVASNLVLPVTREGHLKSLVVPENESSSKVIITYLEKSGNVNNQAMPKADFLLAGTGATDTTQPMNLEKKDDAGNSETLLVEGMDDIKEIEPLDNFYAPEAICSSTIRPVEDSFSLEASYSSTKPIVESKLSLSCISSKVHSSSELSCQGKSVSDPSAAMDMENSNVGDTALSASLSKGRSCTPALDLLQGFYSFDRQNIECPMLMESVSTICADQLPHCDSLSDETPALAGSHSDLNDSLCDEAKPALSKEPNTEGEMELQTNSTIAVKETPLLDVGCGHIHNYRTTDCSTRLEAPTPCVERRHALLVEPNMEEKMVLDTNRLSAIQYTPHIEKNKALERSPANTIRKDHLKNLIPFTEEWLAVMESCGQEVLEQKTGAVQNSPPDKTPPEPSPWSPVKRKAQDVGPFDCTKYSKSIRTSGQLKQLETEQLEQPRPVALFCPSNSDE

SEQ ID NO: 183809 - protein, 787 aa, Zea Mays
MASPRRIPSVPARSGNKENISQDGEAPLDFATLPKEGPATTRRKKKLAGFNLRKSIAWNPAFLTEEGVLDNSELSVLTGSQPMANRSPGSGVSSIMSPSCQSGRYGNTYVRKEAAGNSHGKLPARYHRAESQGRKLFSSAKTPQGDNQKESAGTQNRSSARIIQICTPRVPAGSIYPNEVLGRIEQALKFFPLITMSRIPKQLRPSLPKVPRSTSSVTNNLESHKKIAPVKAELVHRVTGFPARLKINPVSSGPSIEKAVVPAVTAIHEEATVKCKKNPAHPQISPSTPFDSTVSKLAKPSALRLPSPSLGFFTQEKAHVPHGDAAKRNVGRCFSSNTSALDRPPRYRQSEESRLHLAKQLSTNGTVASNLVLPVTREGHLKSLVVPENESSSKVIITYLEKSGNVNNQAMPKADFLLAGTGATDTTQPMNLEKKDDAGNSETLLVEGMDDIKEIEPLDNFYAPEAICSSTIRPVEDSFSLEASYSSTKPIVESKLSLSCISSKVHSSSELSCQGKSVSDPSAAMDMENSNVGDTALSASLSKGRSCTPALDLLQGFYSFDRQNIECPMLMESVSTICADQLPHCDSLSDETPALAGSHSDLNDSLCDEAKPALSKEPNTEGEMELQTNSTIAVKETPLLDVGCGHIHNYRTTDCSTRLEAPTPCVERRHALLVEPNMEEKMVLDTNRLSAIQYTPHIEKNKALERSPANTIRKDHLKNLIPFTEEWLAVMESCGQFWNKRPVLCKILLLTKHLQNRVLGHRLNGRRKMLDHLTVRSTPKASEPLGN

SEQ ID NO: 183810 - protein, 791 aa, Zea Mays
MASPRRIPSVPARSGNKENISQDGEAPLDFATLPKEGPATTRRKKKLAGFNLRKSIAWNPAFLTEEGLIVTSKNFVGVLDNSELSVLTGSQPMANRSPGSGVSSIMSPSCQSGRYGNTYVRKEAAGNSHGKLPARYHRAESQGRKLFSSAKTPQGDNQKESAGTQNRSSARIIQICTPRVPAGSIQKKVQNSSASTSQMSRIPKQLRPSLPKVPRSTSSVTNNLESHKKIAPVKAELVHRVTGFPARLKINPVSSGPSIEKAVVPAVTAIHEEATVKCKKNPAHPQISPSTPFDSTVSKLAKPSALRLPSPSLGFFTQEKAHVPHGDAAKRNVGRCFSSNTSALDRPPRYRQSEESRLHLAKQLSTNGTVASNLVLPVTREGHLKSLVVPENESSSKVIITYLEKSGNVNNQAMPKADFLLAGTGATDTTQPMNLEKKDDAGNSETLLVEGMDDIKEIEPLDNFYAPEAICSSTIRPVEDSFSLEASYSSTKPIVESKLSLSCISSKVHSSSELSCQGKSVSDPSAAMDMENSNVGDTALSASLSKGRSCTPALDLLQGFYSFDRQNIECPMLMESVSTICADQLPHCDSLSDETPALAGSHSDLNDSLCDEAKPALSKEPNTEGEMELQTNSTIAVKETPLLDVGCGHIHNYRTTDCSTRLEAPTPCVERRHALLVEPNMEEKMVLDTNRLSAIQYTPHIEKNKALERSPANTIRKDHLKNLIPFTEEWLAVMESCGQEVLEQKTGAVQNSPPDKTPPEPSPWSPVKRKAQDVGPFDCTKYSKSIRTSGT

SEQ ID NO: 183811 - protein, 684 aa, Zea Mays
MASPRRIPSVPARSGNKENISQDGEAPLDFATLPKEGPATTRRKKKLAGFNLRKSIAWNPAFLTEEGVLDNSELSVLTGSQPMANRSPGSGMSRIPKQLRPSLPKVPRSTSSVTNNLESHKKIAPVKAELVHRVTGFPARLKINPVSSGPSIEKAVVPAVTAIHEEATVKCKKNPAHPQISPSTPFDSTVSKLAKPSALRLPSPSLGFFTQEKAHVPHGDAAKRNVGRCFSSNTSALDRPPRYRQSEESRLHLAKQLSTNGTVASNLVLPVTREGHLKSLVVPENESSSKVIITYLEKSGNVNNQAMPKADFLLAGTGATDTTQPMNLEKKDDAGNSETLLVEGMDDIKEIEPLDNFYAPEAICSSTIRPVEDSFSLEASYSSTKPIVESKLSLSCISSKVHSSSELSCQGKSVSDPSAAMDMENSNVGDTALSASLSKGRSCTPALDLLQGFYSFDRQNIECPMLMESVSTICADQLPHCDSLSDETPALAGSHSDLNDSLCDEAKPALSKEPNTEGEMELQTNSTIAVKETPLLDVGCGHIHNYRTTDCSTRLEAPTPCVERRHALLVEPNMEEKMVLDTNRLSAIQYTPHIEKNKALERSPANTIRKDHLKNLIPFTEEWLAVMESCGQEVLEQKTGAVQNSPPDKTPPEPSPWSPVKRKAQDVGPFDCTKYSKSIRTSGT

SEQ ID NO: 183812 - protein, 709 aa, Zea Mays
MASPRRIPSVPARSGNKENISQDGEAPLDFATLPKEGPATTRRKKKLAGFNLRKSIAWNPAFLTEEGVLDNSELSVLTGSQPMANRSPGSGMSRIPKQLRPSLPKVPRSTSSVTNNLESHKKIAPVKAELVHRVTGFPARLKINPVSSGPSIEKAVVPAVTAIHEEATVKCKKNPAHPQISPSTPFDSTVSKLAKPSALRLPSPSLGFFTQEKAHVPHGDAAKRNVGRCFSSNTSALDRPPRYRQSEESRLHLAKQLSTNGTVASNLVLPVTREGHLKSLVVPENESSSKVIITYLEKSGNVNNQAMPKADFLLAGTGATDTTQPMNLEKKDDAGNSETLLVEGMDDIKEIEPLDNFYAPEAICSSTIRPVEDSFSLEASYSSTKPIVESKLSLSCISSKVHSSSELSCQGKSVSDPSAAMDMENSNVGDTALSASLSKGRSCTPALDLLQGFYSFDRQNIECPMLMESVSTICADQLPHCDSLSDETPALAGSHSDLNDSLCDEAKPALSKEPNTEGEMELQTNSTIAVKETPLLDVGCGHIHNYRTTDCSTRLEAPTPCVERRHALLVEPNMEEKMVLDTNRLSAIQYTPHIEKNKALERSPANTIRKDHLKNLIPFTEEWLAVMESCGQEVLEQKTGAVQNSPPDKTPPEPSPWSPVKRKAQDVGPFDCTKYSKSIRTSGQLKQLETEQLEQPRPVALFCPSNSDE

SEQ ID NO: 183813 - protein, 360 aa, Zea Mays
MASAAATTTSAPAQNLNPLSINIKLPPWLSGLRCPFTFVCPPPPPPPPPPPPPPPLPPTEPVVPRSRRLPSLRVTTEYDSEEGVFVNKVSCKLAGDLAKLRLSFQRDPLQQLFAAPLVGLITKRFSVLYDVEARNALLRGDCSLPGGAVQLRASHDVKAQQGEVSVITSLGDPLYKMELSSLVPYSGLPRATFHFPIGQVSVEEKRNEDDEKVLSVYGIGKSDFLDGVLTAQYNENDLNLRYCYKDKELTLVPSVSLPSNAVSIDFKRRFGPDDKLSYRYIFDTDEWNAVYKHKVGKNFKVKAGYDSEVRVGWASLWVGEEGGKAKTAPMKTKLQLMLQVPQDNPRNPYFLFNVKKRWDL

SEQ ID NO: 183814 - protein, 326 aa, Zea Mays
MASAAATTTSAPAQNLNPLSINIKLPPWLSGLRCPFTFVCPPPPPPPPPPPPPPPLPPTEPVVPRSRRLPSLRVTTEYDSEEGVFVNKVSCKLAGDLAKLRLSFQRDPLQQLFAAPLVGLITKRFSVLYDVEARNALLRGDCSLPGGAVQLRASHDVKAQQGEVSVITSLGDPLYKMELSSLVPYSGLPRATFHFPIGQVSVEEKRNEDDEKVLSVYGIGKSDFLDGVLTAQYNENDLNLRYCYKDKELTLVPSVSLPSNAVSIDFKRRFGPDDKLSYRYIFDTDEWNAVYKHKVGKNFKVKAGYDSEVRVGWASLWKGARRRLRQ

SEQ ID NO: 183815 - protein, 465 aa, Zea Mays
MAAPAAAPLDEGKAKKVLRQVEFYFSDSNLPRDKFLRETVEQSDDGLVSLPLICSFSRMKSHLGLDADVKPETVPEETVLAVAEVLRPSPALRVSEDGKKIGRASELLKPDEIIEQVDSRTIAVSPLPCNVKQEDVQSFFTNYAKVNSVRLPRNIANKKHFCGTALVEFSEEEEAKRIMETALVFAGANLEIRPKKEFDAEQKSKKEAYEKTHLKKDNQYEGYQKGLIVAFKLEKATADTVVQQDNIDKENDSATKLDVSSSMEKPSGQGPEESILESDVIKQGMSSDDMTKEKDLNTGEATESEKCISDVPIESDKHGDSEPLSREGKIISGNVNVKNQISREDLKEAFKKFGAVRYVDFSIGDNSGYLRFEDSKAAEKARMSAVLADGGLIIKDHIVTLEPVTAEKDYWDTIRSIQGKYKDSRSYKGRASNNQRGGKRFNAKRDRNPDSEKNSNKARKVEAIA

SEQ ID NO: 183816 - protein, 225 aa, Zea Mays
MAAPAAAPLDEGKAKKVLRQVEFYFSDSNLPRDKFLRETVEQSDDGLVSLPLICSFSRMKSHLGLDADVKPETVPEETVLAVAEVLRPSPALRVSEDGKKIGRASELLKPDEIIEQVDSRTIAVSPLPCNVKQEDVQSFFTNYAKVNSVRLPRNIANKKHFCGTALVEFSEEEEAKRIMETALVFAGANLEIRPKSLMLSKSPKKKHMKRHTLKRTTSMKAIKKA

SEQ ID NO: 183817 - protein, 146 aa, Zea Mays
MACSTNLCFSASIPPLPASSSSSVSSPFLTVERVSYVPSLSRWTIRYKQLGHAYQRSHVLAFASADASQGKRSSGENVVMVDPLEAKRLAAKQMQEIRAKEKLKRRSQAEAINGPLAMIGLTAGLIVEAQTGKGILGQELMTPAME

SEQ ID NO: 183818 - protein, 121 aa, Zea Mays
MHYTNPGPGESYSTFFSASCCILILYNTFSLGSYIVFLMNQASQGKRSSGENVVMVDPLEAKRLAAKQMQEIRAKEKLKRRSQAEAINGPLAMIGLTAGLIVEAQTGKGILGQELMTPAME

SEQ ID NO: 183819 - protein, 120 aa, Zea Mays
MHYTNPGPGESYSTFFSASCCILILYNTFSLGSYIVFLMNQASQGKRSSGENVVMVDPLEAKRLAAKQMQEIRAKEKLKRRSQAEAINGPLAMIGLTAGLIVEAQTGKGILGQLMTPAME

SEQ ID NO: 183820 - protein, 117 aa, Zea Mays
MACSTNLCFSASIPPLPASSSSSVSSPFLTVERVSYVPSLSRWTIRYKQLGHAYQRSHVLAFASADASQGKRSSGENVVMVDPLEAKRLAAKQMQEIRAKEKLKVHCSCIGVYHSLD

SEQ ID NO: 183821 - protein, 85 aa, Zea Mays
MACSTNLCFSASIPPLPASSSSSVSSPFLTVERVSYVPSLSRWTIRYKQLGHAYQRSHVLAFASADVCIRHFEHHRVKEAQVRML

SEQ ID NO: 183822 - protein, 82 aa, Zea Mays
MACSTNLCFSASIPPLPASSSSSVSSPFLTVERVSYVPSLSRWTIRYKQLGHAYQRSHVLAFASADVCIRHFEVKEAQVRML

SEQ ID NO: 183823 - protein, 149 aa, Zea Mays
MACSTNLCFSASIPPLPASSSSSVSSPFLTVERVSYVPSLSRWTIRYKQLGHAYQRSHVLAFASADGKRSSGENVVMVDPLEAKRLAAKQMQEIRAKEKLKRRSQAEAINGPLAMIGLTAGLIVEAQTGKGILGQLAGYLTAISSLFGQ

SEQ ID NO: 183824 - protein, 127 aa, Zea Mays
MHYTNPGPGESYSTFFSASCCILILYNTFSLGSYIVFLMNQASQGKRSSGENVVMVDPLEAKRLAAKQMQEIRAKEKLKRRSQAEAINGPLAMIGLTAGLIVEAQTGKGILGQLAGYLTAISSLFGQ

SEQ ID NO: 183825 - protein, 115 aa, Zea Mays
MGNTETGATPAKRTPRRRDRMEQASTTVCLGRWGRKEAQRAARPPPACASDGGAADRTGRARGIGEVAVDTIRRISSPPRELAGRRVVEPGRGGASRRETRCGPAARAGRLGSKK

SEQ ID NO: 183826 - protein, 80 aa, Zea Mays
MDFSTKHNWLTSVLGGAKLAVQCRDPGEDMYWESSKMTQQNSHFHKRFFKRFSFSSVWESHFPKRFPFFEEKLVHFSLGK

SEQ ID NO: 183827 - protein, 137 aa, Zea Mays
MRYYSREDAEDAVKYISGTMLDDRPIRVDFDWGFEEGRQWGRGRSGGQVRDEYRTDYDPGRGGYGKMVQRELEAQRELVDYGGSFQPNAPPPYERGERKRGYGDSHRNDRGDYQRKRYRSSDDRSAPEESKRAPDSD

SEQ ID NO: 183828 - protein, 491 aa, Zea Mays
MVWEVDDGKLSERTISDELPQESSKAEQDVSRPEQDGTCMNGNTDTDQLKSDHNEGAEFDTAKPEKKAAVDSDKSAKLKLSDKCEAPVHSDADTKKEASAEGTDGAADDTSTAADCTPKPKRGRPPGPKSSQKKAAGKDQSSGSDLKKVNEAGDSAGKLAKRSAKDEKSTKKAGEGESSKKTQKYNSKQQKDENLSEDPAKDLSLKEMITPKSSTKVPGRTKGQSTENSTPKMKQEQETEEPPRSRKSKGLDKSLVGARIKVWWPDDKMFYNGVVESFDSVSKRHKVAYDDGDVEVLLLRDEKWEFISEEKGASVASETPGGRKRKADAVKEENTETPKSDAVDHPKKRGRPKGVRSSNGTPSNSATPSTKGKTAGKNTKETPKTGPNLIKELEKSSKDKASVSTETKDELPKDDRSASRPKEAISKGKDSKDEGKSTEGKARPGRKLKNAGTPAGDADKEKGKEKEVKAAEIEQEAPGNASTGKKRRRKA

SEQ ID NO: 183829 - protein, 751 aa, Zea Mays
MAEDPAAEQETRQLEDRLREVGERLQAPPDDAEDLLNLLIEVEECLLKVEQSPPESTSNALQLATAALVKKELLAHADSNIRLAVASCISEITRITAPDAPYDDDAMKDVFSLIVEAFKHLDDIESPFFGRRTSILDTVAKVRSCVVMLDLECDDLINDMFHHFLRTVNSGHSEAVICCMETIMRLVIEESEDVQPQIASCLLQNVRKEEKESSSASFELAEKVIGTCREKLKPVFLQSLKGTSLSEYSQIVASVCEDVSDDREDNNADPSGKDTVDDGKLSERTISDELPQESSKAEQDVSRPEQDGTCMNGNTGAEFDTAKPEKKAAVDSDKSAKLKLSDKCEAPVHSDADTKKEASAEGTDGAADDTSTAADCTPKPKRGRPPGPKSSQKKAAGKDQSSGSDLKKVNEAGDSAGKLAKRSAKDEKSTKKAGEGESSKKTQKYNSKQQKDENLSEDPAKDLSLKEMITPKSSTKVPGRTKGQSTENSTPKMKQEQETEEPPRSRKSKGLDKSLVGARIKVWWPDDKMFYNGVVESFDSVSKRHKVAYDDGDVEVLLLRDEKWEFISEEKGASVASETPGGRKRKADAVKEENTETPKSDAVDHPKKRGRPKGVRSSNGTPSNSATPSTKGKTAGKNTKETPKTGPNLIKELEKSSKDKASVSTETKDELPKDDRSASRPKEAISKGKDSKDEGKSTEGKARPGRKLKNAGTPAGDADKEKGKEKEVKAAEIEQEAPGNASTGKKRRRKA

SEQ ID NO: 183830 - protein, 698 aa, Zea Mays
MAEDPAAEQETRQLEDRLREVGERLQAPPDDAEDLLNLLIEVEECLLKVEQSPPESTSNALQLATAALVKKELLAHADSNIRLAVASCISEITRITAPDAPYDDDAMKDVFSLIVEAFKHLDDIESPFFGRRTSILDTVAKVRSCVVMLDLECDDLINDMFHHFLRTVNSGHSEAVICCMETIMRLVIEESEDVQPQIASCLLQNVRKEEKVDDGKLSERTISDELPQESSKAEQDVSRPEQDGTCMNGNTDTDQLKSDHNEGAEFDTAKPEKKAAVDSDKSAKLKLSDKCEAPVHSDADTKKEASAEGTDGAADDTSTAADCTPKPKRGRPPGPKSSQKKAAGKDQSSGSDLKKVNEAGDSAGKLAKRSAKDEKSTKKAGEGESSKKTQKYNSKQQKDENLSEDPAKDLSLKEMITPKSSTKVPGRTKGQSTENSTPKMKQEQETEEPPRSRKSKGLDKSLVGARIKVWWPDDKMFYNGVVESFDSVSKRHKVAYDDGDVEVLLLRDEKWEFISEEKGASVASETPGGRKRKADAVKEENTETPKSDAVDHPKKRGRPKGVRSSNGTPSNSATPSTKGKTAGKNTKETPKTGPNLIKELEKSSKDKASVSTETKDELPKDDRSASRPKEAISKGKDSKDEGKSTEGKARPGRKLKNAGTPAGDADKEKGKEKEVKAAEIEQEAPGNASTGKKRRRKA

SEQ ID NO: 183831 - protein, 396 aa, Zea Mays
MIEDLSRKTLKITLWAKRATSFTIQDVYDPVSKKPILALFVGCLPKFYKGVYLSGGAACHWYFNPTIPEAEAYQNRRGGETIQLHLPTQPKHALQTFQPPTIEHKTLEQLLTMNPYDYPDTGYECTVTITEIDTSNTWWYPSCTKCGRKTTPHNTAYYCDWCKWDGYKFKYKLKFRASDATAMAQMFCFDNIARYIVGKSCEVILRSTNAATPIPPDLAQIVSLKFTFRVIPDDSSFNNQDQVPIALRIISITTAHGRQHALPLKPTNIIEGTSTPQNKLQLQLIENSPSNPFQNLSTSTPPPIQAARKLIYPPLSNPVTYQHTPKSDGEEEITEQQTMNTSQIKGKKYALIRISSKKYIQLQINSISIRNIMPYLSEPLFQVSTGSYCITAFTVC

SEQ ID NO: 183832 - protein, 354 aa, Zea Mays
MDYILLPDLTTYKKHAIIQVHVSRKWSFHGATEKGPLQHIDMVLSDCKGNSIYAEIPANLAEEKGALIETNQIYDISRFRVTAAKTAYKPIDGDKMIQFTTYTIIKPASNPPPTFPLYIYQLTPFDEIESQIQHKTKFLDVLGTITEITALKIVHIEGQLSPTIIRDVMIEDLSRKTLKITLWAKRATSFTIQDVYDPVSKKPILALFVGCLPKFYKGVYLSGGAACHWYFNPTIPEAEAYQNRRGGETIQLHLPTQPKHALQTFQPPTIEHKTLEQLLTMNPYDYPDTGYECTVTITEIDTSNTWWYPSCTKCGRKTTPHNTAYYCDWCKWDGYKFKPGPHCPSHHLYNYSAW

SEQ ID NO: 183833 - protein, 573 aa, Zea Mays
MGGVCSRKRSQLVDEGDALQTSPRFSKTSSLKWLLLTLPRSSSDVSGKGQGNEPGRCPSLMELCVARVCQDIDRYSTFAMLPRDLSQQIFNELVNSNRLTEASLQVFRDCALQDIGLGEYPGVKDAWMEVVASQKQSLLSVDISCSEVADSGIDLLRDCSSMQSLACNYCDQISESGLGVLSGLSNLSSLSFKRSNAVTAEGMRAFANLVNLLNLDLEGCLKIHGGLIHLKDLTKLESLNMRYCNYIADSDIKYLTDLTNLKDLQLSCCKITDLGVSYIRGLQKLTHLNLEGCPVTAACLEAISGLSSLVLLNLNRCGIYDDGCENFEGLKRLKVLNLGFNYITDACLVHLKELISLESLNLDSCKIGDDGLSHLKGLVLLQSLELSDTEVGNNGLQHLSGLRNLQSINLSFTLVTDIGVKKISVLNSLKSVNLDNRQITDVGLAALISLTRLTHLDLFGACITDNGTNCFRFCGGFVTDAGVKNIKDLKALTLLNLSQNANLTDKTLELISGLTALINLNVSNSRVSNAGLKHLNDLHNLRSLSLDSTRVTANEMRKLRATVLHNLISMRPE

SEQ ID NO: 183834 - protein, 548 aa, Zea Mays
MGGVCSRKRSQLVDEGDALQTSPRFSKTSSLKWLLLTLPRSSSDVSGKGQGNEPGRCPSLMELCVARVCQDIDRYSTFAMLPRDLSQQIFNELVNSNRLTEASLQVFRDCALQDIGLGEYPGVKDAWMEVVASQKQSLLSVDISCSEVADSGIDLLRDCSSMQSLACNYCDQISESGLGVLSGLSNLSSLSFKRSNAVTAEGMRAFANLVNLLNLDLEGCLKIHGGLIHLKDLTKLESLNMRYCNYIADSDIKYLTDLTNLKDLQLSCCKITDLGVSYIRGLQKLTHLNLEGCPVTAACLEAISGLSSLVLLNLNRCGIYDDGCENFEGLKRLKVLNLGFNYITDACLVHLKELISLESLNLDSCKIGDDGLSHLKGLVLLQSLELSDTEVGNNGLQHLSGLRNLQSINLSFTLVTDIGVKKISVLNSLKSVNLDNRQITDVGLAALISLTRLTHLDLFGACITDNGTNCFRYFKNLVSLEVCGGFVTDAGVKNIKDLKALTLLNLSQNANLTDKTLELISDSTRVTANEMRKLRATVLHNLISMRPE

SEQ ID NO: 183835 - protein, 569 aa, Zea Mays
MGGVCSRKRSQLVDEGDALQTSPRFSKTSSLKWLLLTLPRSSSDVSGKGQGNEPGRCPSLMELCVARVCQDIDRYSTFAMLPRDLSQQIFNELVNSNRLTEASLQVFRDCALQDIGLGEYPGVKDAWMEVVASQKQSLLSVDISCSEVADSGIDLLRDCSSMQSLACNYCDQISESGLGVLSGLSNLSSLSFKRSNAVTAEGMRAFANLVNLLNLDLEDLTKLESLNMRYCNYIADSDIKYLTDLTNLKDLQLSCCKITDLGVSYIRGLQKLTHLNLEGCPVTAACLEAISGLSSLVLLNLNRCGIYDDGCENFEGLKRLKVLNLGFNYITDACLVHLKELISLESLNLDSCKIGDDGLSHLKGLVLLQSLELSDTEVGNNGLQHLSGLRNLQSINLSFTLVTDIGVKKISVLNSLKSVNLDNRQITDVGLAALISLTRLTHLDLFGACITDNGTNCFRYFKNLVSLEVCGGFVTDAGVKNIKDLKALTLLNLSQNANLTDKTLELISGLTALINLNVSNSRVSNAGLKHLNDLHNLRSLSLDSTRVTANEMRKLRATVLHNLISMRPE

SEQ ID NO: 183836 - protein, 293 aa, Zea Mays
MGGVCSRKRSQLVDEGDALQTSPRFSKTSSLKWLLLTLPRSSSDVSGKGQGNEPGRCPSLMELCVARVCQDIDRYSTFAMLPRDLSQQIFNELVNSNRLTEASLQVFRDCALQDIGLGEYPGVKDAWMEVVASQKQSLLSVDISCSEVADSGIDLLRDCSSMQSLACNYCDQISESGLGVLSGLSNLSSLSFKRSNAVTAEGMRAFANLVNLLNLDLEGCLKIHGGLIHLKDLTKLESLNMRYCNYIADSDIKYLTDLTNLKDLQLSCCKITDLGVSYIRGKQYQKFIYLFGG

SEQ ID NO: 183837 - protein, 53 aa, Zea Mays
MKTPLPHPLPADDPLDDDQEEEEEEQPPPQEEPQEDDPDKEEPEEDDPDKPTE

SEQ ID NO: 183838 - protein, 865 aa, Zea Mays
MLLEKEMSKEAESKRRHPSVIARLMGLEEDLPTKEPTVHHTVSDLSRDLNATNNTLQGKEHHHFIMSKTQNYQSCHEKIEYNDVFEVSEGQPGTDCFHDRTSQKGWSSENKSEQFNIARDKIMEPEQLAIEEKLLCTKELPEALVFPCSNRDLFLEFPEEHNPTFSRQSSGLHANQAPPQTKRITVLKPIRSVDSDGIRRPRAEIGKQNVLKMRRFHQIPSSKEEIPSQPSRIILLRPTPGKPGISKAKLTSRATSFQLPNRNSLNGSLDDNQASIGSAGLVHGMMQCRQDGCHQRDDSLLSSAYSNGYGGDESSFSDSEVDYTSGSEINYIEDCDTLSDSEGGSPLSRHSWNYIRRYEGQCSSSSFSKISHFSESSVVTEAKKQISERWSMVTCNEMSQVQLSRRKCTLGEMLSIKEAKEDEATTGMFYVSSNQSCGLENELTTRSTNVTTSRKNGDNGERSSKLPRSKSVPVISSTSDNMTVNMQASNPESCKLKVAVVSNKGKSAFKGRVSDFFLSKSKRPRRQMPAYHQSDCIAEGLEGCITHNRQDCNHKMDAIEKAMHYDDEFNSFSTRISTSIPDRTTSGASVSLGSSTGNLDKLGVNKCLNGNRDQPSPTSVLDAPSEDSSCNEPETLGTTTSKNAISRSSAIETVARFLSLDDTASESQSLCNPRPSSLLPDADDDESECHVLVQNIMSSAGLGTSQSRMVFAGWHLPDHPLDPVLRNKVSQLQEKSSYRRLLFDCVNVALIEIGENALLSALPWSKRSSRTWRGTSSPDLGVEVWSILKDWIHGARMFVVSKRDNAGIILDRIVKQEVEARGWVKLMMAQVVVITEELEGGVMEELVEEAVLDFYSLFSVVRYRL

SEQ ID NO: 183839 - protein, 468 aa, Zea Mays
MSMGSAELFQRRSEFIVGILQRLGTNNIMRKQEGSMSHRKMDCRHALAIPEGHFDNLIDYKRSNFNPLAKLRNGKIPSSYASDEACEFMALPSGYNQGPGSIVDQKNDLSHGGSGASECMALPWACVNDTLSSDRKGDIVHNQVSNLLLEDVDRYVHGRHASANELSLNGQTDSYGQHRWDPMLSVTFLKSFHDRLYFPCQNEERHAVPYGISNTSEQPELCSSIELCTCSSIGLEIEDPKEAGLCGNSDAGFPSWLAQLVGKPTISSIFDSGNEILDHNDFRCISNFHSNMFSSNSSCLNSMSTPEQSYKVGAKGLLDSSFGLSCLAGLEEYSTDAELPDDSDRFLQVLDQLPVKFISSGFSNNDSRIWDHRSSNAEPPFNQDWGTTQPWSSVHQLQPHSDSGTVLGFMPNGSAYSDLVERHHSLMLVQGNLSTDVLGATDLSFFGSCSSLDNITEAPTLSSDGITW

SEQ ID NO: 183840 - protein, 580 aa, Zea Mays
MDRLQRRNPSSRTHATSLKHPRPPRVPTFQPQPASRSLQEPEPSSPVCDAKTAEYKFFKKLCEQPGHSSLSYKHSHQSLESNVYRQKQDREPISGHIFSGKRSKLLKIAAKTMSMGSAELFQRRSEFIVGILQRLGTNNIMRKQEGSMSHRKMDCRHALAIPEGHFDNLIDYKRSNFNPLAKLRNGKIPSSYASDEACEFMALPSGYNQGPGSIVDQKNDLSHGGSGASECMALPWACVNDTLSSDRKGDIVHNQVSNLLLEDVDRYVHGRHASANELSLNGQTDSYGQHRWDPMLSVTFLKSFHDRLYFPCQNEERHAVPYGISNTSEQPELCSSIELCTCSSIGLEIEDPKEAGLCGNSDAGFPSWLAQLVGKPTISSIFDSGNEILDHNDFRCISNFHSNMFSSNSSCLNSMSTPEQSYKVGAKGLLDSSFGLSCLAGLEEYSTDAELPDDSDRFLQVLDQLPVKFISSGFSNNDSRIWDHRSSNAEPPFNQDWGTTQPWSSVHQLQPHSDSGTVLGFMPNGSAYSDLVERHHSLMLVQGNLSTDVLGATDLSFFGSCSSLDNITEAPTLSSDGITW

SEQ ID NO: 183841 - protein, 664 aa, Zea Mays
MDRLQRRNPSSRTHATSLKHPRPPRVPTFQPQPASRSLQEPEPSSPVCDAKTAEYKFFKKLCEQPGHSSLSYKHSHQSLESNVYRQKQGSRNVTAPKKLHVHDNTVYCDEPLATPAKNEEIPGEKISVQSSHSEYDDKDTPQVGPHDRLLGIHVLTPISHTSFDVTGISVNVDREPISGHIFSGKRSKLLKIAAKTMSMGSAELFQRRSEFIVGILQRLGTNNIMRKQEGSMSHRKMDCRHALAIPEGHFDNLIDYKRSNFNPLAKLRNGKIPSSYASDEACEFMALPSGYNQGPGSIVDQKNDLSHGGSGASECMALPWACVNDTLSSDRKGDIVHNQVSNLLLEDVDRYVHGRHASANELSLNGQTDSYGQHRWDPMLSVTFLKSFHDRLYFPCQNEERHAVPYGISNTSEQPELCSSIELCTCSSIGLEIEDPKEAGLCGNSDAGFPSWLAQLVGKPTISSIFDSGNEILDHNDFRCISNFHSNMFSSNSSCLNSMSTPEQSYKVGAKGLLDSSFGLSCLAGLEEYSTDAELPDDSDRFLQVLDQLPVKFISSGFSNNDSRIWDHRSSNAEPPFNQDWGTTQPWSSVHQLQPHSDSGTVLGFMPNGSAYSDLVERHHSLMLVQGNLSTDVLGATDLSFFGSCSSLDNITEAPTLSSDGITW

SEQ ID NO: 183842 - protein, 649 aa, Zea Mays
MSMAVASLRSLARRQPRLRLPPAPLVVPGGRAALLSGAAEEAAPLAAAEAAAPPPVPGRKVLESFREEFEIGGRSIAFETGKMARFANGSVVISMEDTHVLSTVAAAKSSEPIRDFLPLTVDYQEKQYAQGVIPTTYMRREGAPKERELLCGRIIDRPIRPLFPPGFYHEVQIMVNVLSSDGKQDPDVMAANASSAALMLSDIPWNGPIGVIRVGRIDGAFILNPTVDELGLSDLNLVYACSRDKTLMIDVQAREISERDLQAGMKLAHSEAIKCIDPQISLAKRAGKKKKEYKISLISDTSYEKIRTFSEAPIEEVFTDSSYGKFERGGALEKITQSVKAKLEEENDEDSLKFLHKAVDTVRKQVIRKRIIEEGLRVDGRQLDEVRPLYCESNTYPLLHGSALFSRGDTQVLCTVTLGAPGDAQRLDSIVGPPTKRFMLHYSFPPFSIDEVAKRGGLNRREVGHGTLAEKALLAVLPPESDFPYTVRVNAEVMASDGSTSMASVCGGSMALMDAGIPVREHVAGVSVGLVSQVDPATGDISNYRILTDILGLEDHLGDMDFKIAGTRKGITAIQLDIKPAGIPLDIICESLEPARKARNQILDRMDQEISTARGINDGSSPRLATLSFSNESLRKLLFHRKKIEQETG

SEQ ID NO: 183843 - protein, 487 aa, Zea Mays
MASDGSTSMASVCGGSMALMDAGIPVREHVAGVSVGLVSQVDPATGDISNYRILTDILGLEDHLGDMDFKIAGTRKGITAIQLDIKPAGIPLDIICESLEPARKARNQILDRMDQEISTARGINDGSSPRLATLSFSNESLRKLLFHRKKIEQETGARVSISDGTVTIVAKTQEIMDKAIEKVEFLVGREIEVGRTYKGIVSSIKEYGAFVEFNGGQQGLLHISELSHQPVTKVSDVVTLGQSLSLRCIGQDMRGNIKLSLKATLPQPRIKKDLKNKDPLPSEVTGWAAVENMSSVDVDAQLSSTEHENGTTEEAAAFSTPSVIIRSAADCDAQDDANGSKKRAKVAKSSPRPNKPASECHDVRKATAKKATGATTKKTKKVKIEESVSNGLETSGSDVPEQSADNTSDQNQSPTKFQSGAMKLGDVVTAKVYQIRAYGLVLELSDGVRGMHKFEANGLKEFEVGQELVVKCSSFNAKGIPLFSLLD

SEQ ID NO: 183844 - protein, 498 aa, Zea Mays
MRREGAPKERELLCGRIIDRPIRPLFPPGFYHEVQIMVNVLSSDGKQDPDVMAANASSAALMLSDIPWNGPIGVIRVGRIDGAFILNPTVDELGLSDLNLVYACSRDKTLMIDVQAREISERDLQAGMKLAHSEAIKCIDPQISLAKRAGKKKKEYKISLISDTSYEKIRTFSEAPIEEVFTDSSYGKFERGGALEKITQSVKAKLEEENDEDSLKFLHKAVDTVRKQVIRKRIIEEGLRVDGRQLDEVRPLYCESNTYPLLHGSALFSRGDTQVLCTVTLGAPGDAQRLDSIVGPPTKRFMLHYSFPPFSIDEVAKRGGLNRREVGHGTLAEKALLAVLPPESDFPYTVRVNAEVMASDGSTSMASVCGGSMALMDAGIPVREHVAGVSVGLVSQVDPATGDISNYRILTDILGLEDHLGDMDFKIAGTRKGITAIQLDIKPAGIPLDIICESLEPARKARNQILDRMDQEISTARGINDGSSPRLGLYSTLFLLLA

SEQ ID NO: 183845 - protein, 70 aa, Zea Mays
MRSFTCLHVSGRQIFSSIALSSCSGDHTSERDANKAGKLLQIYTIIYCQETDARLLCRIDLSRQTVGELM

SEQ ID NO: 183846 - protein, 66 aa, Zea Mays
MEFEALRKELFVKVQSLYRELEQIRFENKQLPAIREGLHDIQEEISRARFVFCDLMYNALMWEMTP

SEQ ID NO: 183847 - protein, 66 aa, Zea Mays
MDVQFVSLLNACWLECRNRSQVLIKEGNSFGQLECPEETWEEVAEKVHKDQWLKFNGTMIYIIWNL

SEQ ID NO: 183848 - protein, 768 aa, Zea Mays
MCAICFDSMKPGLGQALFTAECSHMFHFHCISSSVKHGNHVCPVCRAKWKEIPFNRSLSSIVPRGRGGLNVNQARLPQQGAYMALLRQVPNRQREGPVLVTSEPSDFNDDEPLHKMEPANIGSSRTVEIKTYSEFSAIQQSSQDDFAVLIHLKAPYANPEQVIGRPVNATSVGYPTARAPVDLVTVLDVSGSMAGTKLALLKRAMGFVIQHLGPSDRLSVIAFSSTARRLFHLQRMSHSGRQQALQTVNSLVASGGTNIADALKKAAKVIEDRSHQNPVCSIILLSDGQDTYNIPSNIRGARPEYSSLVPSSILNRTFGLVPVHGFGFGVDHDSDALHSIAEASGGTFSFIEDEGVIQDAFAQCIGGLLSVVVQNMQVNVECVHPGVQLRSIKSGSYHSKVAAHGRNGSIDVGHLYADEERDFLLSVSLPHCREQTTLLKVACAYRDSLTNEEIKIQGGEVAILRPRSPVSEPVCMEVDRERNRVRAADAIEAARAAAERGALSDAVSILEDCRRILSETFSSRSGDRLCMALDAELREMQERMANRQRYEASGRAYLLSGLSSHSWQRATARGDSTDSDTLVYSYQTPSMVHMLQRSQNHCPSPQGPSQPRVLVKPQPRGGEAGLELSTSLFSVDVGSIKSTTTPSLCSELRPQIVVGVCTHGSREKGGYGDGAAEMRRRGAARTPRPARELRAPQRCRIWETSGGSQRSASAPQGGLPTADLRVAEAGTRSFEHARAGTREDEWTSRASAGAEKPHIMSGGAGGGV

SEQ ID NO: 183849 - protein, 774 aa, Zea Mays
MEGVWRKAKRALGASLCVRLPAVAGDREDGASERRASDALSLDSTAAAHASAPNTPAAPGTGALRRSKSGGKSSKMRCSPGRQILDDLMGRLGLDAPARLQHLFSRDFWDVAVSLLVCLDILRGALRRRMCAICFDSMKPGLGQALFTAECSHMFHFHCISSSVKHGNHVCPVCRAKWKEIPFNRSLSSIVPRGRGGLNVNQARLPQQGAYMALLRQVPNRQREGPVLVTSEPSDFNDDEPLHKMEPANIGSSRTVEIKTYSEFSAIQQSSQDDFAVLIHLKAPYANPEQVIGRPVNATSVGYPTARAPVDLVTVLDVSGSMAGTKLALLKRAMGFVIQHLGPSDRLSVIAFSSTARRLFHLQRMSHSGRQQALQTVNSLVASGGTNIADALKKAAKVIEDRSHQNPVCSIILLSDGQDTYNIPSNIRGARPEYSSLVPSSILNRTFGLVPVHGFGFGVDHDSDALHSIAEASGGTFSFIEDEGVIQDAFAQCIGGLLSVVVQNMQVNVECVHPGVQLRSIKSGSYHSKVAAHGRNGSIDVGHLYADEERDFLLSVSLPHCREQTTLLKVACAYRDSLTNEEIKIQGGEVAILRPRSPVSEPVCMEVDRERNRVRAADAIEAARAAAERGALSDAVSILEDCRRILSETFSSRSGDRLCMALDAELREMQERMANRQRYEASGRAYLLSGLSSHSWQRATARGDSTDSDTLVYSYQTPSMVHMLQRSQNHCPSPQGPSQPRVLVKPQPRGGEAGLEVNIIWLGILGNLRWGLWW

SEQ ID NO: 183850 - protein, 50 aa, Zea Mays
MSHVKNTGNAYILHNERETKNLKWLRFFRFFSICFSYKTDCTQKFPMLFV

SEQ ID NO: 183851 - protein, 392 aa, Zea Mays
MATRPGPLTEWPWQRLGNFKYLVMAPVAVHGARRVVARGWGDIDLAFALILPSLLLRMVHNQIWISAARYQTARSKHRIVDRGIEFDQVDRERGWDDQIILNGLLFYVGYLAIPSARRMPAWRSDGAVAMALLHAGPVEFLYYWFHRALHHHFLYSRYHSHHHSSIVTEPITSVIHPFAEHMVYYVLFAIPMLSTLYMGNASVLGIVLYIAYIDFMNNMGHCNFELVPSTMDKSSDQLYETSLRGAEETPGLVHLTHMTDLQSVYHLRIGFASVASRPSATGAMWWYMWVLWPVAWLSMALAWAYGSSAFVVERIKLGKLRMQTWAVPRYNFQYGLSWERESINGLIERAILDADARGVKVLSLGLLNQAKQLNGGGELFRHRFSSTQALLR

SEQ ID NO: 183852 - protein, 272 aa, Zea Mays
MAMAKAWKLQAVIHPFAEHMVYYVLFAIPMLSTLYMGNASVLGIVLYIAYIDFMNNMGHCNFELVPRWMFQLFPPLKYLMYTPSFHSLHHTQFRTNYSLFMPLYDYVYSTMDKSSDQLYETSLRGAEETPGLVHLTHMTDLQSVYHLRIGFASVASRPSATGAMWWYMWVLWPVAWLSMALAWAYGSSAFVVERIKLGKLRMQTWAVPRYNFQYGLSWERESINGLIERAILDADARGVKVLSLGLLNQAKQLNGGGELFRHRFSSTQALLR

SEQ ID NO: 183853 - protein, 409 aa, Zea Mays
MATRPGPLTEWPWQRLGNFKYLVMAPVAVHGARRVVARGWGDIDLAFALILPSLLLRMVHNQIWISAARYQTARSKHRIVDRGIEFDQVDRERGWDDQIILNGLLFYVGYLAIPSARRMPAWRSDGAVAMALLHAGPVEFLYYWFHRALHHHFLYSRYHSHHHSSIVTEPITSVIHPFAEHMVYYVLFAIPMLSTLYMGNASVLGIVLYIAYIDFMNNMGHCNFELVPRWMFQLFPPLKYLMYTPSTMDKSSDQLYETSLRGAEETPGLVHLTHMTDLQSVYHLRIGFASVASRPSATGAMWWYMWVLWPVAWLSMALAWAYGSSAFVVERIKLGKLRMQTWAVPRYNFQYGLSWERESINGLIERAILDADARGVKVLSLGLLNQAKQLNGGGELFRHRFSSTQALLR

SEQ ID NO: 183854 - protein, 283 aa, Zea Mays
MEMLYQPAVLNCGHVYCVSCLSSLNEETLKCHVCGSLHPGDFPNVCLDLDHFLEEYFPAEYELRGQKVQFKKDQCNRETSSSGTSGRKGSTRALHAEDPSNIHIGVGCDSCGVYPIRGKRYKCQDCTELIGFDLCEACYNSSSKLPGRFNQRHTPNHRMEVDNSALVHRILRHHGIPEEGPEGLMMEVVGPDAMVQILIDNQGMEEGNDEGPGEAAIEEPVGSLGSMSRLSHLFMYNPEMEDGNDEDSGEEAAIEEPVGSLGAMAPLFMYDQEMEDNEEDQAH

SEQ ID NO: 183855 - protein, 341 aa, Zea Mays
MQTYSPQIIEFLNYKTNVGSYKENRNEDSKARPPQEVPLNDSVPDEHLKKIKLEDVSCPLCMEMLYQPAVLNCGHVYCVSCLSSLNEETLKCHVCGSLHPGDFPNVCLDLDHFLEEYFPAEYELRGQKVQFKKDQCNRETSSSGRKGSTRALHAEDPSNIHIGVGCDSCGVYPIRGKRYKCQDCTELIGFDLCEACYNSSSKLPGRFNQRHTPNHRMEVDNSALVHRILRHHGIPEEGPEGLMMEVVGPDAMVQILIDNQGMEEGNDEGPGEAAIEEPVGSLGSMSRLSHLFMYNPEMEDGNDEDSGEEAAIEEPVGSLGAMAPLFMYDQEMEDNEEDQAH

SEQ ID NO: 183856 - protein, 185 aa, Zea Mays
MDLPPNPESPGGGGDGGGGGGAGGSSGGASSSAPGGGTPQTPSRYEAQNLAQCSGAHVLEFLRYLDQFGKTKVHTAACPFFGHPSPPAPCPCPLRQAWGSLDALVGRLRAAFEENGGRPESNPFAARAVRLYLREVREHQARARGVSYEKKKRKKPQPADHASGSGGQGPHHPPPPAPPPAGAAC

SEQ ID NO: 183857 - protein, 102 aa, Zea Mays
MGGNREERGCAPPWGGNPLPRSRLPREVLGDFPQVLGRTCGAALLVINCRFCSNSSPSYRSAGSPPCNEDREKHYAIHRNGKCAYMLLTAVRLASSKLGDLP

SEQ ID NO: 183858 - protein, 585 aa, Zea Mays
MSFRHLNAGIFGTGSDGHTLPSEVTRAAMLVRINTLLQGYSGIRFEILEAITKLLNTGVSPCLPLRGTITASGDLVPLSYIAGLITGRPNAQAVTVDGRKVDAAEAFKIAGIEGGFFKLNPKEGLAIVNGTSVGSALAATVMYDANVLAVLSEVLSAVFCEVMNGKPEYTDHLTHKLKHHPGSIEAAAIMEHILDGSSFMKQAKKLNELDPLLKPKQDRYALRTSPQWLGPQIEVIRAATKSIEREVNSVNDNPVIDVHRGKALHGGNFQGTPIGVSMDNARLAIANIGKLMFAQFSELVNEFYNNGLTSNLAGSRNPSLDYGFKGTEIAMASYCSELQYLGNPITNHVQSAEQHNQDVNSLGLVSARKTAEAIDILKLMSSTYIVALCQAVDLRHLEENIKASVKNTVTQVAKKVLTMNPSGELSSARFSEKELISAIDREAVFTYAEDAASGSLPLMQKLRAVLVDHALSSGDAEREPSVFSKITRFEEELRAVLPQEVEAARVAVAEGTAPVANRIADSRSFPLYRFVREELGCVFLTGERLKSPGEECNKVFVGISQGKLVDPMLECLKEWDGKPLPINVK

SEQ ID NO: 183859 - protein, 223 aa, Zea Mays
MTAGFQLGVIGSLTLSVASSVAIVICNKALISTLGFPFATTLTSWHLMVTFCTLHVAQRLRFFEPKAIDGQTVVLFGLLNGTSIGLLNLSLGFNSIGFYQMTKLAIIPFTVLLETIFLKKRFSETIKFSLLVLLLGVGIASVTDLKLNCLGSVLSGLAIATTCVGQILTNTIQRKLKVSSTQLLYQSAPYQAAILFATGPFVDHLLTGRSVFAHRYTFPVVGA

SEQ ID NO: 183860 - protein, 372 aa, Zea Mays
MPAFAGGAAEPPLADSYYALLRRGNDDEGAYTTSTAPWDDVSLPVAECELPMIDVGCLTTADDGSSPEAEAERAACAAAIARAAEEWGFFQVRNHGVPQELLEEMRREQARLFRLPFETKATAGLLNDSYRWGTPTATSPRQLSWSEAFHVPLAGVSGSGTTCDFGDLTTLRDVTREVAGAMSKLAGTLARVLAEALLGRRPAGERFPEGCDETTCFLRLNRYPACPISPGALGLVPHTDSDFLTVLCQDQQVGGLQLMKGDSWVAVKPIPGTLVVNIGDLFQAWSNNRYKSVEHKVMTNARTERYSVAYFLCPSYDSPIGTCEEPSLYRTFTFGEYRRKVQEDVKRTGKKLPPYKNVAGSSGCVCACDRCR

SEQ ID NO: 183861 - protein, 282 aa, Zea Mays
MQMSTGSNHYGVFPHPFCNQHVVSFQTSSITSGSGAIPVCLDTSSGMNGDMAMLNTTSSTIVSTGSPNMVADSSCQNLKYSAPLAVEWSYPELQLLNDGLNKYANEPGIMKYIKIAATLPDKTVRDVAMRCQWMAARKEATRRRKPEERYLGKKIKDRKDKMAQPSSWGTNPPVQAEMRSSSFMPRNAKHNGFLSGDSQIDHEMLNILEENARLLNQIEVNILTSQAHNNINLFHHIRRNINGLLQSMCQIPGIMSKMPPLPVSVDERLASYILPRAHTHCM

SEQ ID NO: 183862 - protein, 219 aa, Zea Mays
MSRKKEATRRRKPEERYLGKKIKDRKDKMAQPSSWGTNPPVQAEMRSSSFMPRNAKHNGFLSGDSQIDHEMLNILEENARLLNQIEVNILTSQAHNNINLFHHIRRNINGLLQSMCQIPGIMSKMPPLPVSVDERLASYILPRAHTVAFLIKDNIQRFNFNDETGSDTSDRAISYLSRILEPGTDTSNNDIRNLIFGYSDSAMVGYKCSNSDTNYPYIV

SEQ ID NO: 183863 - protein, 197 aa, Zea Mays
MQMSTGSNHYGVFPHPFCNQHVVSFQTSSITSGSGAIPVCLDTSSGMNGDMAMLNTTSSTIVSTGSPNMVADSSCQNLKYSAPLAVEWSYPELQLLNDGLNKYANEPGIMKYIKIAATLPDKTVRDVAMRCQWMAARKEATRRRKPEERYLGKKIKDRKDKMAQPSSWGTNPPVQAEMRSSSFMPRNAKHNGFLSGG

SEQ ID NO: 183864 - protein, 266 aa, Zea Mays
MQMSTGAIPVCLDTSSGMNGDMAMLNTTSSTIVSTGSPNMVADSSCQNLKYSAPLAVEWSYPELQLLNDGLNKYANEPGIMKYIKIAATLPDKTVRDVAMRCQWMAARKEATRRRKPEERYLGKKIKDRKDKMAQPSSWGTNPPVQAEMRSSSFMPRNAKHNGFLSGDSQIDHEMLNILEENARLLNQIEVNILTSQAHNNINLFHHIRRNINGLLQSMCQIPGIMSKMPPLPVSVDERLASYILPRAHTAQVLGSSHLKEEPRVW

SEQ ID NO: 183865 - protein, 249 aa, Zea Mays
MNGDMAMLNTTSSTIVSTGSPNMVADSSCQNLKYSAPLAVEWSYPELQLLNDGLNKYANEPGIMKYIKIAATLPDKTVRDVAMRCQWMAARKEATRRRKPEERYLGKKIKDRKDKMAQPSSWGTNPPVQAEMRSSSFMPRNAKHNGFLSGDSQIDHEMLNILEENARLLNQIEVNILTSQAHNNINLFHHIRRNINGLLQSMCQIPGIMSKMPPLPVSVDERLASYILPRAHTAQVLGSSHLKEEPRVW

SEQ ID NO: 183866 - protein, 192 aa, Zea Mays
MASTRIMKYIKIAATLPDKTVRDVAMRCQWMAARKEATRRRKPEERYLGKKIKDRKDKMAQPSSWGTNPPVQAEMRSSSFMPRNAKHNGFLSGDSQIDHEMLNILEENARLLNQIEVNILTSQAHNNINLFHHIRRNINGLLQSMCQIPGIMSKMPPLPVSVDERLASYILPRAHTAQVLGSSHLKEEPRVW

SEQ ID NO: 183867 - protein, 285 aa, Zea Mays
MQMSTGSNHYGVFPHPFCNQHVVSFQTSSITSGSGAIPVCLDTSSGMNGDMAMLNTTSSTIVSTGSPNMVADSSCQNLKYSAPLAVEWSYPELQLLNDGLNKYANEPGIMKYIKIAATLPDKTVRDVAMRCQWMAARKEATRRRKPEERYLGKKIKDRKDKMAQPSSWGTNPPVQAEMRSSSFMPRNAKHNGFLSGDSQIDHEMLNILEENARLLNQIEVNILTSQAHNNINLFHHIRRNINGLLQSMCQIPGIMSKMPPLPVSVDERLASYILPRAHTFLAAVI

SEQ ID NO: 183868 - protein, 331 aa, Zea Mays
MSVNILDLFGELRPNMSRYLSIEELVAALVELEENERSAPVEKVENERHSDNESHKRQARDAGPSVNGGSAANGIEENGKDHEIADSESYSDSGSIDGREDEDILSEDKSNDGSDNEGDDEDDGIPVGSDEDENVEVRQKVMKVDPKEQEDFDRELKALLQESLESRKSEARSRLPLNMMVPMNVLEGSSKDSRATESESGEETVDEEGGNAGGSSKVRVKVLMKKGHKQQTRQMLIPADSSIVRSTKQQEAAELEEKQSIKRRILEYNEREEEELNGASQMGNWGQGATNTSSIRSGGRGSWDGSARGGGRQRHHIAGSGGFYHSYGRRR

SEQ ID NO: 183869 - protein, 648 aa, Zea Mays
MDELKSVNLSKFVSEAVSYICEAKLRSADIQAAVQVCSLLHQRYKDFSPCLIQGLLKVFFPGKSVDDLDADKNSRAMKKRSTLKLLIELYFVGIVEDASIFVNIIKDLTSAEHLKDREGTQTNLSLLSTFARQGKFFLGLQPHGQEAYDEFFKELNVTAEQKKFFKKALNSYYDTVAELLQSEHVSLRLMEAENAKVLSAKGELSDENTASYEKLRKSFDQLLRGVSSLAESLDMQPPVMPDDGNTTRVTTRTDALPSSGKDSSALEPIWDDEDTKAFYESLPDLRAFVPAVLLGEVEPKSNEQHAKGREQSSESTSEQETELHDDFQTSATEHQLEVKLDGGVKESDDKDKEKGKDGEKEKSKEKDLDKKNDREKEKGRAMDGASLDNILQRLPGCVSRDLIDQLTVEFCYLNSKANRKKLARALFNVNRTSLELLPYYSRLVATLSTCMKDVPSMLLSMLEEEFNFLINKKDQINIETKIKNIRFIGELCKFKMAPPALVFSCLKSCLDDFSHHNIDVACNLLETCGRFLYRSPETTIRMANMLEILMRLKNVKNLDPRHSTLVENAYYLCKPPERSARISKVRPPLHQYIRKLLFSDLDKSSVEHVLRQLRKVTLGRMSTIPSEVLSKGSQRKVQPSSSDCSSHC

SEQ ID NO: 183870 - protein, 732 aa, Zea Mays
MDNAQSENRIDTKQDDDVRQIKHDDEEARLEEYKKIIDQKTSLRRSNLNPERPDANYLRTLDSSIKRNTTVIKKLKTINDEQKDGLMDELKSVNLSKFVSEAVSYICEAKLRSADIQAAVQVCSLLHQRYKDFSPCLIQGLLKVFFPGKSVDDLDADKNSRAMKKRSTLKLLIELYFVGIVEDASIFVNIIKDLTSAEHLKDREGTQTNLSLLSTFARQGKFFLGLQPHGQEAYDEFFKELNVTAEQKKFFKKALNSYYDTVAELLQSEHVSLRLMEAENAKVLSAKGELSDENTASYEKLRKSFDQLLRGVSSLAESLDMQPPVMPDDGNTTRVTTRTDALPSSGKDSSALEPIWDDEDTKAFYESLPDLRAFVPAVLLGEVEPKSNEQHAKGREQSSESTSEQETELHDDFQTSATEHQLEVKLDGGVKESDDKDKEKGKDGEKEKSKEKDLDKKNDREKEKGRAMDGASLDNILQRLPGCVSRDLIDQLTVEFCYLNSKANRKKLARALFNVNRTSLELLPYYSRLVATLSTCMKDVPSMLLSMLEEEFNFLINKKINIETKIKNIRFIGELCKFKMAPPALVFSCLKSCLDDFSHHNIDVACNLLETCGRFLYRSPETTIRMANMLEILMRLKNVKNLDPRHSTLVENAYYLCKPPERSARISKVRPPLHQYIRKLLFSDLDKSSVEHVLRQLRKVTLGRMSTIPSEVLSKGSQRKVQPSSSDCSSHC

SEQ ID NO: 183871 - protein, 509 aa, Zea Mays
MDNAQSENRIDTKQDDDVRQIKHDDEEARLEEYKKIIDQKTSLRRSNLNPERPDANYLRTLDSSIKRNTTVIKKLKTINDEQKDGLMDELKSVNLSKFVSEAVSYICEAKLRSADIQAAVQVCSLLHQRYKDFSPCLIQGLLKVFFPGKSVDDLDADKNSRAMKKRSTLKLLIELYFVGIVEDASIFVNIIKDLTSAEHLKDREGTQTNLSLLSTFARQGKFFLGLQPHGQEAYDEFFKELNVTAEQKKFFKKALNSYYDTVAELLQSEHVSLRLMEAENAKVLSAKGELSDENTASYEKLRKSFDQLLRGVSSLAESLDMQPPVMPDDGNTTRVTTRTDALPSSGKDSSALEPIWDDEDTKAFYESLPDLRAFVPAVLLGEVEPKSNEQHAKGREQSSESTSEQETELHDDFQTSATEHQLEVKLDGGVKESDDKDKEKGKDGEKEKSKEKDLDKKNDREKEKGRAMDGASLDNILQRLPGCVSRDLIDQLTMFQVCFCLCLKRSSTF

SEQ ID NO: 183872 - protein, 61 aa, Zea Mays
MVELEKGASTRYMDRPTAHHTKYIFTPKVHKKLERIRHNPNSLSARFLAKLLVVDNFYFKI

SEQ ID NO: 183873 - protein, 163 aa, Zea Mays
MLGKVERVTDVVFTLDDGTGKIDVNRWENEASDAKEMADANNENYVIVIGGLKGFQGKRHVVAYAVRRVTNFNEITCHFLHCIQVHMELTGLKVDGNYISNLVLSVFHDPSVMDQEHGLHIKDVIDRLKLPDDVVSAAIQGHVDVGNIYNTIDDFHYKSVRNG

SEQ ID NO: 183874 - protein, 183 aa, Zea Mays
MLGKVERVTDVVFTLDDGTGKIDVNRWENEASDAKEMADANNENYVIVIGGLKGFQGKRHVVAYAVRRVTNFNEITCHFLHCIQVHMELTGLKIYSSAATYGGVAHAPSQPNPVDGNYISNLVLSVFHDPSVMDQEHGLHIKDVIDRLKLPDDVVSAAIQGHVDVGNIYNTIDDFHYKSVRNG

SEQ ID NO: 183875 - protein, 252 aa, Zea Mays
MYGGGGGGGHYDGGSGGAGNANALFGGGGFMPSQSTVVPENSGLSKGRSAQTLLPLTVKQTMDAAQTSGDRSNFAINGVEVSTIRLVGRMLGKVERVTDVVFTLDDGTGKIDVNRWENEASDAKEMADANNENYVIVIGGLKGFQGKRHVVAYAVRRVTNFNEITCHFLHCIQVHMELTGLKVDGNYISNLVLSVFHDPSVMDQEHGLHIKDVIDRLKLPDDVVSAAIQGHVDVGNIYNTIDDFHYKSVRNG

SEQ ID NO: 183876 - protein, 261 aa, Zea Mays
MYGGGGGGGHYDGGSGGAGNANALFGGGGFMPSQSTVVPENSGLSKGRSAQTLLPLTVKQTMDAAQTSGDRSNFAINGVEVSTIRLVGRMLGKVERVTDVVFTLDDGTGKIDVNRWENEASDAKEMADANNENYVIVIGGLKGFQGKRHVVAYAVRRVTNFNEITCHFLHCIQVHMELTGLKIYSSAATYGGVAHAPSQPNPVDGNYISNLVLSVFHDPSVMDQEHGLHIKDVIDRLKLPDDVVRTRLAACFPAHRFFKFL

SEQ ID NO: 183877 - protein, 347 aa, Zea Mays
MHVGIPFMASCIPNLQLLLLFVHMHVGIPISTKRLDIGEEGKVNGDHRTSDSLHVLPAQLGLSTAELPWLVGDAASQKTRFTFWLQTMERAKSFRSILVNTFPVEATAADAGTVSQQRVLQVLQVGPLLSLPPKGFDDDGCITKGDDLSHDSTSKNPSMWQADETCVEWLDAQRAGSVVYVSFGSWVSSIGRDAINELALGLAATGRPFLWALKDEPSWREGLPSQYAEAIQNGVRLLCYPVSGDQFINCAYIVKVWETGIRLPSTNRNVVEDCIERIMEGEEGRRMQVNVDEMRERVVMGFDRLARYSAPSYSLRSEIYCRFLKFILKYNTFYIMTIWQKLWKRKS

SEQ ID NO: 183878 - protein, 513 aa, Zea Mays
MGAKAEHVAVCPAAATVVLVPFPAQGHISPMLRLARALAERGVAAIVAVPDFVYRRLVSACGQVRTRVEVELASMHSGVPDDGVGEPPGFAGFARAMEHHMPTSLEAMLTAQRGRGVACLVADVLASWAIPVATRCGVSAVGFWPAMLATYRVVAAIPELVDKGLISDYGIPISTKRLDIGEEGKVNGDHRTSDSLHVLPAQLGLSTAELPWLVGDAASQKTRFTFWLQTMERAKSFRSILVNTFPVEATAADAGTVSQQRVLQVLQVGPLLSLPPKGFDDDGCITKGDDLSHDSTSKNPSMWQADETCVEWLDAQRAGSVVYVSFGSWVSSIGRDAINELALGLAATGRPFLWALKDEPSWREGLPSQYAEAVAGRGKIVAWSPQEDVLRHKAVGCYLTHCGWNSTLEAIQNGVRLLCYPVSGDQFINCAYIVKVWETGIRLPSTNRNVVEDCIERIMEGEEGRRMQVNVDEMRERVVMGEARCAANRNLDSFVDEIMKNENLLARRPCPLT

SEQ ID NO: 183879 - protein, 348 aa, Zea Mays
MEQDHSEKRSGIEAVIVAPSRELGMQIVREVEKILGPNDKRLVQQLVGGANRSRQEEALKKNKPIIVVGTPGRISEISAADMHRILEHVGRRPGGTSRDILGPLARRSERQTILVSATIPFSVIRAARSWGHDPVLIRAKSVVPLDSITVPRPALSQSDANPSSSSQSVNQAAVGSLPPSLEHYYCTAKAQHKVDTLRRCIHALEAQTVIAFMNNTKPLKDVVFKLEARGIKATELHGDLGKLARSTVLKKFKDGEFRVLVTNELSARGLDVPECDLVVNLDLPTDSTHYAHRAGRTGRLGRKGIVVTICEESEGFVVRKMRKQLDVAIKPCEFTEGELVVHKEEDVE

SEQ ID NO: 183880 - protein, 192 aa, Zea Mays
MPTALERVFWGFGDGSTIPVYDTPIGKMGALICWENRMPLLRTAMYAKGIEIYCAPTVDCMPTWLSSMTHIALEGGCFVLSACQFCRRKNYPPPPEYTFCGLEEEPSPESVVCSGGSVIISPLGTVLAGPNYESEALLTADLDLGEIVRAKFDFDVVGHYSRPEVLSLVVKSDPKPAVSFISAAECRYERSG

SEQ ID NO: 183881 - protein, 351 aa, Zea Mays
MALVPSRSDSEALIPEVEMNAGADQTATTARVTVVQASSVFYDTPATLGAAEKLVAEAAGYGSQLVLFPEVFVGGYPHGSTFGLVVGNRTAKGKEDFQKYHASAIDVPGPEVSRLSALAGKYKVFLVIGVVERAGYTLYNTVLSFDPLGKYLGKHRKVMPTALERVFWGFGDGSTIPVYDTPIGKMGALICWENRMPLLRTAMYAKGIEIYCAPTVDCMPTWLSSMTHIALEGGCFVLSACQFCRRKNYPPPPEYTFCGLEEEPSPESVVCSGGSVIISPLGTVLAGPNYESEALLTADLDLGEIVRAKFDFDVVGHYSRPEVLSLVVKSDPKPAVSFISAAGRDDDYVQT

SEQ ID NO: 183882 - protein, 110 aa, Zea Mays
MCSSSPSRCLLPFSSSIISCLCFRIPRVVRSCKFFPHSWYHYEGFYQLCRGLKLLNRTIIGGRLGTTFVRRLSLRSKVLTLSLIVVCFAHKKKKKMKSKAFVRNKQKANP

SEQ ID NO: 183883 - protein, 202 aa, Zea Mays
MEYNNAKLPLSNAKAAPLQGTVEVIEHSMPKDEAIVVESHGILEVSEHSMTKDGDEAAQIQGTIEVSEHSFPKDECKLAQCQGPFRFPEHSRPKDDSGNVAKHDMDTPETCKTADFPALSDQTESEIMEDLTDKPDPGNQQREIEAIKFNLKHYEKPLNANDSNAKTHAREDNPKLEESANTGLLGSLKSFAYGIRNFWKNL

SEQ ID NO: 183884 - protein, 345 aa, Zea Mays
MQQHSQPPPPPPGRLVPSRRLLSQAKTSLSLSSQILLRNPPLRSVMQAFARLSSAASRKVIAGVSSATTRSCYRTSRGLAHAASLPAQEPPPKGQKRITKQERRTRIMEFIEKASNDGKFPTIKNIRQQVGGSHYTAREIIQEMEYNNAKLPLSNAKAAPLQGTVEVIEHSMPKDEAIVVESHGILEVSEHSMTKDGDEAAQIQGTIEVSEHSFPKDECKLAQCQGPFRFPEHSRPKDDSGNVAKHDMDTPETCKTADFPALSDQTESEIMEDLTDKPDPGNQQREIEAIKFNLKHYEKPLNANDSNAKTHAREDNPKLEESANTGLLGSLKSFAYGIRNFWKNL

SEQ ID NO: 183885 - protein, 163 aa, Zea Mays
MPEIPDIPKCLPDLRASKQWEDRFIVDFEETRMVLSELDNSDEPSVSSGTKISTKPGSGTEPQTDPTLTMIRSMDAVSRAATLRNYIDMIQSLDALSRNNCMWLFALCVAVHTPLDAETCASLRSLLRKCASILATKTEMDDEVVMLNILMTISGRYFGQDES

SEQ ID NO: 183886 - protein, 88 aa, Zea Mays
MFPVREAWMMYQQGRLLEIVDASMGSYPEKEVLRYIKVGLACTQATPSSRPTMRQSEWDTTRKGTTELEAQIPKKRGHILLQDDYNIL

SEQ ID NO: 183887 - protein, 329 aa, Zea Mays
MALVRRCLCGSEEDCRALLGMENLRLFSYREIRAGTNNFDQSNKLGRGGFGTVYKGVLRDGTEFAAKVLSSESEQGIKEFLAEIESISQVKHANLVRLLGCCVQRKKRILVYEYLANNSLDHALKGAAADLPWSTRSGICLGTAKGLSYLHEEHEPNIVHRDIKASNVLLDRDYLPKIGDFGLAKLFPDNITHISTAVVGTSGYLAPEYFVHGQLTKKADVYSFGVLVLEIVSGRRVSQTIQSDMFPAWMMYQQGRLLEIVDASMGSYPEKEVLRYIKVGLACTQATPSSRPTMRQSEWDTTRKGTTELEAQIPKKRGHILLQDDYNIL

SEQ ID NO: 183888 - protein, 138 aa, Zea Mays
MDDVPARQAARDRGREHGELPGEGGAPVHQGGAGLHAGHAQQPPHDAPGACLAVGTEMLPPSFAEHRGHHTAPALGGLPAGPLIHASPRARWPAAAPSAATSPKQVLSLNAQPAIRHVTETDIVTCEAAFVLSRNHLR

SEQ ID NO: 183889 - protein, 425 aa, Zea Mays
MSGDHTKKEMVTGEKPATSHGKAPSGESRNKGKEKESPSHKSRRSGDKKKKMRKVVYYETDTSSPSTSGSDTPSVTSKRHERKKFSKIPQRYPRISKHTPLLSVPLGKPPTFDGEDYARWSDFMRFHLTSLHKSIWDVVEFGVQVPSVGDEDYDEDEVAQIQHFNSLATTIFLAYLSREEYNKVQGLKSAKEIWDTLKTAHEGDEVTKITKRETIEGELGRFRLRQGEEPQDMYNRLKTLVNQVRNLGSKKWDDHEMVKVILRSLVFLNPTQVQLIRGNPRYTLMTPEEVIGNFVSFELMIKGSKKINELDGPSTSKAQPVAFKATEEKKEESTSSRQPIDASKIDNEEMALIIKSFRQILKQRRGKDYKPRSKKVCYKCGKPGHFIAKCPLSSDSDRGDDKKGRRREKKRYYKKKGGDAHVCRE

SEQ ID NO: 183890 - protein, 198 aa, Zea Mays
MTSLRSMDYTLLPDLTTYKKHAIIQVHVSRKWSFHGATENGPLQHIDMVLSDCKGNSMDAEIPANLAEEKGALIETNQIYNIRRFRVTAAKTAYKPIDGDKMIQFTIYTIIKPASNPPPTFPLYIYQLTPFEEIESQIQHKTKFLDVLGTITEVTALKTVHIEGQLSPTIIRDVMIEDLRCLLKWWCGLPLVFQSCNT

SEQ ID NO: 183891 - protein, 859 aa, Zea Mays
MPSSSSGPPSSDVRPIPYLDECDAPRRKRRHSASAIYTPPNITATQARATRRHLLNQSRITRKGLTAKTLTNFHTGQFTTEYVEALKASYPNRSYYGTPDYECSYCHAVFWYAERVRSNQQDSSIRYNNCCKGGKISIPPFKPRPKPLASLARFDGDATSRKFIRNIRQYNCLFAFTSMGAQIDNSVNDGRGPPLFKICGQVHHRIGTLLPDDGCPPRFIQLYIYDTTNEVQNRINALDSGDRTQDNFDSVIIRNLIKMLDDHNTFVKKFRMARDRLTDNPNEEFTIRLIRAKEGDPIQYNLPTTDELAMLVVGDFTLDTFKRDIIIETQNKELKRISSLHPAYMALQYPLLFPFGERGFQVGVLYNGATSSGQNARKHLTMQLYYCYQFHYRKNQPNPYLCYAMLSSQAKVDARACIDENRLNYIINNQKNLRMESIQGITDAVSRGCISGEQMGKTITLPASHTGGRRYMIQNYHDDIAICRVHGPPDFFLTFTCNPNRQEILESLSQPGQTPSERSDIIVRVYHMKLNDLLHHIRNGSIFGPCTAVLYTTEFQKRGLPHSHIIFWVSTDTTQPTPALIDSFINAEIPDPLVDPLAYCLVAEHMIHGPCDSLNPHSPCMKNDKCSKNYPKQLCEITTLDNQGFVTYKRPNNGRYIIKSGNKLDNRWVVPYGKALLKIYQAHINIEWCNKTIFIKYLFKYVTKGPDCSKAYLQKLRNDEEAPYDEATDAKNEVKEYLDSRYLCDKDSAWRILGYEIHRHYPAVERMHVHLPNENYITYNATANMFEILSEKFLRKTMLTEWFTTNVQNENARNLTYIDFPSKWRWDDKTRSWKSREQKEGKIGRIYYVHPSAGEKYYL

SEQ ID NO: 183892 - protein, 267 aa, Zea Mays
MEQTRTGGAGEQPRGAPGEEAAKRIIVGGDAPASGTSGSGCFDCNICLECATEPVVTLCGHLYCWPCIYEWLRHDVAEAGARSSARRQCPVCKAAVSPDALVPLYGRGGSSSAKKPLASIPRPRRPALRQSTHDSGSGGHHHHHRHAETSTPARSLRHPAHAHAAQFDALLSAPFGDRGMLHSTTSTTGGMLGGMAVAVLPLVLRGQARVPGMYYPSPYHLMSPRQRRWHVEDTILRLRATRRALYIAKGEIWIWCWCGSDLYLVIA

SEQ ID NO: 183893 - protein, 1750 aa, Zea Mays
MRTRFLTADYFAPSPSAAASSDLAIALASLPFPSLPVPTLPPEPHLTPFPFSADFLPAVSVAGDDLDSLPFDSAVTELLTAVIPQPLPVPDIPVADEGLDDYLYGRGVYGNAFSSTDPVAFRVFKGLEDSHTNGDKEEGLNLEGSAVTKRGDLLEALFEVPELDFLSVLQKKIASFDDEEPDACAGTYSFGVRDMKIIPDFIDIDTETRIPYAAEFAESIYQVEVPVKHDDDDNCPYAKDSYCMEIIGLENGQIIPQLEVSMNSWELDECPAKTMISNFFHSIIEHLFDGAQVCLPSFGSNEFLRPCDIDIFALVCKDAPLVEYQADKPITANDVAVMDFVRINDGILLDKKSALYPLKPDGTCSHFPCFILFEEVKIIDFPSKDAFKSLVLIQSEKAEMNTSEEIFKDDFDQAKHFYESVVSSELALVDDTFKSLPTPILHDDKAMRSMLPPIEEVLCSLKPLPLSAADGIYLDWHLLSEGPCNRESCSTYESMVEEVKPCSLNSELQISGQQMPALDIGFLEDFPRSAKPQHEDKQNEVYVPGPISHDPSANLEATQKNMLENVVRGHTHMDKLSSEKESSLFESTSQSNGLSFYLNVRNGTNKVRKAEDISTLDIPSSKQAASISTRPKVNKLIEIHPVNLSDIIQGLINDIHVSYTSALQESAYLRHSFSDGQGLSISKQKLLELITGEGSEGLYSCCKYEDKMELIVLYALKQVAYYLCFFGLHAAYLYVGNLTGTFEIIPERLRHLQRCIGEARLKAEKQLQESHPSLSVIETILRSNTQIDQKILIVSDRAFWLPLGQKLTAMKITSVEFGTYHSTTYSDAVIETNSKRCMLQELWKSDCILLDNKNIPASFPFSEFCMIVEYGGPNKSSILLSLAPKLDGLPPLHFLYVTVDGEGLPNALVEDNHTDPDLKSTLDAALHTLQKDLQEKMNKMRIVDSLNFIPATNQQQHLQTNHLTVDSSKKIPADVQLHNAGNLNEKNIVDSHNLVTATEQPNGLNQITIANLQNFVPVVEKSSSTVVSANVIKAPQVNQSAGVLPLSEKMDSTKAGRLPGPEVAIVVNTGNHGKNMLFSRRSSYQQILALERGGMQVVERDVDLPVDLILTAAVCLLWYDTRTSGSSELTISAGTSGITNFLEDIATNVLMALSFCFCGCIMVFEGENHLLSAVMEASDSLYASAVNLDMNLQLFFSEMPKSTDQIILNCIRNAVRINQALCPQITESESLVESFLTAFPSVSPLSAHMILSSGSLMDFLRWSHEQRTQAVEKYHLPPQSISLFSALCKFGELGESKSVMTECSSVDSDISSTLLQSPRKKKRRAAQDFSVAVSNPAFPNPCTQLHGDCVENDKIFSPPKLRKFFHIEDTMSDLPEVFMIDQRLNMGSEGVSCQPRKYDVDAVTGINIIDDDFINELTPNFRTYNERTSSMVDTCNFSKQSELGAKQPIRSSFPASLPSVCTTSSHPTFPSALEINNDPGSWDVPCSINQTWAGHVHGDFATSSGRNDQGVRYHEPRQEIMQTPVPSLSFLKQDFGCHGASQGSGWEIDYLRRMNENRKACREQSRCSVSTQPNSRTRDGSSRILSAPPIESFRYERNKDAPFRDQNRSDIESFRYRRDINTLLRDQSPSNEVRRYGKGRGGTKAQSHRVRKDFKAQPSINHEKSIMPSIEPTWTPLDKRARQKLTFATYGNEKQSKLVWRHQSSPGVGCGFPKKYHEEGSGFTAVILLTCVCIYDARMAAWIAIHFLKL

SEQ ID NO: 183894 - protein, 1718 aa, Zea Mays
MRTRFLTADYFAPSPSAAASSDLAIALASLPFPSLPVPTLPPEPHLTPFPFSADFLPAVSVAGDDLDSLPFDSAVTELLTAVIPQPLPVPDIPVADEGLDDYLYGRGVYGNAFSSTDPVAFRVFKGLEDSHTNGDKEEGLNLEGSAVTKRGDLLEALFEVPELDFLSKKIASFDDEEPDACAGTYSFGVRDMKIIPDFIDIDTETRIPYAAEFAESIYQVEVPVKHDDDDNCPYAKDSYCMEIIGLENGQIIPQLEVSMNSWELDECPAKTMISNFFHSIIEHLFDGAQVCLPSFGSNEFLRPCDIDIFALVCKDAPLVEYQADKPITANDVAVMDFVRINDGILLDKKSALYPLKPDGTCSHFPCFILFEEVKIIDFPSKDAFKSLVLIQSEKAEMNTSEEIFKDDFDQAKHFYESVVSSELALVDDTFKSLPTPILHDDKAMRSMLPPIEEVLCSLKPLPLSAADGIYLDWHLLSEGPCNRESCSTYESMVEEVKPCSLNSELQISGQQMPALDIGFLEDFPRSAKPQHEDKQNEVYVPGPISHDPSANLEATQKNMLENVVRGHTHMDKLSSEKESSLFESTSQSNGLSFYLNVRNGTNKVRKAEDISTLDIPSSKQAASISTRPKVNKLIEIHPVNLSDIIQGLINDIHVSYTSALQESAYLRHSFSDGQGLSISKQKLLELITGEGSEGLYSCCKYEDKMELIVLYALKQVAYYLCFFGLHAAYLYVGNLTGTFEIIPERLRHLQRCIGEARLKAEKQLQESHPSLSVIETILRSNTQIDQKILIVSDRAFWLPLGQKLTAMKITSVEFGTYHSTTYSDAVIETNSKRCMLQELWKSDCILLDNKNIPASFPFSEFCMIVEYGGPNKSSILLSLAPKLDGLPPLHFLYVTVDGEGLPNALVEDNHTDPDLKSTLDAALHTLQKDLQEKMNKMRIVDSLNFIPATNQQQHLQTNHLTVDSSKKIPADVQLHNAGNLNEKNIVDSHNLVTATEQPNGLNQITIANLQNFVPVVEKSSSTVVSANVIKAPQVNQSAGVLPLSEKMDSTKAGRLPGPEVAIVVNTGNHGKNMLFSRRSSYQQILALERGGMQVVERDVDLPVDLILTAAVCLLWYDTRTSGSSELTISAGTSGITNFLEDIATNVLMALSFCFCGCIMVFEGENHLLSAVMEASDSLYASAVNLDMNLQLFFSEMPKSTDQIILNCIRNAVRINQALCPQITESESLVESFLTAFPSVSPLSAHMILSSGSLMDFLRWSHEQRTQAVEKYHLPPQSISLFSALCKFGELGESKSVMTECSSVDSDISSTLLQSPRKKKRRAAQDFSVAVSNPAFPNPCTQLHGDCVENDKIFSPPKLRKFFHIEDTMSDLPEVFMIDQRLNMGSEGVSCQPRKYDVDAVTGINIIDDDFINELTPNFRTYNERTSSMVDTCNFSKQSELGAKQPIRSSFPASLPSVCTTSSHPTFPSALEINNDPGSWDVPCSINQTWAGHVHGDFATSSGRNDQGVRYHEPRQEIMQTPVPSLSFLKQDFGCHGASQGSGWEIDYLRRMNENRKACREQSRCSVSTQPNSRTRDGSSRILSAPPIESFRYERNKDAPFRDQNRSDIESFRYRRDINTLLRDQSPSNEVRRYGKGRGGTKAQSHRVRKDFKAQPSINHEKSIMPSIEPTWTPLDKRARQKLTFATYGNEKQSKLVWRHQSSPGVGCGFPKKYHEEGT

SEQ ID NO: 183895 - protein, 1747 aa, Zea Mays
MRTRFLTADYFAPSPSAAASSDLAIALASLPFPSLPVPTLPPEPHLTPFPFSADFLPAVSVAGDDLDSLPFDSAVTELLTAVIPQPLPVPDIPVADEGLDDYLYGRGVYGNAFSSTDPVAFRVFKGLEDSHTNGDKEEGLNLEGSAVTKRGDLLEALFEVPELDFLSKKIASFDDEEPDACAGTYSFGVRDMKIIPDFIDIDTETRIPYAAEFAESIYQVEVPVKHDDDDNCPYAKDSYCMEIIGLENGQIIPQLEVSMNSWELDECPAKTMISNFFHSIIEHLFDGAQVCLPSFGSNEFLRPCDIDIFALVCKDAPLVEYQADKPITANDVAVMDFVRINDGILLDKKSALYPLKPDGTCSHFPCFILFEEVKIIDFPSKDAFKSLVLIQSEKAEMNTSEEIFKDDFDQAKHFYESVVSSELALVDDTFKSLPTPILHDDKAMRSMLPPIEEVLCSLKPLPLSAADGIYLDWHLLSEGPCNRESCSTYESMVEEVKPCSLNSELQISGQQMPALDIGFLEDFPRSAKPQHEDKQNEVYVPGPISHDPSANLEATQKNMLENVVRGHTHMDKLSSEKESSLFESTSQSNGLSFYLNVRNGTNKVRKAEDISTLDIPSSKQAASISTRPKVNKLIEIHPVNLSDIIQGLINDIHVSYTSALQESAYLRHSFSDGQGLSISKQKLLELITGEGSEGLYSCCKYEDKMELIVLYALKQVAYYLCFFGLHAAYLYVGNLTGTFEIIPERLRHLQRCIGEARLKAEKQLQESHPSLSVIETILRSNTQIDQKILIVSDRAFWLPLGQKLTAMKITSVEFGTYHSTTYSDAVIETNSKRCMLQELWKSDCILLDNKNIPASFPFSEFCMIVEYGGPNKSSILLSLAPKLDGLPPLHFLYVTVDGEGLPNALVEDNHTDPDLKSTLDAALHTLQKDLQEKMNKMRIVDSLNFIPATNQQQHLQTNHLTVDSSKKIPADVQLHNAGNLNEKNIVDSHNLVTATEQPNGLNQITIANLQNFVPVVEKSSSTVVSANVIKAPQVNQSAGVLPLSEKMDSTKAGRLPGPEVAIVVNTGNHGKNMLFSRRSSYQQILALERGGMQVVERDVDLPVDLILTAAVCLLWYDTRTSGSSELTISAGTSGITNFLEDIATNVLMALSFCFCGCIMVFEGENHLLSAVMEASDSLYASAVNLDMNLQLFFSEMPKSTDQIILNCIRNAVRINQALCPQITESESLVESFLTAFPSVSPLSAHMILSSGSLMDFLRWSHEQRTQAVEKYHLPPQSISLFSALCKFGELGESKSVMTECSSVDSDISSTLLQSPRKKKRRAAQDFSVAVSNPAFPNPCTQLHGDCVENDKIFSPPKLRKFFHIEDTMSDLPEVFMIDQRLNMGSEGVSCQPRKYDVDAVTGINIIDDDFINELTPNFRTYNERTSSMVDTCNFSKQSELGAKQPIRSSFPASLPSVCTTSSHPTFPSALEINNDPGSWDVPCSINQTWAGHVHGDFATSSGRNDQGVRYHEPRQEIMQTPVPSLSFLKQDFGCHGASQGSGWEIDYLRRMNENRKACREQSRCSVSTQPNSRTRDGSSRILSAPPIESFRYERNKDAPFRDQNRSDIESFRYRRDINTLLRDQSPSNEVRRYGKGRGGTKAQSHRVRKDFKAQPSINHEKSIMPSIEPTWTPLDKRARQKLTFATYGNEKQSKLVWRHQSSPGVGCGFPKKYHEEGSGFTAVILLTCVCIYDARMAAWIAIHFLKL

SEQ ID NO: 183896 - protein, 541 aa, Zea Mays
MTLATAIMLCHRFYLHQSLAKNGWQTIATVCVFLASKVEDTPCPLDYVVRVSYETMYRRDTAAAQRIRQKDVFEKQKALILIGERLLLTTIRFDFNIQHPYRPLLDAMQNLGINKKEVKQVAWNFVNDWLKTTLCLQYKPQYIAAGSLYLAARLHDIKLPLHGAHVWWHQFGVAPKPLEAVIHQMMELAAVNKSNPVRPNLVKPKETLCEAKLSLSNSPDSVLNQSSLLISSSSPDIGETSDQVQVDSCQYLISSHTGDCRVSCPDNSSLDTSGKAHDEERLDQALITKHDSGMMPSTSNQTSLDATVGTESSAEYMKQDVSHCDDFNIRVNDQSLNQALRNQHGDAVPLPDMVSLDAKVDKESSWCLEPLIANFDCCIDSVNVDSLCTDQRLADVASGPTADVPSVLLAKENSDPLSAKLENIDVARIKGLLMKRKSRREIQNQAIASDGLSEEAWIERELESGIVTKQEANCAAISDELSDEAWIERELESGIVTGPTNEQAITFDGLSENDWIERELESGIIIEPAPAIKKRKLESSC

SEQ ID NO: 183897 - protein, 309 aa, Zea Mays
MPNLPYLYAGDFMKVLREKHASNSYAKMVIYIEACESGSIFEGLMPEDLNIYVTTASNAEESSWGTYCPGMEPPPPSEYITCLGDLYSVSWMEDSETNNLKEETIKEQYEVVKKRTSDFNSYGAGSHVMEYGDKTFKGEKLYLYQGFDPANANVTNKLLWSGQEAVVNQRDADILFLWKRYELLHEKSEEKQEVLREITGTVRHRKHLDNSINFIGKLLFGAEKGPSTLEAVRPPGQPLVDDWDCLKQMVRIFESHCGSLTQYGMRHMRAFANICNSGTPGASMKRASMGACGGYNSARWSPLAQGYSA

SEQ ID NO: 183898 - protein, 239 aa, Zea Mays
MEPPPPSEYITCLGDLYSVSWMEDSETNNLKEETIKEQYEVVKKRTSDFNSYGAGSHVMEYGDKTFKGEKLYLYQGFDPANANVTNKLLWSGQEAVVNQRDADILFLWKRYELLHEKSEEKQEVLREITGTVRHRKHLDNSINFIGKLLFGAEKGPSTLEAVRPPGQPLVDDWDCLKQMVRIFESHCGSLTQYGMRHMRAFANICNSGTPGASMKRASMGACGGYNSARWSPLAQGYSA

SEQ ID NO: 183899 - protein, 494 aa, Zea Mays
MAVRWCLLLLVLVLAAAAACAEKGEWDPVIRMPGEKEPAGSHSHSGEGFDGEVDDAVGTRWAVLVAGSSGYGNYRHQADICHAYQILQKGGIKEENIVVFMYDDIANSALNPRQGVIINHPEGEDVYAGVPKDYTGDQVTTKNFYAVLLGNKTAVTGGSRKVINSKADDHIFIYYSDHGGPGVLGMPNLPYLYAGDFMKVLREKHASNSYAKMVIYIEACESGSIFEGLMPEDLNIYVTTASNAEESSWGTYCPGMEPPPPSEYITCLGDLYSVSWMEDSETNNLKEETIKEQYEVVKKRTSDFNSYGAGSHVMEYGDKTFKGEKLYLYQGFDPANANVTNKLLWSGQEAVVNQRDADILFLWKRYELLHEKSEEKQEVLREITGTVRHRKHLDNSINFIGKLLFGAEKGPSTLEAVRPPGQPLVDDWDCLKQMVRIFESHCGSLTQYGMRHMRAFANICNSGTPGASMKRASMGACGGYNSARWSPLAQGYSA

SEQ ID NO: 183900 - protein, 173 aa, Zea Mays
MKSVREAFGLRNHMADGSLEWLSLRSLTTANTISPRKTDPWVTGPLSAPVGRGAAAGQQQHQPAVVLQPVFLIRLLHICALPMAATAALTSSMAWVTIHVASAPAAAPLRPRDTRLLRRIDGGNVGTVYLCRHGLRLLNVHTSKVIKFVTLEMHLLKYCKEVDGINHCSKCIT

SEQ ID NO: 183901 - protein, 312 aa, Zea Mays
MVHLFRPSLHRHRLPAGGGGVCSDSDRDAQVDAGEVLHQARVHGAHPEREAVPEAERLPGRPQGGVFRGPRRPLQPQDAEHGAHASAQPSARLRHHDGGDIRPAAPDHHGEEDRRQHQVPQVQAQAAGDLRLHQEREAEATHHRRDVVGEHHVQRRHRAASRSVAWGTAGSASTTASTRLTCSATRRRCSRGASSSSSCSATRRGTRPRSECSGASTASTTSRSSSRSSASGDEADGGECVNNRANRICTHTQHTVASGQLSFILIDEYVIVPSVHQNVCSVVYSFYTCLSIYRTKRYLIIMDYYLSSLCSS

SEQ ID NO: 183902 - protein, 416 aa, Zea Mays
MGSVPEEKAKLGFGGLVGDLREVYESGRTQGLEWRQSQLRGLVRLLEEKEEEIFDVLHEDLGKHRGEAFRDEVGVLKKSVVDKLQNLKNWAAPEKAHTPLVAFPATALVVPEPLGVVLVFSCWNLPIGSSRVGRLIMAQAAKHLTPVALELGSKCPCIVDWLDSDRDSQVAVNRIIGAKWSTCSGQACIAIDYLLVEEEFAPILIEMLKSTLERFFTKPEYMARILNEKQFQRLSGFLADRRVASSVVHGGHFNPKTLSMEPTLLLNPPLDSDIMTEEIFGPLLPIITVKKIEDSIKFLRSKPKPLAIYAFTRNEKLKQRIIDETSSGSITFNDAIVQYGLDSIPFGGVGHSGFGQYHGKYSFDMFSHKKAVLKRSFLVEFMFRYPPWDETKIGMLRRVYRFDYVSLFLALIGLRR

SEQ ID NO: 183903 - protein, 546 aa, Zea Mays
MLPPSSLYMKLAGLGYHRSAKKCKEKFENVHKYYKRTKDAHAGRQDGKSYRFFSQLEALHAAAPQPQPPSGMTTVQAGPHHPMALAWTAGPTALGPAAGAGLPDLSFSSMSGSESEYDSDDDDDDDAGEEGLGRGEYHREMMAIFEGMMKQVTDKQDAMQRVFLETLERWEAERTAREEAWRRQEVARMNRERERLARERAAAASRDAALIAFLQCVGGGQGQPVRLPPHSAGASVVPAPPKPDCAPPSPRLDAAATSLQQLVPAQLKAVEALAWAGGEGGGSTSSRWPKEEVEALIQVRNEKDEQYHDAGGKGPLWEDIAAGMRRIGYNRSAKRCKEKWENINKYYKKVKESNKRRPEDSKTCPYFHQLDAMYRKKHRGDRGRITAAGPNMQDSPSQRELEGKSSNDVDIDNRKSDEQGNVHTSPVSGNRDTAPTTTRPPGDGAKNKTAEDNLKRTNVQLKQQQHEFGTDETDSDDDMARNHTAYTEEDDDEAKIKYKMDFQNPNMIGSSSNMSAPPPPAAAAATTAAAPTTSAAPTSNTFLAVQ

SEQ ID NO: 183904 - protein, 475 aa, Zea Mays
MTTVQAGPHHPMALAWTAGPTALGPAAGAGLPDLSFSSMSGSESEYDSDDDDDDDAGEEGLGRGEYHREMMAIFEGMMKQVTDKQDAMQRVFLETLERWEAERTAREEAWRRQEVARMNRERERLARERAAAASRDAALIAFLQCVGGGQGQPVRLPPHSAGASVVPAPPKPDCAPPSPRLDAAATSLQQLVPAQLKAVEALAWAGGEGGGSTSSRWPKEEVEALIQVRNEKDEQYHDAGGKGPLWEDIAAGMRRIGYNRSAKRCKEKWENINKYYKKVKESNKRRPEDSKTCPYFHQLDAMYRKKHRGDRGRITAAGPNMQDSPSQRELEGKSSNDVDIDNRKSDEQGNVHTSPVSGNRDTAPTTTRPPGDGAKNKTAEDNLKRTNVQLKQQQHEFGTDETDSDDDMARNHTAYTEEDDDEAKIKYKMDFQNPNMIGSSSNMSAPPPPAAAAATTAAAPTTSAAPTSNTFLAVQ

SEQ ID NO: 183905 - protein, 466 aa, Zea Mays
MQSAKQVRAFLKYFGISFLWSFFQWFYTGGNACGFAQFPTFGLKAWKHSFFFDFSMTYVGAGMICPHLVNLSALLGAVLSWGILWPLISRRKGYWYPADVPESSMTSLYGYKSFVCIALIMGDGIYHLVKVLGVTAKSLHERSKLRRSNNRGSSSRVADEDNAAAIDSLRRDEVFNRDSIPAWLAYAGYAVTSAVAAVAIPAMFRQVRWYYVVAAYALAPVLGFSNSYGAGLTDINMGYSYGQLALFVLAAWAGRDDGVVAGLVGCGLVKQLVLISADLMHDFKTAHLTLTSPRSMLAAQAVGAAMGCVVTPLTFLLFYRAFDVGNPDGYWKAPFALIYRNMALLGAQGFSALPTHCLPLSAGFFALAVLANVMKDVLPPRYARYVPLPTAMAVPFLVGASFAIDMVVGTVVVFAWHWIDGNETTLLVPAVASGLICGDGVWTFPSSLLSLAKIKPPICLKFTPGS

SEQ ID NO: 183906 - protein, 723 aa, Zea Mays
MNDFRKLFSFNSTRLQMPRTTTPQGLLIYNGLVESEALIDSSSCSSRTAMEINPADEIDKCEAGGGAEPQPADPEPDAAAAVEQQQPWREQLTARGLVAAALIGSMYTVVVMKLNLTTGFVPTMNVSAALLAFLALRGWTGALSRLGVAGARPFTRQENTVVQTCAVACYSLALCGFGSFMLGLNRRTYEAAGVNTPGNVPGSVKEPGFGWIAGFLVASSFGGLLTLIPLRKALVIDYKLTYPSGTATAVLINGFHTPQGDKNAEKQVRAFLKYFGISFLWSFFQWFYTGGNACGFAQFPTFGLKAWKHSFFFDFSMTYVGAGMICPHLVNLSALLGAVLSWGILWPLISRRKGYWYPADVPESSMTSLYGYKSFVCIALIMGDGIYHLVKVLGVTAKSLHERSKLRRSNNRGMADEDNAAAIDSLRRDEVFNRDSIPAWLAYAGYAVTSAVAAVAIPAMFRQVRWYYVVAAYALAPVLGFSNSYGAGLTDINMGYSYGQLALFVLAAWAGRDDGVVAGLVGCGLVKQLVLISADLMHDFKTAHLTLTSPRSMLAAQAVGAAMGCVVTPLTFLLFYRAFDVGNPDGYWKAPFALIYRNMALLGAQGFSALPTHCLPLSAGFFALAVLANVMKDVLPPRYARYVPLPTAMAVPFLVGASFAIDMVVGTVVVFAWHWIDGNETTLLVPAVASGLICGDGVWTFPSSLLSLAKIKPPICLKFTPGS

SEQ ID NO: 183907 - protein, 632 aa, Zea Mays
MNDFRKLFSFNSTRLQMPRTTTPQGLLIYNGLVESEALIDSSSCSSRTAMEINPADEIDKCEAGGGAEPQPADPEPDAAAAVEQQQPWREQLTARGLVAAALIGSMYTVVVMKLNLTTGFVPTMNVSAALLAFLALRGWTGALSRLGVAGARPFTRQENTVVQTCAVACYSLALCGFGSFMLGLNRRTYEAAGVNTPGNVPGSVKEPGFGWIAGFLVASSFGGLLTLIPLRKALVIDYKLTYPSGTATAVLINGFHTPQGDKNAEKQVRAFLKYFGISFLWSFFQWFYTGGNACGFAQFPTFGLKAWKHSFFFDFSMTYVGAGMICPHLVNLSALLGAVLSWGILWPLISRRKGYWYPADVPESSMTSLYGYKSFVCIALIMGDGIYHLVKVLGVTAKSLHERSKLRRSNNRGSSSRVADEDNAAAIDSLRRDEVFNRDSIPAWLAYAGYAVTSAVAAVAIPAMFRQVRWYYVVAAYALAPVLGFSNSYGAGLTDINMGYSYGQLALFVLAAWAGRDDGVVAGLVGCGLVKQLGVRRRQPRRVLESAVRAHLPQHGPPGSPGLLGAAHALPAAVRGVLRARRARQRDEGRPAAALREVRAPADGDGRAVPRRRQLRHRHGGGDRGGLRLALD

SEQ ID NO: 183908 - protein, 116 aa, Zea Mays
MEFNKWEHFVNDDCTRSFVSLEVTRTGLPEITRQILMVDEVYRLHGLPEFYTNPRPHISLVWALGDVSGKLKQALKDIEKYQSSMSSLQKCNVRCKFSRVVCKVGKKVHDICKVAD

SEQ ID NO: 183909 - protein, 152 aa, Zea Mays
MGWQGKDPSTDFRGGGFISLENLLYFARNYPKSFQELLRKQNGDRAIWEYPFAVAGVNITFMLIQMLDLQSVKPRSLFGAVFLKLLSENDQAFDILYCITFKLMDQQWLDMHATYMDFNTVMKSTRRQLERELLIEDIQRIEDMPSYRLLAR

SEQ ID NO: 183910 - protein, 91 aa, Zea Mays
MLIQMLDLQSVKPRSLFGAVFLKLLSENDQAFDILYCITFKLMDQQWLDMHATYMDFNTVMKSTRRQLERELLIEDIQRIEDMPSYRLLAR

SEQ ID NO: 183911 - protein, 246 aa, Zea Mays
MPLGAKKSKVGAMGGSGTLISVYPEELTFLFELEKPCYCNLKVVNNSEHHVAFKVKTTSPRKYFVRPNASIVQPWDSCTITITLQAQKDYPPDMQCKDKFLIQSTKVAASTDMDEIPPDTFNKEADKVIEEMKLKVVYTLPSCGGSDDSSVSSLGSRSFKAASDDLMMLKNASLEEIQTIQRLKEERDNMLQQNQQMQRELDVLRRRRSRKGDAGFSLTFAAFAGLIGLMVGLLMSLIFSSAPADA

SEQ ID NO: 183912 - protein, 124 aa, Zea Mays
MGGSGTLISVYPEELTFLFELEKPCYCNLKVVNNSEHHVAFKVKTTSPRKYFVRPNASIVQPWDSCTITITLQAQKDYPPDMQCKDKFLIQSTKVAASTDMDEIPPDTVSKKCRTNFSTRKLIR

SEQ ID NO: 183913 - protein, 105 aa, Zea Mays
MGGDGGGVAGAGGGLAGGDGGGVVGAGGGDAGGDGGGVVGAGGGVAVGAGGGLPAGGAWGGELAGGAFGVGGGCAGGDCCAAQEAIRSTRTRGRRSDAIFCGSLS

SEQ ID NO: 183914 - protein, 150 aa, Zea Mays
MGARNSAAATPVLLNVYDLTAANDYLYWLGFGVFHSGIEVHGTEYGFGAHDYPSSGVFEVESKSCPGFIYRRTVWLGTTDMSQEEFRSFIEKLAGDYHGDTYHLINKNCNHFTDDVCQNLTGKPIPSWVNRLARGQFSIAFFQKAYKFLL

SEQ ID NO: 183915 - protein, 106 aa, Zea Mays
MGARNSAAATPVLLNVYDLTAANDYLYWLGFGVFHSGIEVHGTEYGFGAHDYPSSGVFEVESKSCPGFIYRRTVWLGTTDMSQEEFRSFIEKLAELNWETHPFLGE

SEQ ID NO: 183916 - protein, 192 aa, Zea Mays
MEHSLQPFSGHCQGTGSPAHRLGQTDGPWQPQDEQRPSGRQLRVQDIGLRPLPPAEPRRCPGDAGGLRGAGVQGAGAGQDAGRHVRERRLQPGSGPARAARAEGARGRRRPAEPAGHPPPGLLQEPGPGEEDLGRVQLRPCQALQEVGEGEEPERLLRAGHGLLQPVAVPETQHEAGTQEARGDREINGREC

SEQ ID NO: 183917 - protein, 102 aa, Zea Mays
MRDFLRGSRISDTHLPQARMRTPRYVGWCPSLLRRRFLLPAAEDSEDDAVGDAGASAEDEDVGSEPEEEESMAMARPFFSPAVVGGVGGVGWQRRAAAGGGL

SEQ ID NO: 183918 - protein, 65 aa, Zea Mays
MDHVALIHSNSNCNSLFDYDQLCPVSFPKSHPSRRKKLCQNNLKCLPIPRRRPRGTNLISEENRF

SEQ ID NO: 183919 - protein, 95 aa, Zea Mays
MHHGLFVISIDGQAVSISNQDKNYMKMQVCSYQILLLKSKFNNFFGGNHFSQVFVIVIGILLYSISLIPIPAASCQLYYCKQLNVLWYSLLLLHY

SEQ ID NO: 183920 - protein, 87 aa, Zea Mays
MSSCLILSGFFEKETWMHPIFPALFYACDRVIRKFHENDYHSSIVSNLSGRCALYSHEEASGFQVLKWNASFFCKIPSLAFRLVSFY

SEQ ID NO: 183921 - protein, 94 aa, Zea Mays
MSSCLILSGFFEKETWMHPIFPALFYACDRVIRKFHENDYHSSIVSNLSGRCALYSHEEASGFQVLKWNASFFCKIPSLAFRLAPLLYNCGTRR

SEQ ID NO: 183922 - protein, 133 aa, Zea Mays
MVMSLSCDKAVWNAVMNNEAVQDFRRSLHDGKENDRNENTGGPAEVLKWILESAQAKIVEFLENVQKIINMLIHTPEDDDNPDGYSDAVKVSFMLTVFVFIVVAIARIIMNIGITKCGEARFWHPTSPSIYVL

SEQ ID NO: 183923 - protein, 57 aa, Zea Mays
MSPPSLNAIAAARDALHPRPLIVPLQLPPRPPIGPQEPKVRAPQVASSFFIHALPPP

SEQ ID NO: 183924 - protein, 73 aa, Zea Mays
MAGSGELVIGYSCQCICIICNPWIMQLFLYYIYIFSLIVPSCFVLCFHILILCASVKVSYLFLLFSWFKSCVA

SEQ ID NO: 183925 - protein, 78 aa, Zea Mays
MDRMVLSLIHCFVLYVDQPITMPLTVTLLFKVQSIHMASIKLQKKLFVVAKRISNKILVELKFLHQIIFGRLQMVISM

SEQ ID NO: 183926 - protein, 63 aa, Zea Mays
MEHNRNKDSQFAKRISNKILVELKFLHQIIFGRLQMFYEHNDNKMSYPAMAQLLSNILYYKRN

SEQ ID NO: 183927 - protein, 71 aa, Zea Mays
MQVFIILHSADSDLKMFAVAKRISNKILVELKFLHQIIFGRLQMFYEHNDNKMSYPAMAQLLSNILYYKRN

SEQ ID NO: 183928 - protein, 111 aa, Zea Mays
MSPPSLNAIAAARDALHPRPLIVPLQLPPRPPIGPQEPKVRAPQVHRRDRVACLKDQVVGHVSLPRHAVPLAVSVLQLRPVPPQPVQRPPGRRSLETRVTKTTGKTVRRET

SEQ ID NO: 183929 - protein, 51 aa, Zea Mays
MKDVARWVSICMKLAGHRPIKIVAPCCILFMENKFLDTVDRDMLSKSRRDI

SEQ ID NO: 183930 - protein, 92 aa, Zea Mays
MFYFNNKLQKRLRGQRFKMNGAFYRLFANEASHGSENNNYIDQKLSHFPHGMRSYSPNIKLRLVDCDVNAMNRVAVYAHENASMPHLGLVGK

SEQ ID NO: 183931 - protein, 595 aa, Zea Mays
MGEDVNGEPYKPYTEKVLPCLVPHVGMKFRNPEEGWKFWLAYDGQSGFDVRKHYANKSKIDGKITSCRFVCANEGHRGKDKRSDQVKCQRAETRTDCEVRMGLAKDKEMDGYKVYDLKLEHNHDLHSPETFHLMVSQRKISELQAFEIEAADDSGIGPKASHELACRQVGGPLNLSYTLRDHKNYLRGKRQREMAYGQAGSMLKYFQDKIAENPSFQYATQMDIEEKIANIFWADAKMIADYIHFGDVVSFDTTFGTNRESRPFGVFVGFNQFRETVVFGAALMYDETFESFRWLFETFLQAHNRKQPKTFYTDQDFAMGKAVELVFHEAWHGLCTFHIMQNAIKHLPKQEKAKGSNVLADFSACMFEYVDQETFDREFAILRTKIQKQTWLDNIYNLKEKWAECYMKDVYTLGMRSTQLSESLNNDLKIHFKSDFDIIRFLKHFERVVQGKRNNELNSEFESRKKIPRVIMKIPMLLQASKLYTPVIFEAFQGQYERSMTSCTRVLDGNNEYLVATGSLGEELVLDEEFRVIGNPLDQTATCSCNLFNRIGIICAHALKVLDLMNIKSLPTQYILKRWTRQACSGIVQDMNGKI

SEQ ID NO: 183932 - protein, 2064 aa, Zea Mays
MCAASGLLAVLLEVAEKLFVGMGRGSKWDGTPLVQCIQVLGGHSVSVRDLHTWLLLIKKALGTQWATQLTIALENAVASNEAKGPAVTFEFDGESSGLLAPGDNRWPFSNGLGFATWIYVESFSGSLNTATATAAVAAAAASASGKSSPSAAAAAACTLAGEGTKHMPRIFSFLTSENHGIEAYFNDQFLVVESAAGKGKKASLHFTYEFKPRCWYFVGLEHSSKQALLGKSESELRLYVDGDLHESCPFEPPRIVKPLVFCCIGTNPSPTIAGLQRRRRQCPLFAEMGPIYIFTEPIGPEKMSRLASRGGDALPSFGNGAGFPWKATSNHIRETAEDGYTLDIEIGGSLHLLYHPSLLNGRFCSDASPSGSTGTHRRPAEVLGMVHISNRVRPAESLWALAYGGPMALLPLIVSNVEMDNLEPILGDLSSSLATASLSVPIFRIISVAVQHPGNKEELCRTHGPELLSQVLHYVLDTLSRLESGKKEILSDEELVTAIVSLCQSQRNDHSQKVQLFSTLLLDLKMWSSCNYILQKKLLSSLADMVFAESTCMRDANALQMLLDGCRRCYWVVHEADSIDTFTLTGNERPLGNVNALVDELLVVIELLIGAAPSTLASDDVRCLVGFIVDCPQPNQREAKSGDSNILHSCNVSHDSASWNESSKLTNKDSKFKNASGETNCQDHQIQSVQHYEPNSHETGVGLGSTSKWSLLKGQFLKNLGGMDVPNISDNVQNIDNGDGVLVGIVRVLGALVASGHLTSTSPTVRPKLPSGFLTTSNGEGNTMFEDRVSLLLFALQKAFQAAPRRLMTRNVYTALISSVINVSSKDNLKNLQDSGYHFKHIPLLVVLLRSLPYASRSFQARVIQDLLYLVCSHPKNRSTMTSINEWPECILEVLISNHEMGDNKDSDGISICEVEDVVHNLLLVVLQHSMRKKDGWKDVEATIHCAEWLSMVGGTSTGDQRIRREEALPIFKRRLLGSLLNFSAQELQVQQTEGIAAAAAGVAAEGLVPKETKVHAEKVANLSVMLAENAVVLLMLVEDHLRSRSQQFFMACLADSAASPASMASSAVSRSNSLSRTGSEHLEAGDSRQSLSSDAGGLPVDVLASTVDTNGQLSAEVMERVTAAAAAEPYGSVRHAFVSYGSCISDLSEGWKYRTRLWYGVCIPPKSNVFGGGGSGWVSWKSVLEKDSDGNWIELPLVKKSVAMLQALLLDSGLGGCLDSGVGFGPGMGVMGAFNQLLDSDQPFFCMLRLILVSMREDDSGEDDIFMRNISMKNVISEVLGCQTGSMLGLGGNSSASMRKRPAALLWRVLGPVLNMPVSESKRQRVLVASSILYSELWHAVSSDRKPVRKKYVGLIMPPFVAVLKRYRSVLAGIHELTCPDVQNPLLIDDWASTADTSPVEVGVAMISPAWAAAFASPPVAMALAMIAAGASGTETIAPPTNKLRRRDTSLLERRAAKLHTFSSFQMPIDTTPSLPTSAPKDKAAAKAAALAAARDLERSAKIGSRRGLSAVAMATSGQRRSAGDIERAQRWNISEAMGAAWMECLQSADSKSVSGRDFSALSYKYVALLVSSFALARNLQRVEMERRTQVEILNRSCMSIGLRAWQHLLHCLIETSRLYGPFGELLCSPDSIFWKLDLTESSLRMRRFMKRNYNWLNHLGASANYVEQKFLCDGADACHSEDGDSLLSVLPASSLITVDEVHEQIVQRQSDNICSSVDDQLTDSSTTDQIFTGSIDSRSSDFSGVRNLIRSTVVTPGYKTNNERIIIELPSMMIRPLKVVRGTFQVTSKRINFIVDEHMSDSYMDDIASTSGQYDQQDRDRSWFLSSLHQIFSRRYLLRQSALELFMVDRSNFLFDFEDIGSRTHAYRALVHTKPPYLNTVSVATQRPEQIFKQTQLMERWAKWEISNFEYLMELNTLAGRTYNDITQYPVFPWVIADYKSKTLDLESPSTYRDLSKPIGALNPARLKKFQDHYSSFKDPIIPKFHYGSHYSNPGTVLYYLARIEPFSILYAQLQGAKFDHDDCAFSDVARTWNSVLEGMNDVKELVPEMFYLPEVFTNIRQ

SEQ ID NO: 183933 - protein, 2656 aa, Zea Mays
MCAASGLLAVLLEVAEKLFVGMGRGSKWDGTPLVQCIQVLGGHSVSVRDLHTWLLLIKKALGTQWATQLTIALENAVASNEAKGPAVTFEFDGESSGLLAPGDNRWPFSNGLGFATWIYVESFSGSLNTATATAAVAAAAASASGKSSPSAAAAAACTLAGEGTKHMPRIFSFLTSENHGIEAYFNDQFLVVESAAGKGKKASLHFTYEFKPRCWYFVGLEHSSKQALLGKSESELRLYVDGDLHESCPFEPPRIVKPLVFCCIGTNPSPTIAGLQRRRRQCPLFAEMGPIYIFTEPIGPEKMSRLASRGGDALPSFGNGAGFPWKATSNHIRETAEDGYTLDIEIGGSLHLLYHPSLLNGRFCSDASPSGSTGTHRRPAEVLGMVHISNRVRPAESLWALAYGGPMALLPLIVSNVEMDNLEPILGDLSSSLATASLSVPIFRIISVAVQHPGNKEELCRTHGPELLSQVLHYVLDTLSRLESGKKEILSDEELVTAIVSLCQSQRNDHSQKVQLFSTLLLDLKMWSSCNYILQKKLLSSLADMVFAESTCMRDANALQMLLDGCRRCYWVVHEADSIDTFTLTGNERPLGNVNALVDELLVVIELLIGAAPSTLASDDVRCLVGFIVDCPQPNQVARVLLLIYRLIVHPNTSRANTFAQSFISRGVVEALLVLLQREAKSGDSNILHSCNVSHDSASWNESSKLTNKDSKFKNASGETNCQDHQIQSVQHYEPNSHETGVGLGSTSKWSLLKGQFLKNLGGMDVPNISDNVQNIDNGDGVLVGIVRVLGALVASGHLTSTSPTVRPKLPSGFLTTSNGEGNTMFEDRVSLLLFALQKAFQAAPRRLMTRNVYTALISSVINVSSKDNLKNLQDSGYHFKHIPLLVVLLRSLPYASRSFQARVIQDLLYLVCSHPKNRSTMTSINEWPECILEVLISNHEMGDNKDSDGISICEVEDVVHNLLLVVLQHSMRKKDGWKDVEATIHCAEWLSMVGGTSTGDQRIRREEALPIFKRRLLGSLLNFSAQELQVQQTEGIAAAAAGVAAEGLVPKETKVHAEKVANLSVMLAENAVVLLMLVEDHLRSRSQQFFMACLADSAASPASMASSAVSRSNSLSRTGSEHLEAGDSRQSLSSDAGGLPVDVLASTVDTNGQLSAEVMERVTAAAAAEPYGSVRHAFVSYGSCISDLSEGWKYRTRLWYGVCIPPKSNVFGGGGSGWVSWKSVLEKDSDGNWIELPLVKKSVAMLQALLLDSGLGGCLDSGVGFGPGMGVMGAFNQLLDSDQPFFCMLRLILVSMREDDSGEDDIFMRNISMKNVISEVLGCQTGSMLGLGGNSSASMRKRPAALLWRVLGPVLNMPVSESKRQRVLVASSILYSELWHAVSSDRKPVRKKYVGLIMPPFVAVLKRYRSVLAGIHELTCPDVQNPLLIDDWASTADTSPVEVGVAMISPAWAAAFASPPVAMALAMIAAGASGTETIAPPTNKLRRRDTSLLERRAAKLHTFSSFQMPIDTTPSLPTSAPKDKAAAKAAALAAARDLERSAKIGSRRGLSAVAMATSGQRRSAGDIERAQRWNISEAMGAAWMECLQSADSKSVSGRDFSALSYKYVALLVSSFALARNLQRVEMERRTQVEILNRSCMSIGLRAWQHLLHCLIETSRLYGPFGELLCSPDSIFWKLDLTESSLRMRRFMKRNYNWLNHLGASANYVEQKFLCDGADACHSEDGDSLLSVLPASSLITVDEVHEQIVQRQSDNICSSVDDQLTDSSTTDQIFTGSIDSRSSDFSGVRNLIRSTVVTPGYKTNNERIIIELPSMMIRPLKVVRGTFQVTSKRINFIVDEHMSDSYMDDIASTSGQYDQQDRDRSWFLSSLHQIFSRRYLLRQSALELFMVDRSNFLFDFEDIGSRTHAYRALVHTKPPYLNTVSVATQRPEQIFKQTQLMERWAKWEISNFEYLMELNTLAGRTYNDITQYPVFPWVIADYKSKTLDLESPSTYRDLSKPIGALNPARLKKFQDHYSSFKDPIIPKFHYGSHYSNPGTVLYYLARIEPFSILYAQLQGAKFDHDDCAFSDVARTWNSVLEGMNDVKELVPEMFYLPEVFTNVNPSGRLGSVALPPWAKNAVDFIHMHRKALESDHVSTRLHEWIDLIFGYKQRGKGAEVANNIFPHVTYDGMVDIDKITDPVQRRSVQNQICYFGQTPSQLLTVPHIRRRSLTQILQLQTIFRNPSEVRSYVLPSPEHCNVPASTMLVSNDCLVVIDSNVPTAHVALHHWQPNTPDGLGAPFLFHHGKNAINSSGGAIFRIFKGSSGSAEDYQFPRAVAFAASAVQSSSAVVVTCDKEVITGRHADNSVKMISPDGARTIETAFGHLAPVTCLALSADSSYLVTGSRDTTVILWRIRQVGSAHKKNAPEPPPSTPTTPTSPLATGSSSDSSPSKTLETYRRRRIEGPMHVLRGHLGEVTCCSVSSDLGLVGSSSSVSGVLLHSLRTGRLIKKLDVPEAHSICFSSQGIVLVWNEVENRLSTFTVNGIPIATAVVSPFSARVSCIEISTDGQFAAMGTCSSSNDNHDCSTALEDNSELDKPGSDEDVQGSNETRLSVDAPSICFLDLYKLEVIHKLKLEEGQDVTALALDQENTTLLVSTADKQLIVYTGPAPSTP

SEQ ID NO: 183934 - protein, 2657 aa, Zea Mays
MCAASGLLAVLLEVAEKLFVGMGRGSKWDGTPLVQCIQVLGGHSVSVRDLHTWLLLIKKALGTQWATQLTIALENAVASNEAKGPAVTFEFDGESSGLLAPGDNRWPFSNGLGFATWIYVESFSGSLNTATATAAVAAAAASASGKSSPSAAAAAACTLAGEGTKHMPRIFSFLTSENHGIEAYFNDQFLVVESAAGKGKKASLHFTYEFKPRCWYFVGLEHSSKQALLGKSESELRLYVDGDLHESCPFEPPRIVKPLVFCCIGTNPSPTIAGLQRRRRQCPLFAEMGPIYIFTEPIGPEKMSRLASRGGDALPSFGNGAGFPWKATSNHIRETAEDGYTLDIEIGGSLHLLYHPSLLNGRFCSDASPSGSTGTHRRPAEVLGMVHISNRVRPAESLWALAYGGPMALLPLIVSNVEMDNLEPILGDLSSSLATASLSVPIFRIISVAVQHPGNKEELCRTHGPELLSQVLHYVLDTLSRLESGKKEILSDEELVTAIVSLCQSQRNDHSQKVQLFSTLLLDLKMWSSCNYILQKKLLSSLADMVFAESTCMRDANALQMLLDGCRRCYWVVHEADSIDTFTLTGNERPLGNVNALVDELLVVIELLIGAAPSTLASDDVRCLVGFIVDCPQPNQVARVLLLIYRLIVHPNTSRANTFAQSFISRGVVEALLVLLQREAKSGDSNILHSCNVSHDSASWNESSKLTNKDSKFKNASGETNCQDHQIQSVQHYEPNSHETGVGLGSTSKWSLLKGQFLKNLGGMDVPNISDNVQNIDNGDGVLVGIVRVLGALVASGHLTSTSPTVRPKLPSGFLTTSNGEGNTMFEDRVSLLLFALQKAFQAAPRRLMTRNVYTALISSVINVSSKDNLKNLQDSGYHFKHIPLLVVLLRSLPYASRSFQARVIQDLLYLVCSHPKNRSTMTSINEWPECILEVLISNHEMGDNKDSDGISICEVEDVVHNLLLVVLQHSMRKKDGWKDVEATIHCAEWLSMVGGTSTGDQRIRREEALPIFKRRLLGSLLNFSAQELQVQQTEGIAAAAAGVAAEGLVPKETKVHAEKVANLSVMLAENAVVLLMLVEDHLRSRSQQFFMACLADSAASPASMASSAVSRSNSLSRTGSEHLEAGDSRQSLSSDAGGLPVDVLASTVDTNGQLSAEVMERVTAAAAAEPYGSVRHAFVSYGSCISDLSEGWKYRTRLWYGVCIPPKSNVFGGGGSGWVSWKSVLEKDSDGNWIELPLVKKSVAMLQALLLDSGLGGCLDSGVGFGPGMGVMGAFNQLLDSDQPFFCMLRLILVSMREDDSGEDDIFMRNISMKNVISEVLGCQTGSMLGLGGNSSASMRKRPAALLWRVLGPVLNMPVSESKRQRVLVASSILYSELWHAVSSDRKPVRKKYVGLIMPPFVAVLKRYRSVLAGIHELTCPDVQNPLLIDDWASTADTSPVEVGVAMISPAWAAAFASPPVAMALAMIAAGASGTETIAPPTNKLRRRDTSLLERRAAKLHTFSSFQMPIDTTPSLPTSAPKDKAAAKAAALAAARDLERSAKIGSRRGLSAVAMATSGQRRSAGDIERAQRWNISEAMGAAWMECLQSADSKSVSGRDFSALSYKYVALLVSSFALARNLQRVEQMERRTQVEILNRSCMSIGLRAWQHLLHCLIETSRLYGPFGELLCSPDSIFWKLDLTESSLRMRRFMKRNYNWLNHLGASANYVEQKFLCDGADACHSEDGDSLLSVLPASSLITVDEVHEQIVQRQSDNICSSVDDQLTDSSTTDQIFTGSIDSRSSDFSGVRNLIRSTVVTPGYKTNNERIIIELPSMMIRPLKVVRGTFQVTSKRINFIVDEHMSDSYMDDIASTSGQYDQQDRDRSWFLSSLHQIFSRRYLLRQSALELFMVDRSNFLFDFEDIGSRTHAYRALVHTKPPYLNTVSVATQRPEQIFKQTQLMERWAKWEISNFEYLMELNTLAGRTYNDITQYPVFPWVIADYKSKTLDLESPSTYRDLSKPIGALNPARLKKFQDHYSSFKDPIIPKFHYGSHYSNPGTVLYYLARIEPFSILYAQLQGAKFDHDDCAFSDVARTWNSVLEGMNDVKELVPEMFYLPEVFTNVNPSGRLGSVALPPWAKNAVDFIHMHRKALESDHVSTRLHEWIDLIFGYKQRGKGAEVANNIFPHVTYDGMVDIDKITDPVQRRSVQNQICYFGQTPSQLLTVPHIRRRSLTQILQLQTIFRNPSEVRSYVLPSPEHCNVPASTMLVSNDCLVVIDSNVPTAHVALHHWQPNTPDGLGAPFLFHHGKNAINSSGGAIFRIFKGSSGSAEDYQFPRAVAFAASAVQSSSAVVVTCDKEVITGRHADNSVKMISPDGARTIETAFGHLAPVTCLALSADSSYLVTGSRDTTVILWRIRQVGSAHKKNAPEPPPSTPTTPTSPLATGSSSDSSPSKTLETYRRRRIEGPMHVLRGHLGEVTCCSVSSDLGLVGSSSSVSGVLLHSLRTGRLIKKLDVPEAHSICFSSQGIVLVWNEVENRLSTFTVNGIPIATAVVSPFSARVSCIEISTDGQFAAMGTCSSSNDNHDCSTALEDNSELDKPGSDEDVQGSNETRLSVDAPSICFLDLYKLEVIHKLKLEEGQDVTALALDQENTTLLVSTADKQLIVYTGPAPSTP

SEQ ID NO: 183935 - protein, 98 aa, Zea Mays
MDLSKKMRLKLGATSEPVKPLEKPSVGLVKDELVKPSEKPSSGPVTGEPVKPPEKPSAGPVKDEPMKPSEKPSAEPVKNEPSEPALAGENNRAPRPAV

SEQ ID NO: 183936 - protein, 141 aa, Zea Mays
MSANMHPAFTDVSGVRSQNVPFLIAQAHRQHAYTRSFPNAHPTWPLRPPPSTLPPRLLLPRQRPRLHLYWIKRSLLLLPLSPMRPRPRPRRRSGSSRKRGSTPPNTTRSVPSSPICVFASSRNKCGNGSIQENEAQAWCYF

SEQ ID NO: 183937 - protein, 200 aa, Zea Mays
MAAPTAAVDTAAPPPPPSAEAAAAPVLDQKVSPAAAPQPDAPAPAPAPKKRKLEEAGFHTSEYYKIRAVVADLRVRFVQVHEATDFRNTDAAREIMREINVVMDLSKKMRLKLGATSEPVKPLEKPSVGLVKDELVKPSEKPSSGPVTGEPVKPPEKPSAGPVKDEPMKPSEKPSAEPVKNEPSEPALAGENNRAPRPAV

SEQ ID NO: 183938 - protein, 152 aa, Zea Mays
MAAPTAAVDTAAPPPPPSAEAAAAPVLDQKVSPAAAPQPDAPAPAPAPKKRKLEEAGFHTSEYYKIRAVVADLRVRFVQVHEATDFRNTDAAREIMRGWSHRDFIKLSAYTWWCHTHDEDETFCGASGIDVNRNKCGNGSIQENEAQAWCYF

SEQ ID NO: 183939 - protein, 708 aa, Zea Mays
MILVILSFRVLWEMRLKMRLELLQQVVQVLCAKNVLVLLPERTQRKLQSQTVLFSVTKSCQHLQECSSPGSGQTSGHNSVGGDMLGPIFWQPSRGSPECSPIPSPRMTSPGPSSRVHSGSVSPLHPRAGGVTPESPTNRHAEGNKKQTHRLPLPPLSIANSSTFLPNSSNPTSPISRSPGRTENPPSPGSRWKKGKLIGRGTFGHVYAGFNSDRGEMCAMKEVTLFSDDPKSKESAKQLCQEISLLSRLQHPNIVRYYGSETVDDKLYIYLEYVSGGSIHKLLQEYGQFGEQAICSYTKQILLGLAYLHAKNTVHRDIKGANILVDPNGRVKLADFGMAKHINGQQCPFSFKGSPYWMAPEVIKNASGCNLAVDIWSLGCTVLEMATSKPPWSQYEGIAAMFKIGNSKELPPIPDHLSEEGKDFIRQCLQRDPSSRPTAVDLLQHPFVQNAPPLEKSSASHPLEQLTAISCRTNSKVVEHARNMSSLGLEGQSILQRRAAKFSLPNSDIHIRSNISCPVSPCGSPLLRSRSPQHQNGRMSPSPICSPRTTSGASTPLTGGSGAVPLNHVRQPAYRNEGFTVTSRGFDDHMPSRPVDPVHGRFIRVQQFSVGRQERVVSEVDILSSQYGKMRHANVWDPHDRPLPSERSSQQCFGNHAKLKPSLDLRSDADSWQWIKILKCQSHIPITLKKMRHALSGRGCCILKDPKQ

SEQ ID NO: 183940 - protein, 893 aa, Zea Mays
MPPWWGKSSSKEVKKSAKENLIDTFQRLISSNEQKGSRKSRSSRRHGKDTAGDKGCWSTAQSRSTSPSKEVSRCQSFAADRPHAQPLPLPKSRAKVTRTSSDITNSKSTLEKHGKGQLLPLPPIQPKKRPEATEPVTEVATASVSSNCSIDSDDPGDSQLQSPVGNEAENATRITATSSSSVVRKECSSAITRKNTKEVAKPNSAFLSNQILSTSPRGTFADGYQSNLQSPRQIALESAPNSLMSSPSRSPRNICPVQIPTSAFWAIKPHTDVTFLGSGQCSSPGSGQTSGHNSVGGDMLGPIFWQPSRGSPECSPIPSPRMTSPGPSSRVHSGSVSPLHPRAGGVTPESPTNRHAEGNKKQTHRLPLPPLSIANSSTFLPNSSNPTSPISRSPGRTENPPSPGSRWKKGKLIGRGTFGHVYAGFNSDRGEMCAMKEVTLFSDDPKSKESAKQLCQEISLLSRLQHPNIVRYYGSETVDDKLYIYLEYVSGGSIHKLLQEYGQFGEQAICSYTKQILLGLAYLHAKNTVHRDIKGANILVDPNGRVKLADFGMAKHINGQQCPFSFKGSPYWMAPEVIKNASGCNLAVDIWSLGCTVLEMATSKPPWSQYEGIAAMFKIGNSKELPPIPDHLSEEGKDFIRQCLQRDPSSRPTAVDLLQHPFVQNAPPLEKSSASHPLEQLTAISCRTNSKVVEHARNMSSLGLEGQSILQRRAAKFSLPNSDIHIRSNISCPVSPCGSPLLRSRSPQHQNGRMSPSPICSPRTTSGASTPLTGGSGAVPLNHVRQPAYRNEGFTVTSRGFDDHMPSRPVDPVHGRFIRVQQFSVGRQERVVSEVDILSSQYGKMRHANVWDPHDRPLPSERSSQQCFGNHAKLKPSLDLRSGPRQPGRNHGH

SEQ ID NO: 183941 - protein, 97 aa, Zea Mays
MNLIFLFTSLMKKSKSVEMRRSVTRTVTGTYKTYCFRVRIRGLSRCTCNPIQEILHRIKLLPRIHQESLSRSKNPGRFNREGFLIDGQNPPKNSSRT

SEQ ID NO: 183942 - protein, 233 aa, Zea Mays
MGEVMIIGILDAGITTIGQINANSKAKGMPPPPVKWKDRCDNNQACNNKLIGFKTFVDTSDTCGNSLLQRASVLGIEYDKAFAVAPKAHLVMYHVCDEECHPKEVRAGMDSAVDDDVDVISMSFNGTEDNMVFHDDVVTAPWYNVVAQCLLYDLTVGEFIPYLCVMSLDADRKCKIVEPTHASCAEIGEIATKDLNYPSIMIFTGNDVWQVEAKQSVTKPYMAQCKWPGPLKI

SEQ ID NO: 183943 - protein, 193 aa, Zea Mays
MAAPEPEAKLEAVTPSRSYELPPESESDAPASTGTQELKPWEQHAAVINLPRYDYRASGSLLLRSHSGFLITCPIKPCDVKNAIKKRKLCSEASGSLEEAVTNGNSSSVSESIGSTGNTSSPQSKVNDNVDRASNLSLIRETQISTVRIQLHYGATAYSQFKKLAFYQKKTCMPLCQSYSLTSRGARQTKTSL

SEQ ID NO: 183944 - protein, 201 aa, Zea Mays
MAAPEPEAKLEAVTPSRSYELPPESESDAPASTGTQELKPWEQHAAVINLPRYDYRASGSLLLRSHSGFLITCPIKREKSATKEAIPILEEYHANCCVSEHAEPCDVKNAIKKRKLCSEASGSLEEAVTNGNSSSVSESIGSTGNTSSPQSKVNDNVDRASNLSLIRETQISTMVPPHIPNSRNLHSIRRRPACHCVKVIP

SEQ ID NO: 183945 - protein, 220 aa, Zea Mays
MAAPEPEAKLEAVTPSRSYELPPESESDAPASTGTQELKPWEQHAAVINLPRYDYRASGSLLLRSHSGFLITCPIKREKSATKEAIPILEEYHANCCVSEHAEPCDVKNAIKKRKLCSEASGSLEEAVTNGNSSSVSESIGSTGNTSSPQSKVNDNVDRASNLSLIRETQISTVRIQLHYGATAYSQFKKLAFYQKKTCMPLCQSYSLTSRGARQTKTSL

SEQ ID NO: 183946 - protein, 81 aa, Zea Mays
MAAPEPEAKLEAVTPSRSYELPPESESDAPASTGTQELKPWEQHAAVINLPRYDYRASGSLLLRSHSGFLITCPIISFMKL

SEQ ID NO: 183947 - protein, 99 aa, Zea Mays
MAAPEPEAKLEAVTPSRSYELPPESESDAPASTGTQELKPWEQHAAVINLPRYDYRASGSLLLRSHSGFLITCPIKREKSATKEAIPILEEVIAHYVAP

SEQ ID NO: 183948 - protein, 95 aa, Zea Mays
MAAPEPEAKLEAVTPSRSYELPPESESDAPASTGTQELKPWEQHAAVINLPRYDYRASGSLLLRSHSGFLITCPIKREKSATKEAIPILEENHVM

SEQ ID NO: 183949 - protein, 415 aa, Zea Mays
MAPELYDENYDERVDIYSFGMCLLEIFTLEYPYSECTNPAQIFKKVSTGVKPAALARISDLQVKQFIEKCLVPASERSSAKELLQDTFLCPDNTHEPAVTKFISPAPKKTVDISLASLHMDVDTLESSHTDSGKENGSVAPHTPVLEFTRTNKNTELKLKGEKLDNNSVSLVLRIADFSGHARNIHFLFYLDSDTAMSVAAEMVEQLELADCDVTFIADFIDLLIVNLIPGWRPVNDAAANSYRRSESELAVNSHQNISKLVPDYALIDGVMRPKDVNASTSCLDSVSSATNLGGSQGSEGSVISVQLAESSKSVSDYGAEDYGTMDCGGYKDGISTLDCSHVLDNGSRSIFHIDQASPFLELASCGSSTSTDNQDVMNGELVFIEAQYKHLVDELTRMREEAREGARKNWLPDT

SEQ ID NO: 183950 - protein, 547 aa, Zea Mays
MQCPDNLDRLYTEVHLLKSLKHENVMKFYYSWIDDQSKKINVITELFTSGSLRHYRQKHPRVNLKAIKNWARQILHGLDYLHSHQPPIIHRDLKCDNIFVNGNHGEVKIGDLGLATVMQTPRVRSVIGTPEFMAPELYDENYDERVDIYSFGMCLLEIFTLEYPYSECTNPAQIFKKVSTGVKPAALARISDLQVKQFIEKCLVPASERSSAKELLQDTFLCPDNTHEPAVTKFISPAPKKTVDISLASLHMDVDTLESSHTDSGKENGSVAPHTPVLEFTRTNKNTELKLKGEKLDNNSVSLVLRIADFSGHARNIHFLFYLDSDTAMSVAAEMVEQLELADCDVTFIADFIDLLIVNLIPGWRPVNDAAANSYRRSESELAVNSHQNISKLVPDYALIDGVMRPKDVNASTSCLDSVSSATNLGGSQGSEGSVISVQLAESSKSVSDYGAEDYGTMDCGGYKDGISTLDCSHVLDNGSRSIFHIDQASPFLELASCGSSTSTDNQDVMNGELVFIEAQYKHLVDELTRMREEAREGARKNWLPDT

SEQ ID NO: 183951 - protein, 55 aa, Zea Mays
MARVARTLLAKDRLKGVVCSRVARTCSCDGGSVGMVDMCKRVKGSICRVVGDPQL

SEQ ID NO: 183952 - protein, 374 aa, Zea Mays
MDAAQWHQGLGLGKPMEEMLMAGNANLNQNPNPPPAAPSAPGAQRAGAPAAVAAAPPSAGATGGAGPERRARPQKEKALNCPRCNSTNTKFCYYNNYSLQQPRYFCKTCRRYWTEGGSLRNVPVGGGSRKNKRSSSAVSSAAAAAAASTSAAMSGTVPVGLAAKNPKLMHEGAHDLNLAFPHHNGRALQPPEFPAFPSLESSSVCNPGAAMLGNGAAGRGMGALSGLELLRSTGCYVPLQHFQLGMPAEYAAAGFSLGEFRVPPPPQSQSVFGFSLDTHGTGGVGGAGGYSAGLQESAAGRMLFPFEDLKPAVSAAGGGASNGADHHHYEHSKDQAAGDGGGASGVTGGHEAPAGFWSNSMIGNGSSNGGGGSW

SEQ ID NO: 183953 - protein, 276 aa, Zea Mays
MKDYLEWTERKGIWASPTPSPLLPTLRALVQAGICMGLYLYLSPKFPLSRFSEPLYYEWGFWHRLFYQYMSGFTARWKYYFIWSISEASIIISGLGFTGWSESSPPKAKWDRAKNVDVLGVELAGSSVQLPLVWNIQVSTWLRYYVYERLIQKGKKPGFLQLLGTQTVSAIWHGLYPGYIIFFVQSALMINGSRVIYRWQQAASSSLLSGILAFLNFAYTLLVLNYSCIGFQVLSFKETLASYRSVYYVGTIVPIVCLLLGNVIKPARKAKARKTE

SEQ ID NO: 183954 - protein, 117 aa, Zea Mays
MGYTFDGGLCSISRYSLLWCHWLHTLTQACIARTLPACRVPRPSPQHHTCSIVHHHGHRPLHVRGWRSLLCCCVSRVLPCACIVQPQVRGPTPNACSPSLFPLDYQINIGHDKEDPT

SEQ ID NO: 183955 - protein, 109 aa, Zea Mays
MATAPYASSLFLASSPISTAPRIRAGPCPPSAQPSLRLRPRPSPAAAAAVQAEHQPALTAAPKPPALPFRVGHGFDLHRLEPDLPLIIGGINIPHDRGCEAHSDGEIDA

SEQ ID NO: 183956 - protein, 138 aa, Zea Mays
MFDIVMPDFAGVYSFLGSVFDPSTSGHLQKLKEMNPIDVETALLLMRNLSINLTSPDFEDQVKLMHEAGYELGNLDATLILQKPKISPFKETIRSNLCDLLGADPSVVNLKAKTHEKVDSLGENRSIAAHTVVLLMRK

SEQ ID NO: 183957 - protein, 247 aa, Zea Mays
MVSASAPPPQAQSDAAGSGEEVSKKVRKPYTITKSRESWTEQEHDKFLEALQLFDRDWKKIEAFVGSKTVIQIRSHAQKYLLKVQKNGTSEHVPPPRPKRKAAHPYPQKASKNVMPDFAGVYSFLGSVFDPSTSGHLQKLKEMNPIDVETALLLMRNLSINLTSPDFEDQVKLMHEAGYELGNLDATLILQKPKISPFKETIRSNLCDLLGADPSVVNLKAKTHEKVDSLGENRSIAAHTVVLLMRK

SEQ ID NO: 183958 - protein, 151 aa, Zea Mays
MNVPVSSWAHSSIPQAVASSMVKEDLGAGTPGSNNFCSSSTEGLPRTWQPGETNDPINQIPSLRLMPDFAGVYSFLGSVFDPSTSGHLQKLKEMNPIDVETALLLMRNLSINLTSPDFEDQRKLLSLYSASDGPGLGSSRSSALATSAPFM

SEQ ID NO: 183959 - protein, 199 aa, Zea Mays
MVSASAPPPQAQSDAAGSGEEVSKKVRKPYTITKSRESWTEQEHDKFLEALQLFDRDWKKIEAFVGSKTVIQIRSHAQKYLLKVQKNGTSEHVPPPRPKRKAAHPYPQKASKNDSSSIHRNSGMNVPVSSWAHSSIPQAVASSMVKEDLGAGTPGSNNFCSSSTEGLPRTWQPGETNDPINQIPSLRRQYLMIFLIIIL

SEQ ID NO: 183960 - protein, 117 aa, Zea Mays
MVSASAPPPQAQSDAAGSGEEVSKKVRKPYTITKSRESWTEQEHDKFLEALQLFDRDWKKIEAFVGSKTVIQIRSHAQKYLLKVQKNGTSEHVPPPRPKRKAAHPYPQKASKNGTLA

SEQ ID NO: 183961 - protein, 142 aa, Zea Mays
MNVPVSSWAHSSIPQAVASSMVKEDLGAGTPGSNNFCSSSTEGLPRTWQPGETNDPINQIPSLRLMPDFAGVYSFLGSVFDPSTSGHLQKLKEMNPIDVETALLLMRNLSINLTSPDFEDQVLPIRDASTQQSRPEVRTTIL

SEQ ID NO: 183962 - protein, 262 aa, Zea Mays
MVSASAPPPQAQSDAAGSGEEVSKKVRKPYTITKSRESWTEQEHDKFLEALQLFDRDWKKIEAFVGSKTVIQIRSHAQKYLLKVQKNGTSEHVPPPRPKRKAAHPYPQKASKNDSSSIHRNSGMNVPVSSWAHSSIPQAVASSMVKDLGAGTPGSNNFCSSSTEGLPRTWQPGETNDPINQIPSLRLMPDFAGVYSFLGSVFDPSTSGHLQKLKEMNPIDVETALLLMRNLSINLTSPDFEDQEACTLPGLSYPQKLGHLGS

SEQ ID NO: 183963 - protein, 141 aa, Zea Mays
MNVPVSSWAHSSIPQAVASSMVKDLGAGTPGSNNFCSSSTEGLPRTWQPGETNDPINQIPSLRLMPDFAGVYSFLGSVFDPSTSGHLQKLKEMNPIDVETALLLMRNLSINLTSPDFEDQVLPIRDASTQQSRPEVRTTIL

SEQ ID NO: 183964 - protein, 170 aa, Zea Mays
MNVPVSSWAHSSIPQAVASSMVKEDLGAGTPGSNNFCSSSTEGLPRTWQPGETNDPINQIPSLRLMPDFAGVYSFLGSVFDPSTSGHLQKLKEMNPIDVETALLLMRNLSINLTSPDFEDQVSGTLVHVSVFCCLHHFSMRKLLSLYSASDGPGLGSSRSSALATSAPFM

SEQ ID NO: 183965 - protein, 131 aa, Zea Mays
MVSASAPPPQAQSDAAGSGEEVSKKVRKPYTITKSRESWTEQEHDKFLEALQLNSGMNVPVSSWAHSSIPQAVASSMVKDLGAGTPGSNNFCSSSTEGLPRTWQPGETNDPINQIPSLRRQYLMIFLIIIL

SEQ ID NO: 183966 - protein, 186 aa, Zea Mays
MVSASAPPPQAQSDAAGSGEEVSKKVRKPYTITKSRESWTEQEHDKFLEALQLFDRDWKKIEAFVGSKTVIQIRSHAQKYLLKVQKNGTSEHVPPPRPKRKAAHPYPQKASKNDSSSIHRNSGMNVPVSSWAHSSIPQAVASSMVKGLYLCFFCQKVLLEYSSVNSYLSPRRFRCWNTRFKQFLLK

SEQ ID NO: 183967 - protein, 833 aa, Zea Mays
MVSASAPPPQAQSDAAGSGEEVSKKVRKPYTITKSRESWTEQEHDKFLEALQLFDRDWKKIEAFVGSKTVIQIRSHAQKYLLKVQKNGTSEHVPPPRPKRKAAHPYPQKASKNGHIFVISEEKMSQDKKAVAETKLTEEEKLLEEKIAGFVESIAKTNTEKITKEILEGLSEDTDDSDSYDMESGGEDSEDRPWRPSHTVFGKSTIKQSHLDNMRGRYFRDMSIVRADIDRAAPAPEEDEVVIFRSFFKAGLRFPLSRFVVEVLSTYQIYLHQITPEAIIRMGIFVWAVRSQGLEPSARCFCSMHELSYETKAWGKEQYHNNFGCYSFVARSGVSYPVPTFRKRWPGDWMKEWFYVKNDLKAREDIKEIIMRPIWSHFGLRKPKVEIDEAVEACRRAFSTICSFVGTRDLLQEHIAYRIWPLVDSWEMPKDTITNPSEGGLVRLKYTFRFEDKFVEPDDDWLKCIENTSDELLGAYSKSEDNALSAAFGSRKKKRLNRVFDAIGFVYPDYRYPPRGQKRKGVSSEKVAASAAPSEPAPKGKKLKVLTHRPRYIEPAVMPEFGGETSSATEPKEPAPPTQKIEKPAAVPKGPSSKVILTKVAEDKTERSKTERATKMSGVLSPSTEATVLTAEKSSATTPRRKRMVNVLDILDTLDSKRPSSTKKTAGADKTQHKAGSEQIEVEAIKNQDEAEAGPKVPVETKLATTEQGAKEMIPDTNIVFEKSAAKEAESLTPEASSEDLDYIIRHAAGKKLSKEEIFEAKHYARELKYPKGALVFNGMDEDDFLYCLPDNKELPVCREMARSMGFPKLEAGLCAMTKDDLADSLAYNSLKV

SEQ ID NO: 183968 - protein, 105 aa, Zea Mays
MDSFSSSPSSSGPGANPDVVMEQIKTQLAQAYAQEFLETVGNKCFEKCVTKPGSSLSGSESSCISRCVDRYIEATGAEINQLQWAAAHPDWMAIAFENKVQLLRV

SEQ ID NO: 183969 - protein, 64 aa, Zea Mays
MSSRPLDLDPLAHVTKRMRRQSHPQSLLASDSDSAASVRSWSNAWKLAWAATCLSEISRRLLGC

SEQ ID NO: 183970 - protein, 69 aa, Zea Mays
MDTGSCNKAAAPPPPRNIEKNQQVEKEPIEEKPNAAAQLQDRVFNILGENSSELAGDRPQERYQATTSS

SEQ ID NO: 183971 - protein, 155 aa, Zea Mays
MCSLVAFWGVCGPRGVTAEEQVCIIKENLRVAQTRQKSYADNRRRPLEFEEGDYVYLKVSPLRGMKRFKVKGKLSPRFIGPFRVFRRVGEMAYQLELPDNLFDVHNVFHMSQLKKCLRVPEEHLPMEELSVQGDLTYMEYPVKILYILTRVTRNK

SEQ ID NO: 183972 - protein, 941 aa, Zea Mays
MAVIFHSKITVRPGSVFCFGTISSVADEGGILHRIADLPEEKFPPTNSENAGKTLPPALRKKIVSGKAGARSSLTRKTPLSTSPTKEWTRVARKKETRERQVVLPVPPASKENGKKVATTAVPFYPDVLFIGRVESPAVSDDEPTTPGEEPPQRESRRRRNRRRNVRRHHEAGERDPEQPVSRDEVSEVGETPEERVFRERRNSRRRDRRRIQEQAEQDARQRRENPLFGRNLNPDFARAMNTPSEVGGVLARIADGLPRTPDAEGYRRLFTQAANHLLSLAHPPNDLRHAINSRRDARSSINASRERRHENEIRRREEYDRDHAFPTQSQATRTESATASTGGTTRGRSRNHHHHSPPRDRRHPRRQEDTCGVSALTPRLRAIQWPPNFKVSNVDKYEPKQDPGGWLAVYTTAARAAGASEDVMTAYLPIVLGQDALQWLRHLPRHCIDDWGDFSRRFIANFQSLSDKPAQPWDLKSIKRRGDETLRSYLKRFQTMRNRIPEVTEAAVIEDFYRGSNDSAFVRAILQKAPTTSEELFREADLYITADERAQDLIGGAKPAPAAPRRDANQPPDKRWEKRPREEVHAAGPPASRARGGPRGGERTLDDILDAQCPYHKDMRHTLRNCRDFKHSVGHGRPFQPLPPPPPRGGPDEPRQPHQQEEGGGGAFPRVDREVNVIFGGHGSQENKRQQKLNDRQILVATTGPPAPYRWSEHPITFTREDQWLNFDHPGRYPLLVDPVIRESRVKKVLVDGGSSINVTFPRTLQGLGVHLKELHESDTPFFGIVPTEGEYPLGHIYMPVTFGTPENYRTEFLRFEVANFDCGYNAIIGRPGLAKFMAIPHYTYMILKMPGPQGIITVRADFQGAAECFRVAIQAALTTKPSTVPSTPANSKPEEDLAVPANEAQAVTSMRPTEETKRINLGFADERKTAIISSSLNDK

SEQ ID NO: 183973 - protein, 61 aa, Zea Mays
MPTCCRFVTDVGQARETSSTRQFMSSKLKNNDMYQGTDMYKMLNVCQTSSKSRMQILSRQE

SEQ ID NO: 183974 - protein, 67 aa, Zea Mays
MACSDKLQEAPEEGQQEDENCGAYVMRRSARGTTILWRECARRAAYLLHSSGRGCRGPPLEAPGHCR

SEQ ID NO: 183975 - protein, 151 aa, Zea Mays
MWSWLTKIASACLGPVRRCARTRKDEDDSDNGRGVADDLLWSRDLGRHAAGQFSFAVVQANEALEDHSQVETGSAATFVGVYDGHGGAEAARFISDHLFAHLIRLAQENGTISEDVVRSAFSATEEGFLTLVRRTRFIKPLIAAGCYWRSR

SEQ ID NO: 183976 - protein, 113 aa, Zea Mays
MWSWLTKIASACLGPVRRCARTRKDEDDSDNGRGVADDLLWSRDLGRHAAGQFSFAVVQANEALEDHSQVETGSAATFVGVYDGHGGAEAARFISDHLFAHLIQQWTTQYSFQ

SEQ ID NO: 183977 - protein, 77 aa, Zea Mays
MRDPLRPHKQAAPAHCLLHFLTHPLHLFNLQVKIHPTSRCEKVAVCHSTWDLEVDERGVELGSHIGTLELSLSLVVT

SEQ ID NO: 183978 - protein, 350 aa, Zea Mays
MLIRATGHELEMARNRSLKSLDLTKAVKDTVNVSAGDVASLIYLWNPWAIVTCVGSCTSPIENLMVVIMIYGSCSRLAPLAAFGYVMATHLSLYPAILIVPVILLLGYGLDAPPPKVFVIKGSIARKSDVSDNDKTSRQRVVQQFSWKPVLHFIFWLFIWSCHVLLLSSVILKKVGGLHEMFEKTYGFILTVKDLSPNIGVLWYFFAEVFDFFRNFFLMVFNMNIIFMVLPLAIRLKHRPCFLAFVYTAIVAILKSYPSAGDSALYLGLLGLFVNELAEMQFTFFLFFGYIGVSLLSPVMHNLWIWRGTGNANFYFATGLAYTCLQTVLLVESVSSMIKHDRKLRLLVTS

SEQ ID NO: 183979 - protein, 213 aa, Zea Mays
MLIFTADFLAAMLIRATGHELEMARNRSLKSLDLTKAVKDTVNVSAGDVASLIYLWNPWAIVTCVGSCTSPIENLMVVIMIYGSCSRLAPLAAFGYVMATHLSLYPAILIVPVILLLGYGLDAPPPKVFVIKGSIARKSDVSDNDKTSRQRVVQQFSWKPVLHFIFWLFIWSCHVLLLSSVILKKVGGLHEMFEKTYGFILTVKDLSPNIGVL

SEQ ID NO: 183980 - protein, 170 aa, Zea Mays
MFEKTYGFILTVKDLSPNIGVLWYFFAEVFDFFRNFFLMVFNMNIIFMVLPLAIRLKHRPCFLAFVYTAIVAILKSYPSAGDSALYLGLLGLFVNELAEMQFTFFLFFGYIGVSLLSPVMHNLWIWRGTGNANFYFATGLAYTCLQTVLLVESVSSMIKHDRKLRLLVTS

SEQ ID NO: 183981 - protein, 383 aa, Zea Mays
MAIRYWPMAGAAVGFRLVLVLFGGDLHLASRPEVSTPLTSLRRLAEGYWLKQASVSPYSGSMYHGSPLLLSVLGPLTSSRPDGHHAHIYCSLIFVAVDFLAAMLIRATGHELEMARNRSLKSLDLTKAVKDTVNVSAGDVASLIYLWNPWAIVTCVGSCTSPIENLMVVIMIYGSCSRLAPLAAFGYVMATHLSLYPAILIVPVILLLGYGLDAPPPKVFVIKGSIARKSDVSDNDKTSRQRVVQQFSWKPVLHFIFWLFIWSCHVLLLSSVILKKVGGLHEMFEKTYGFILTVKDLSPNIGVLWYFFAEVFDFFRNFFLMVFNMNIIFMVLPLAIRLKHRPCFLAFVYTAIVAILKSYPSAGDSALYLGLLGLFVNELAGHW

SEQ ID NO: 183982 - protein, 498 aa, Zea Mays
MAIRYWPMAGAAVGFRLVLVLFGGDLHLASRPEVSTPLTSLRRLAEGYWLKQASVSPYSGSMYHGSPLLLSVLGPLTSSRPDGHHAHIYCSLIFVAVDFLAAMLIRATGHELEMARNRSLKSLDLTKAVKDTVNVSAGDVASLIYLWNPWAIVTCVGSCTSPIENLMVVIMIYGSCSRLAPLAAFGYVMATHLSLYPAILIVPVILLLGYGLDAPPPKVFVIKGSIARKSDVSDNDKTSRQRVVQQFSWKPVLHFIFWLFIWSCHVLLLSSVILKKVGGLHEMFEKTYGFILTVKDLSPNIGVLWYFFAEVFDFFRNFFLMVFNMNIIFMVLPLAIRLKHRPCFLAFVYTAIVAILKSYPSAGDSALYLGLLGLFVNELAEMQFTFFLFFGYIGVSLLSPVMHNLWIWRGTGNANFYFATGLAYTCLQTVLLVESKLKWWTAPMLAIPYMVLLILEHKQLLILEFVDVGHIRCSMLYCRPHTCTILGPQLFQQRQGTR

SEQ ID NO: 183983 - protein, 308 aa, Zea Mays
MRCKKHPYQVGGGGVCATCLRDRLIALEAAQNGDASSSPPPPAAAPAFPRSVSPYVSRRKSDTSGGGGALRHHPSLLFFRTPQVGPAYGGGALEEGDIGYEYKRRRAGKFSVLATLFGHHHGHRSEETHQEGATERKKHSWFAAIMPRRRKKQAAPASITSPRSAPPRRSCRVVSNRGLSPERDSHGSGDESSSPAADPPWRPSPSPMRRTRCRRRQTNSMPSGFAVCLSPLVRPSPGRRRHVQPPDPGSFSSEFRPSPLHSLSSAASVTRCRSRKLADVGRFRRVCKTGTHTPNQVQNTPVDIYTTA

SEQ ID NO: 183984 - protein, 1826 aa, Zea Mays
MASKGPRSRLDHDTRARRQKALEAPREPRRPKVHWDHVLAEMLWLAKEFDSERKWKLSMAKKIAQRANKSIVDQAAKGERKQKEEEHRMRKVAVNISKDVKKFWIKIEKLVVYKHQLELEERKKKALDKQLDFLLGQTERYSTMLAENLVDMPYSQNLETETSQINQPSHQEVVAEENLNATIPDDLDNMEVDDDYGSSLDEEPEDDEHTIDEDEAQITEAERNEELAALEAEADLPLDVILKMYTKTKVTPNQANGCDHELAHSSSDEGNSSEEVDDGHSYAEFVKKNHGKSNGNISSINDQEDEDYIAAEEVKDDEATLSEEEQLAKKEDPDHLEEIKLLQKESEIPLEELLARYREIMKQLSWRIHPILLKRDVLETEHTTLQSEIASEPCAQQNFVEENNLTDVKTVNEDKSDDVIADAAAAARSAQPTGNTFLTTKVRTKFPFLLKHSLREYQHIGLDWLVAMYEKRLNGILADEMGLGKTIMTISLLAHLACEKGIWGPHLIVVPTSVMLNWETEFLKWCPAFKILTYFGSAKERKQKRQGWMKPNYFHVCITTYRLVIQDSKVFKRKKWKYLILDEAHLIKNWKSQRWQTLLNFNSKRRILLTGTPLQNDLMELWSLMHFLMPHVFQSHQEFKDWFCNPISGMVEGQDKVNKEVIDRLHNVLRPFILRRLKRDVEKQLPKKHEHVIYCRLSRRQRNLYEEFVASSETQATLASGNYFGMISIIMQLRKVCNHPDLFEGRPIISSFDMAGINMQLSYSVCMLLDKSPFSQVDLSDMNFVFTQNEFSMSSWEADEVISAFPSSITSRDCDLDIFCSNKDHQGSNLTNIFEDIQKALQEERIKESRERAASVAWWNRVRCQKRPVYGTNMRHVLTVKHPVSNILNKRNNPLCHMDYSSRLADLVLPSVERFQKMLYFVESFTFAIPAARAPPPVCWCSKGKSPVFIDPAYREKCMYKFSPILSPIRSAIVRRQVYFPDRRLIQFDCGKLQELAILLRRLKSEGHRALIFTQMTKMLDVLEEFINLYGYTYLRLDGSTPPEERQTLMQRFNTNPKFFLFILSTRSGGVGINLVGADTVIFYDSDWNPAMDQQAQDRCHRIGQTREVHIYRLISESTIEENILKKANQKRALDDLVIQRGSYNTEFFKKLDPMEFFSGHTSLRVEGQEKNCSTSVGASNDVDLALSIADVEAAIRQAEDEADYMALKKLEEEEAVDNQEFSEEVAGRPEEDELVNEEDGKPDEHINEDHKYYSSDVEKEKHITLSTNRLNNEKALTLAVGDEDTDMLADVKQMAAAAAAAGQACSSFENQLRPIDRYAMRFMELWDPVIDKAAVNHQVNVEEEEWELDRIEKLKEDLEAEIDEDQEPLSYQSWDVDFATTAYRQHVEALTQKQLLEEQERQAQEAAKELEENNDNMSSHRRKSNKNKKKTGKFKSQKRPRLSSESEVILEETSVDTMSIDDNAPSPELISDESPHHYSNKRKKIMSATEEDSNSRSLKKFKKTKSSFISELSPRPKEDLNDSDPKSVARTKSDGRLSIPCMPVKRVIVIKPERLKKKGIWSRDCASDSWTSEEDAVLCGTVHEYGPLWELASDFLHSLPGGSSYRGRYHHPLHCCERYRELFCKYAISATDNSNSEKAPSGTGKAVLRVSEDQAQMLVNVTSELPNNELLLQKHFMAVISSVWRSKCCRHPCCFRNKPGGSSENWPMVNFRPSVNLVREALAAGQAKFTLTVIPPPSRNQEYSRNYLELELDFLKDQHAYEEDFPSVLNVSILEPESSKQAPEPVEQSLLSELSCRQAENRLRSVLMQVFIAVMMVAAVAVILV

SEQ ID NO: 183985 - protein, 1588 aa, Zea Mays
MAVQIMKQLSWRIHPILLKRDVLETEHTTLQSEIASEPCAQQNFVEENNLTDVKTVNEDKSDDVIADAAAAARSAQPTGNTFLTTKVRTKFPFLLKHSLREYQHIGLDWLVAMYEKRLNGILADEMGLGKTIMTISLLAHLACEKGIWGPHLIVVPTSVMLNWETEFLKWCPAFKILTYFGSAKERKQKRQGWMKPNYFHVCITTYRLVIQDSKVFKRKKWKYLILDEAHLIKNWKSQRWQTLLNFNSKRRILLTGTPLQNDLMELWSLMHFLMPHVFQSHQEFKDWFCNPISGMVEGQDKVNKEVIDRLHNVLRPFILRRLKRDVEKQLPKKHEHVIYCRLSRRQRNLYEEFVASSETQATLASGNYFGMISIIMQLRKVCNHPDLFEGRPIISSFDMAGINMQLSYSVCMLLDKSPFSQVDLSDMNFVFTQNEFSMSSWEADEVISAFPSSITSRDCDLDIFCSNKDHQGSNLTNIFEDIQKALQEERIKESRERAASVAWWNRVRCQKRPVYGTNMRHVLTVKHPVSNILNKRNNPLCHMDYSSRLADLVLPSVERFQKMLYFVESFTFAIPAARAPPPVCWCSKGKSPVFIDPAYREKCMYKFSPILSPIRSAIVRRQVYFPDRRLIQFDCGKLQELAILLRRLKSEGHRALIFTQMTKMLDVLEEFINLYGYTYLRLDGSTPPEERQTLMQRFNTNPKFFLFILSTRSGGVGINLVGADTVIFYDSDWNPAMDQQAQDRCHRIGQTREVHIYRLISESTIEENILKKANQKRALDDLVIQRGSYNTEFFKKLDPMEFFSGHTSLRVEGQEKNCSTSVGASNDVDLALSIADVEAAIRQAEDEADYMALKKLEEEEAVDNQEFSEEVAGRPEEDELVNEEDGKPDEHINEDHKYYSSDVEKEKHITLSTNRLNNEKALTLAVGDEDTDMLADVKQMAAAAAAAGQACSSFENQLRPIDRYAMRFMELWDPVIDKAAVNHQVNVEEEEWELDRIEKLKEDLEAEIDEDQEPLSYQSWDVDFATTAYRQHVEALTQKQLLEEQERQAQEAAKELEENNDNMSSHRRKSNKNKKKTGKFKSQKRPRLSSESEVILEETSVDTMSIDDNAPSPELISDESPHHYSNKRKKIMSATEEDSNSRSLKKFKKTKSSFISELSPRPKEDLNDSDPKSVARTKSDGRLSIPCMPVKRVIVIKPERLKKKGIWSRDCASDSWTSEEDAVLCGTVHEYGPLWELASDFLHSLPGGSSYRGRYHHPLHCCERYRELFCKYAISATDNSNSEKAPSGTGKAVLRVSEDQAQMLVNVTSELPNNELLLQKHFMAVISSVWRSKCCRHPCCFRNKPGGSSENWPMVNFRPSVNLVREALAAGQAKFTLTVIPPPSRNQEYSRNYLELELDFLKDQHAYEEDFPSVLNVSILEPESSKQAPEPVEQSLLSELSCRQAENRLRIASEACYDGESFHWASSSFHINDAARHKSGLKSIGKHKAASESGRPPKSKVQKITELHQEGPIAMSNFLCMPAQLLPSTADFHISDSLSDFGINDYEFNYSEDLLQEFDALEFFPDQGDSGLLGIEELEPLSDFTDIG

SEQ ID NO: 183986 - protein, 1974 aa, Zea Mays
MASKGPRSRLDHDTRARRQKALEAPREPRRPKVHWDHVLAEMLWLAKEFDSERKWKLSMAKKIAQRANKSIVDQAAKGERKQKEEEHRMRKVAVNISKDVKKFWIKIEKLVVYKHQLELEERKKKALDKQLDFLLGQTERYSTMLAENLVDMPYSQNLETETSQINQPSHQEVVAEENLNATIPDDLDNMEVDDDYGSSLDEEPEDDEHTIDEDEAQITEAERNEELAALEAEADLPLDVILKMYTKTKVTPNQANGCDHELAHSSSDEGNSSEEVDDGHSYAEFVKKNHGKSNGNISSINDQEDEDYIAAEEVKDDEATLSEEEQLAKKEDPDHLEEIKLLQKESEIPLEELLARYREDGCADHETAELENSPHFVEEVNTDKSLNDQSVNILEAKSDIFVDHQSRDVLETEHTTLQSEIASEPCAQQNFVEENNLTDVKTVNEDKSDDVIADAAAAARSAQPTGNTFLTTKVRTKFPFLLKHSLREYQHIGLDWLVAMYEKRLNGILADEMGLGKTIMTISLLAHLACEKGIWGPHLIVVPTSVMLNWETEFLKWCPAFKILTYFGSAKERKQKRQGWMKPNYFHVCITTYRLVIQDSKVFKRKKWKYLILDEAHLIKNWKSQRWQTLLNFNSKRRILLTGTPLQNDLMELWSLMHFLMPHVFQSHQEFKDWFCNPISGMVEGQDKVNKEVIDRLHNVLRPFILRRLKRDVEKQLPKKHEHVIYCRLSRRQRNLYEEFVASSETQATLASGNYFGMISIIMQLRKVCNHPDLFEGRPIISSFDMAGINMQLSYSVCMLLDKSPFSQVDLSDMNFVFTQNEFSMSSWEADEVISAFPSSITSRDCDLDIFCSNKDHQGSNLTNIFEDIQKALQEERIKESRERAASVAWWNRVRCQKRPVYGTNMRHVLTVKHPVSNILNKRNNPLCHMDYSSRLADLVLPSVERFQKMLYFVESFTFAIPAARAPPPVCWCSKGKSPVFIDPAYREKCMYKFSPILSPIRSAIVRRQVYFPDRRLIQFDCGKLQELAILLRRLKSEGHRALIFTQMTKMLDVLEEFINLYGYTYLRLDGSTPPEERQTLMQRFNTNPKFFLFILSTRSGGVGINLVGADTVIFYDSDWNPAMDQQAQDRCHRIGQTREVHIYRLISESTIEENILKKANQKRALDDLVIQRGSYNTEFFKKLDPMEFFSGHTSLRVEGQEKNCSTSVGASNDVDLALSIADVEAAIRQAEDEADYMALKKLEEEEAVDNQEFSEEVAGRPEEDELVNEEDGKPDEHINEDHKYYSSDVEKEKHITLSTNRLNNEKALTLAVGDEDTDMLADVKQMAAAAAAAGQACSSFENQLRPIDRYAMRFMELWDPVIDKAAVNHQVNVEEEEWELDRIEKLKEDLEAEIDEDQEPLSYQSWDVDFATTAYRQHVEALTQKQLLEEQERQAQEAAKELEENNDNMSHRRKSNKNKKKTGKFKSQKRPRLSSESEVILEETSVDTMSIDDNAPSPELISDESPHHYSNKRKKIMSATEEDSNSRSLKKFKKTKSSFISELSPRPKEDLNDSDPKSVARTKSDGRLSIPCMPVKRVIVIKPERLKKKGIWSRDCASDSWTSEEDAVLCGTVHEYGPLWELASDFLHSLPGGSSYRGRYHHPLHCCERYRELFCKYAISATDNSNSEKAPSGTGKAVLRVSEDQAQMLVNVTSELPNNELLLQKHFMAVISSVWRSKCCRHPCCFRNKPGGSSENWPMVNFRPSVNLVREALAAGQAKFTLTVIPPPSRNQEYSRNYLELELDFLKDQHAYEEDFPSVLNVSILEPESSKQAPEPVEQSLLSELSCRQAENRLRIASEACYDGESFHWASSSFHINDAARHKSGLKSIGKHKAASESGRPPKSKVQKITELHQEGPIAMSNFLCMPAQLLPSTADFHISDSLSDFGINDYEFNYSEDLLQEFDALEFFPDQGDSGLLGIEELEPLSDFTDIG

SEQ ID NO: 183987 - protein, 1476 aa, Zea Mays
MYEKRLNGILADEMGLGKTIMTISLLAHLACEKGIWGPHLIVVPTSVMLNWETEFLKWCPAFKILTYFGSAKERKQKRQGWMKPNYFHVCITTYRLVIQDSKVFKRKKWKYLILDEAHLIKNWKSQRWQTLLNFNSKRRILLTGTPLQNDLMELWSLMHFLMPHVFQSHQEFKDWFCNPISGMVEGQDKVNKEVIDRLHNVLRPFILRRLKRDVEKQLPKKHEHVIYCRLSRRQRNLYEEFVASSETQATLASGNYFGMISIIMQLRKVCNHPDLFEGRPIISSFDMAGINMQLSYSVCMLLDKSPFSQVDLSDMNFVFTQNEFSMSSWEADEVISAFPSSITSRDCDLDIFCSNKDHQGSNLTNIFEDIQKALQEERIKESRERAASVAWWNRVRCQKRPVYGTNMRHVLTVKHPVSNILNKRNNPLCHMDYSSRLADLVLPSVERFQKMLYFVESFTFAIPAARAPPPVCWCSKGKSPVFIDPAYREKCMYKFSPILSPIRSAIVRRQVYFPDRRLIQFDCGKLQELAILLRRLKSEGHRALIFTQMTKMLDVLEEFINLYGYTYLRLDGSTPPEERQTLMQRFNTNPKFFLFILSTRSGGVGINLVGADTVIFYDSDWNPAMDQQAQDRCHRIGQTREVHIYRLISESTIEENILKKANQKRALDDLVIQRGSYNTEFFKKLDPMEFFSGHTSLRVEGQEKNCSTSVGASNDVDLALSIADVEAAIRQAEDEADYMALKKLEEEEAVDNQEFSEEVAGRPEEDELVNEEDGKPDEHINEDHKYYSSDVEKEKHITLSTNRLNNEKALTLAVGDEDTDMLADVKQMAAAAAAAGQACSSFENQLRPIDRYAMRFMELWDPVIDKAAVNHQVNVEEEEWELDRIEKLKEDLEAEIDEDQEPLSYQSWDVDFATTAYRQHVEALTQKQLLEEQERQAQEAAKELEENNDNMSSHRRKSNKNKKKTGKFKSQKRPRLSSESEVILEETSVDTMSIDDNAPSPELISDESPHHYSNKRKKIMSATEEDSNSRSLKKFKKTKSSFISELSPRPKEDLNDSDPKSVARTKSDGRLSIPCMPVKRVIVIKPERLKKKGIWSRDCASDSWTSEEDAVLCGTVHEYGPLWELASDFLHSLPGGSSYRGRYHHPLHCCERYRELFCKYAISATDNSNSEKAPSGTGKAVLRVSEDQAQMLVNVTSELPNNELLLQKHFMAVISSVWRSKCCRHPCCFRNKPGGSSENWPMVNFRPSVNLVREALAAGQAKFTLTVIPPPSRNQEYSRNYLELELDFLKDQHAYEEDFPSVLNVSILEPESSKQAPEPVEQSLLSELSCRQAENRLRIASEACYDGESFHWASSSFHINDAARHKSGLKSIGKHKAASESGRPPKSKVQKITELHQEGPIAMSNFLCMPAQLLPSTADFHISDSLSDFGINDYEFNYSEDLLQEFDALEFFPDQGDSGLLGIEELEPLSDFTDIG

SEQ ID NO: 183988 - protein, 261 aa, Zea Mays
MPPLFLGRPSFHRRRGNRVREGAGAAGPVPRGAEAEAAGSPARGGGEACRRDANARQQQRRQGLLRGFGGGGGDDEQLQQRLDDGGRGGGPRAAAAPVRAVLHVPAVRVVPLGGARPRGGGGRAAVRGGRRRGDPGGDARQRPSDDGAAARAAAQPGHRAAGAPPRRAPPQRRHRAGRPGPLHHQCQGGGRVRPGDGGRHRRRCAPRALHHRRRGHRAAAARGSGAATAIGPARAREPTYRRSRGGQRRSDVRDSKSCVQA

SEQ ID NO: 183989 - protein, 248 aa, Zea Mays
MAIDHAARLGLTSRGRRRVRRRRRRREPAVAAVAEAAAVHELLRPMQDPRRRAQERVQHVLPRLHGRRALLPLPRAPPRPPLHPDTEVVVPRRDPGVGDTQGAGHRRRADVHHQQRARGVPQRAPAASPGQGRHQHLRGLRAQPPRLLPLLLPRVQVGTARGYRPKKKHGGGGGGGNKRKRAALKDVRSDSEESCTSTSGASSDKSSVVQSFSPSTPPPASASYRRPGNKRRKGVPHRSPFGSLIVEF

SEQ ID NO: 183990 - protein, 108 aa, Zea Mays
MQANASLLLRVQSIKYSSSRCPSLMTLKVRSVATELVKKREGKKNSNVPAVFFLKMYCYPKEKHTHIQDSLRSFLVRSSKRRHKTTGTSAHSITRRRAQPPSTDKNHT

SEQ ID NO: 183991 - protein, 151 aa, Zea Mays
MTGKATGRDAPRSETTRALLGVMGDWLSGASPRPAGAGEDPSQLGAVPADPTTRHITIFFAGARPHLRSPRRRDEDVPPTARHPTPPGRPERWTRVLSDLALGLHLQSDPNPGRLYSCTSLDGCGQWPYLSQRILGVLVSQATGRSMMDRQ

SEQ ID NO: 183992 - protein, 115 aa, Zea Mays
MFRSVPRHHLSPFAYPSRKMNKKLKQRKTEKLRKLSRTPTIPHIRQSIDSRSPRNRNGPENSNAQEGEQGNQASRREPGVMNCYGSWTEQARSLSARTTTKFWRLTMTHLMTPSN

SEQ ID NO: 183993 - protein, 224 aa, Zea Mays
MTPRPHQPAGHLLRGRETLTGARIPLYSMAEQDGDAGQMPPDSVPVVGVGDQNTNQHQPFFSMCQPLRTVSYSNSWDGTCVAAANENDHTGISGTLDREDDSCSRHSINKEVSLVQGVMKMEQSMVQSIQFVSFYLQNHLRNFMYIYLFRSLLQQQQQQQQQQQQSLLSQARWGRLEMKPRMKTSELNPQRKKGETKAKENRKRRNGGTHKRDKTHKNQQGLNG

SEQ ID NO: 183994 - protein, 101 aa, Zea Mays
MTPRPHQPAGHLLRGRETLTGARIPLYSMAEQDGDAGQMPPDSVPVVGVGDQNTNQHQPFFSMCQPLRTVSYSNSWDGTCVAAANENDHTLVIVGHTCSQI

SEQ ID NO: 183995 - protein, 381 aa, Zea Mays
MELFPAHPDLQLQISPPPPATKPMELGFWKRALVDTTTSPATATAVAAATTATTATSHAFASSAPTSAVGYHHAAVGAHHHQVPVPVPAGSHSHSHLGLPLLHHTHPILPAAESGGVLRRPDLGSTRPIRGIPVYSTSQQPLPFLQSHPHYCCDAIAGAGHPRSPKAALRLAGAPAKRGARAPRMRWTTSLHARFVHAVELLGGHERATPKSVLELMDVKDLTLAHVKSHLQMYRTIKTTDHRPASASSYGQAGGAKTIIDIPDDDSSLFDLTNTTTTTSGSESSAQHSNPPDGSEHNGASTCALWCNASIRGAACWFVRDKSRDATPGDIKSFEVRRRSLPPLFFFLSLPTRLNQLVHPSLSPIRTSPTPMAGRAAMMPC

SEQ ID NO: 183996 - protein, 375 aa, Zea Mays
MELFPAHPDLQLQISPPPPATKPMELGFWKRALVDTTTSPATATAVAAATTATTATSHAFASSAPTSAVGYHHAAVGAHHHQVPVPVPAGSHSHSHLGLPLLHHTHPILPAAESGGVLRRPDLGSTRPIRGIPVYSTSQQPLPFLQSHPHYCCDAIAGAGHPRSPKAALRLAGAPAKRGARAPRMRWTTSLHARFVHAVELLGGHERATPKSVLELMDVKDLTLAHVKSHLQMYRTIKTTDHRPASASSYGQAGGAKTIIDIPDDDSSLFDLTNTTTTTSGSESSAQHSNPPDGSEHNGASTCALWCNASISGRGAACWFVRDKSRDATPGDIKSFESLDDDVSDLNLSAPFQVAAATMFGGGNKPNLDFTLGRI

SEQ ID NO: 183997 - protein, 663 aa, Zea Mays
MVGGLVLSQAQTHQAATPRTAAPAPAPAQALEKRPRDQAQPCGTVAAAAAVSVSAPSLDEVRKVHARHIKLGLDRCPRYARPLLAACAVSGWPGGMELAASIFESLVEPEAFDYNTLMRGHVSGGGGDRDPAAALRLYIDGLEAGVSPDSYTFPFVLKACAQLAALQEGRQLQAHIVKLGFQHDEHVQNSLISFYGKCGAPAMARLAFDRVEAEERTTVSWSALLAAYTKAGLWGECLASFGSMMLDGWRPDESSMVSALSACAHLGSFDAGRSVHCALLRNTARLNTIMLTSLLDMYAKCGSIEKAAAAFDAMDDKSAWAYSAMLSGLALHGDGRKALQVFDAMVREGHAPDAAAYVGVLNACSRAGLLEDGLRCFDRMRLEHKVAPNALHYGCMVDLMARAGRLDDARALIGTMPTGPTDTAWRSLLNACRIHGDLDLAWHALQELRRLGAANAGDYVIVADMHARAKNWTAAAALRTEAVDSGLAQSLGFSAVEVRGELHRFVSQDMAHPRTRDIYEMLHQMEWQLRFDGYKPDTSEVALDAGEEEKGRVVAAHSQKLAMAFGLLSTPEGAPVRVVTNLRMSKECHAYSALISEIFGRDIVIRDRNRLHRFSRPQVEPPPSSPTRTKPRRNQGDAIDELSDAGAVAKAPALRREMEGVAI

SEQ ID NO: 183998 - protein, 628 aa, Zea Mays
MVGGLVLSQAQTHQAATPRTAAPAPAPAQALEKRPRDQAQPCGTVAAAAAVSVSAPSLDEVRKVHARHIKLGLDRCPRYARPLLAACAVSGWPGGMELAASIFESLVEPEAFDYNTLMRGHVSGGGGDRDPAAALRLYIDGLEAGVSPDSYTFPFVLKACAQLAALQEGRQLQAHIVKLGFQHDEHVQNSLISFYGKCGAPAMARLAFDRVEAEERTTVSWSALLAAYTKAGLWGECLASFGSMMLDGWRPDESSMVSALSACAHLGSFDAGRSVHCALLRNTARLNTIMLTSLLDMYAKCGSIEKAAAAFDAMDDKSAWAYSAMLSGLALHGDGRKALQVFDAMVREGHAPDAAAYVGVLNACSRAGLLEDGLRCFDRMRLEHKVAPNALHYGCMVDLMARAGRLDDARALIGTMPTGPTDTAWRSLLNACRIHGDLDLAWHALQELRRLGAANAGDYVIVADMHARAKNWTAAAALRTEAVDSGLAQSLGFSAVEVRGELHRFVSQDMAHPRTRDIYEMLHQMEWQLRFDGYKPDTSEVALDAGEEEKGRVVAAHSQKLAMAFGLLSTPEGAPVRVVTNLRMSKECHAYSALISEIFGRDIVIRDRNRLHRFRNGRCCYLKMTKAC

SEQ ID NO: 183999 - protein, 68 aa, Zea Mays
MDDARIGGYVVFSVSNADHIRNLSCAADLTARSHLDSLVLYMLQVRRFLSSKASAIPVFTCSLIGLIG

SEQ ID NO: 184000 - protein, 104 aa, Zea Mays
MMDSLEASTMHVFGTRMILLFYPRRRQRCFTWKIPNIVETGELFKNSHIGICGMWMKFQVMKYQRVWNCHTKMMTVLIFIFKIMMSIWTVMCWSVKILLLFMQV

SEQ ID NO: 184001 - protein, 1407 aa, Zea Mays
MAAPLHSSSGHNAAAGGGAKTIEEMYQKKTQLEHILLRPDTYIGSVEKHTQALWIYEDGAMVNRSVTYVPGLYKIFDEILVNAADNKQRDPKMDALRVEIDVDSCCISVYNNGDGIPVEVHQEEGVYVPEMILGHLLTSSNYNDNEKKTTGGRNGYGAKLTNIFSTEFVIETADGRRQKKYKQVFYENMGKKSEPQITKCKQGENWTRVTFKPDLAKFNMTHLEDDVVALMRKRVVDMAGTLGKTVKVELDGQRVPIKSFCDYVDLYMKSANCDRPDNFKRIYEQVNDRWEVCVSQSEGQFQQVSFVNRIATIRGGSHVDYVTNQIANHVVAIVNKKNKNANMKLHNVKSHLWVFVNALIDNPAFDSQTKETLTTRQGSFGSKCELSSDFLKKVEKSGVIENVLSWADFKLSKELKKTDGSKKSRISGIPKLEDANEAGGKDSDKCTLILTEGDSAKALAMSGIAVVGRDYYGVFPLRGKLLNVREANHKQIMDNAEIQHIKQILGLQHGKQYESTKGLRYGHLMIMTDQDHDGSHIKGLLINFIHSFWPSLLKVPSFLVEFITPIIKATRGQTTKSFYTMPEYEEWRKNLGASASSWTIKYYKGLGTSTAKEGRKYFEDIIDHKKDFVWVDDQDGNHIELAFSKKRIADRKQWLTNFQPGTYIDQREKQVKYSDFINKELILFSMADLQRSIPSMVDGLKPGQRKILFCSFKRNFVKEAKVAQFSGYVSEHSAYHHGEQSLASTIIGMAQNFVGSNNINLMSPNGQFGTRAQGGKDAASPRYIFTKLSNITRSIFPKDDDILLNYLNEDGQSIEPTWYMPILPMVLVNGSEGIGTGWSTYIPNYNPRDIVANVRRLLNEESTVPMHPWYRGFKGSIEKTVNTKVAGSTYTVTGIIEVVDNTTLRITELPIRRWTQDYKDFLESLAPDPKNKDKDVTSQGDNEDVYIQLKLSEANVNVAKEEGLVKKFKLTTTIGTTNMHLFDSDGKIRKYDTPEQILEEFFQLRLEFYCKRKEALLKNIKLDLKKLENKVRFIRCVVDNEIIVNNRKRADLFLELRHKNFDPFPKKKKKAEPTAVGAIEEEENEESPETAAGVDPSDYEYLLSMSIGTLTLEKIQELNAEKQKLVDDVVELMNTSPKSLWLKDLDAFEKELDVLDQMDLAEEVQREKRIKEGKKGGSKAAPKKQPKKAAPIKLESSTEDNAAEPVVAKRGAQQKKAPKKAPVDEEEVDMPSLKDRLAAFNINDSSPPDHSAMETETTEQPAQKKGRGKKPAAAAVKPKAPAARKRAPTQGGKATQKKIDEMLKVTEDNTSSALSPEKKVRKMRPSPFNKKSGSILQRGSTAASASSETIAEASPPSGSSEEPVAAAKPRRTARATKKHVYISESDPEDEVVELSDDSDFDLDADSD

SEQ ID NO: 184002 - protein, 1037 aa, Zea Mays
MAAPLHSSSGHNAAAGGGAKTIEEMYQKKTQLEHILLRPDTYIGSVEKHTQALWIYEDGAMVNRSVTYVPGLYKIFDEILVNAADNKQRDPKMDALRVEIDVDSCCISVYNNGDGIPVEVHQEEGVYVPEMILGHLLTSSNYNDNEKKTTGGRNGYGAKLTNIFSTEFVIETADGRRQKKYKQVFYENMGKKSEPQITKCKQGENWTRVTFKPDLAKFNMTHLEDDVVALMRKRVVDMAGTLGKTVKVELDGQRVPIKSFCDYVDLYMKSANCDRPDNFKRIYEQVNDRWEVCVSQSEGQFQQVSFVNRIATIRGGSHVDYVTNQIANHVVAIVNKKNKNANMKLHNVKSHLWVFVNALIDNPAFDSQTKETLTTRQGSFGSKCELSSDFLKKVEKSGVIENVLSWADFKLSKELKKTDGSKKSRISGIPKLEDANEAGGKDSDKCTLILTEGDSAKALAMSGIAVVGRDYYGVFPLRGKLLNVREANHKQIMDNAEIQHIKQILGLQHGKQYESTKGLRYGHLMIMTDQDHDGSHIKGLLINFIHSFWPSLLKVPSFLVEFITPIIKATRGQTTKSFYTMPEYEEWRKNLGASASSWTIKYYKGLGTSTAKEGRKYFEDIIDHKKDFVWVDDQDGNHIELAFSKKRIADRKQWLTNFQPGTYIDQREKQVKYSDFINKELILFSMADLQRSIPSMVDGLKPGQRKILFCSFKRNFVKEAKVAQFSGYVSEHSAYHHGEQSLASTIIGMAQNFVGSNNINLMSPNGQFGTRAQGGKDAASPRYIFTKLSNITRSIFPKDDDILLNYLNEDGQSIEPTWYMPILPMVLVNGSEGIGTGWSTYIPNYNPRDIVANVRRLLNEESTVPMHPWYRGFKGSIEKTVNTKVAGSTYTVTGIIEVVDNTTLRITELPIRRWTQDYKDFLESLAPDPKNKDKVTFIEDVTSQGDNEDVYIQLKLSEANVNVAKEEGLVKKFKLTTTIGTTNMHLFDSDGKIRKYDTPEQILEEFFQLRLEFYCKRKEALLKNIKLDLKKLENKVL

SEQ ID NO: 184003 - protein, 807 aa, Zea Mays
MVGSSVEGGADGDGGCCGVGDTSPGTIVWVRRRNGSWWPGRILGPEELPPSQIMSPRSGTPVKLLGREDASVCGEFDACIEKAEATQGTLVKKREKYARREDAVLHALELERKQFASKYQIQGFRPGPSGNISACTKHRKDLGSTRYKSKKSKNCKDVSVPPDVKKEVGQCFLHAGSKRNFSESLTQGNVVSNHMGNFSHLSHSHGGDTLENKESTIVKKNRSDGSDFEDSLVSKSDRRRPISQVLQSSENLLPHLKQNNDFGALLIKENNNPSLATSRSRRNKYTYMASDSGETQSHSDLPSIKMTATGADFENESYLRHTGYFSEEQTSSDFVEKQVTESSERECSESETEEDAELLQNASVILPIESHAPDPYSVPIYEKFKHVDYGDNEVAYSNYMPQLNESEEEDGSSELGVSQWHMKGKRNNRNATKRSVDMRDGNTWLKNYNGSLKGSLHNTNDGNPRKEGMHTSGEKFFEESIYQIKEEPSYDDSDETNVFEDTSHSEANLYYGKRCTSFLRTTRDLSRRYSYFNDYENDSSNVSPLNKDTEQMYHVDRNAYWDGPSFYQTKLTSRFGGMRPMLFNVNLKVQASYQGEHVPLVSLMSRLNGKAIVGHPIQIEIVEDGSTDHLILCGDSGMQESSAAPPAWPTGRRTAMQRVPRSNPSGALLDGDNEGGLVYSDYEMKPTKLYTSSNHQVKVNKKSSSNTRRSVAKSQKKSSKKTNLSSQKRRVLSSISTAKKHHGEGGRAKAHWRNDILGGLIRSEGVPLVTCVPTKVVFTRILEAVGRPPLSVVHRVRMTSPSVRDPP

SEQ ID NO: 184004 - protein, 818 aa, Zea Mays
MVGSSVEGGADGDGGCCGVGDTSPGTIVWVRRRNGSWWPGRILGPEELPPSQIMSPRSGTPVKLLGREDASVDWYNLEKSKRVKAFRCGEFDACIEKAEATQGTLVKKREKYARREDAVLHALELERKQFASKYQIQGFRPGPSACTKHRKDLGSTRYKSKKSKNCKDVSVPPDVKKEVGQCFLHAGSKRNFSESLTQGNVVSNHMGNFSHLSHSHGGDTLENKESTIVKKNRSDGSDFEDSLVSKSDRRRPISQVLQSSENLLPHLKQNNDFGALLIKENNNPSLATSRSRRNKYTYMASDSGETQSHSDLPSIKMTATGADFENESYLRHTGYFSEEQTSSDFVEKQVTESSERECSESETEEDAELLQNASVILPIESHAPDPYSVPIYEKFKHVDYGDNEVAYSNYMPQLNESEEEDGSSELGVSQWHMKGKRNNRNATKRSVDMRDGNTWLKNYNGSLKGSLHNTNDGNPRKEGMHTSGEKFFEESIYQIKEEPSYDDSDETNVFEDTSHSEANLYYGKRCTSFLRTTRDLSRRYSYFNDYENDSSNVSPLNKDTEQMYHVDRNAYWDGPSFYQTKLTSRFGGMRPMLFNVNLKVQASYQGEHVPLVSLMSRLNGKAIVGHPIQIEIVEDGSTDHLILCGDSGMQESSAAPPAWPTGRRTAMQRVPRSNPSGALLDGDNEGGLVYSDYEMKPTKLYTSSNHQVKVNKKSSSNTRRSVAKSQKKSSKKTNLSSQKRRVLSSISTAKKHHGEGGRAKAHWRNDILGGLIRSEGVPLVTCVPTKVVFTRILEAVGRPPLSVVHRVRMTSPSVRDPP

SEQ ID NO: 184005 - protein, 473 aa, Zea Mays
MIAGGGYFDGSHDHILMEGSMIHDSSQSSIYDNTDVEQQNFRFAPFIIEDHSNPANLTSEAARVIDQIQHQLGIDIEQDHSDHMMQEVPPAETENLVPAVYGVQDHILSHQIEGPHNITVEQQVLGYDPASYRNGTYAAAHDLLNSLHIQRCSLIPEFPSTEHIFSDPAQNMVNRLDITNDLPGVANHESGMMFSDSTVPLGYHATQSHMLKDLYHSLPQNYGLFTSDDERDGMVGVPGVSGNIFQEIDGRQFDSPILGSRKQKGGFGKGKGKANFATERERREQFNVKYGALRSLFPNPTKNDRASIVGDAIEYINELNRTVKELKILLEKKRNSADRRKILKLDEEAADDGESSSMQPVSDDQNNQMNGTIRSSWVQRRSKECDVDVRIVDDEINIKFTEKKRANSLLCAAKVLEEFHLELIHVVGGIIGDHHIFMFNTKIPKGSSVYACAVAKKLLEAVEIKKQAYNIFN

SEQ ID NO: 184006 - protein, 72 aa, Zea Mays
MQPSRHGCSSWVTEILKQSDSEILTQHLTYIIYHFITRCFCVVFVALKKILLQLINQVINATTPGFDTLGLV

SEQ ID NO: 184007 - protein, 342 aa, Zea Mays
MSTRAAGSALLRHLGPRVFGPVFSPAVAPPRPLLALAGGGERGGALVWVRVRLLSTSAAEAKEEVAASKGNSGSTAAAKAEAVEAAKEGDGKRDKVVSSYWGVAPSKLMNKDGAEWRWSCFRPWEAYKPDTTIDLNRHHEPKVLLDKIAYWTVKLLRVPTDIFFQRRYGCRAMMLETVAAVPGMVGGMLLHLRSLRRFEHSGGWIRALLEEAENERMHLMTFMEVAKPKWYERALVLAVQGVFFNAYFLGYLISPKFAHRVVGYLEEEAIHSYTEYLKDLEAGKIENVPAPAIAIDYWQLPADATLKDVVVVVRSDEAHHRDVNHFASGMQLKETPAPIEYH

SEQ ID NO: 184008 - protein, 265 aa, Zea Mays
MPLFPRQAPPTTAPPQPRRPSSPSAAPLRSPRAAGWARRTPRRARGGRPRGRWCRSRRRSTRSWSSRRSYTSTWWRACPFRRISWFQSAAASTPSQPASTANPHSGTDRTWGGNWIRSPAGAGERTARSGGAPRRPPRTPSTASATCTAAATVQESLWKRSSRPSPNRPPPQPSPPLRPWQPPPPPPPTAAASRTTLSTRPSPAALVVEEELAGPAISPPRSPRRWGDRLSCTWTVLPATPTQLLVVELQRISVAIKTSSVVRAP

SEQ ID NO: 184009 - protein, 829 aa, Zea Mays
MGIPSAQATSAPSGRDLYVVQEMLGQGTFGQVAKCWDAETNSYVAVKVIKNQPAFYQQAIMEVSLLRLLNEKFDPDDEHHIVRMLDFFLYQNHLCIAFEMLGNNLYELLKRNSLRGLQMKYVRTFSRQILDALIIMKDAGIIHCDLKPENILIAPTVKTAVGVKVIDFGSVCMEGKTIYSYIQSRYYRSPEVLLGYPYTTAIDMWSFGCIVAELYIGLPLFPGASEYDVLCRMIEIIGGQPPDDLLREAKNTGKFFKHVGSIYPSSEARNGASSAYRILSEDEIEARDSKKPKVGRWYFPRGRLDRLIYTYPWKNLSEGNLPEKADCLALVDFLRGLVEFDPNKRWSPLQASYHPFITGEAFTGPYEPVQETPRIPVGRAAVVDHNPGGGHLLGAGLSPQVGSINRCLRFNNALQPNMPFSYGSSCGSFGSHGSFNDNAGFSYGSYDFNSVDIYNSPMDPSGFNLRSQLGGSFLGSSPHIRRRPHLSHGGGIRLSPGGPGHMSLGASPSQFTPPNSQMQIPTGPNGRYGASPSRGGHGSSLGKVAVVGQYNRRRNQGYPPMPMPPHEHTSQLIQGHQGDGVSTARFGAYAQGNSTYLHNALPNSSHYSWRSQRGSGSGLPLDPSSSRGSFPPTNYYGFPLHSDASADTLPSTSSVSDPADWDLNSSDKSLLQEDRTLSAGLSDLRLIDASGQTNRSSRLAPFQSHDILSSNPSTMNQRNGHLFHASSLGESTHTPGHVTLDGYEHTTYSQRSFPIYRGQPFQQYNNMTSSYIRPMRAHHNGQPVWSNYRLTEPPPTTMGDGMLWGGRGGHSFAASGLPPTLRKDFGRIF

SEQ ID NO: 184010 - protein, 390 aa, Zea Mays
MPFSYGSSCGSFGSHGSFNDNAGFSYGSYDFNSVDIYNSPMDPSGFNLRSQLGGSFLGSSPHIRRRPHLSHGGGIRLSPGGPGHMSLGASPSQFTPPNSQMQIPTGPNGRYGASPSRGGHGSSLGKVAVVGQYNRRRNQGYPPMPMPPHEHTSQLIQGHQGDGVSTARFGAYAQGNSTYLHNALPNSSHYSWRSQRGSGSGLPLDPSSSRGSFPPTNYYGFPLHSDASADTLPSTSSVSDPADWDLNSSDKSLLQEDRTLSAGLSDLRLIDASGQTNRSSRLAPFQSHDILSSNPSTMNQRNGHLFHASSLGESTHTPGHVTLDGYEHTTYSQRSFPIYRGQPFQQYNNMTSSYIRPMRAHHNGQPVWSNYRLTEPPPTTMGDGMLWVLC

SEQ ID NO: 184011 - protein, 470 aa, Zea Mays
MEEPGREGDSPGPPWAPSESSAFRAFVTAVGERAVASPSGSDNGDSVCSSNLRAVRKRPFVARLTTYIIQTFEKCNPEFKYSESLNPKRFLTNPAVPVHNHGLDNANSDLILYVNLELLNKKSSRRYVVQEMLGQGTFGQVAKCWDAETNSYVAVKVIKNQPAFYQQAIMEVSLLRLLNEKFDPDDEHHIVRMLDFFLYQNHLCIAFEMLGNNLYELLKRNSLRGLQMKYVRTFSRQILDALIIMKDAGIIHCDLKPENILIAPTVKTAVGVKVIDFGSVCMEGKTIYSYIQSRYYRSPEVLLGYPYTTAIDMWSFGCIVAELYIGLPLFPGASEYDVLCRMIEIIGGQPPDDLLREAKNTGKFFKHVGSIYPSSEARNGASSAYRILSEDEIEARDSKKPKVGRWYFPRGRLDRLIYTYPWKNLSEGNLPETEKADCLALVDFLRGLVEFDPNKRWSPLQGLVSSIHHW

SEQ ID NO: 184012 - protein, 246 aa, Zea Mays
MQIMTPKARSDVHVNLPALQKLDMMLIEVMDSMIDTEFWYEESGSRADGRGKITGPRKSKKWWLPSPRVPEQGLSQFQRKRLVFQAKLVHQILKAAKSINEQVLSHMPIPAAVMDALPKSGRASLGEDLYQAITTDYIPVEEIFVSLSLKTEHSVLETINRLEGAVFAWNQRILEERSKRSPGRHSWSFMKDSSSEVDKMSACIERVDALVQLLKSRYPNLPPTFIDVLKVQYNVVRKFDHWLRAF

SEQ ID NO: 184013 - protein, 125 aa, Zea Mays
MKLAKDFAATMEEFRKLQSLAIQRETAYKPVVPQNTQSNYSTDERSSESGNMPEQRALLAESMRQEVLQLDNEIVYNEAIIEEREQAIQDIQQQIGEVHEVFKDLATLVHSQGIIIEEIDMNIEK

SEQ ID NO: 184014 - protein, 69 aa, Zea Mays
MKLAKDFAATMEEFRKLQSLAIQRETAYKPVVPQNTQSNYSTDERSSESGNMPEQRALLAESMRSVLSY

SEQ ID NO: 184015 - protein, 167 aa, Zea Mays
MSFADLEAGALRAPLGRKARGGPNDARALVFQITTAVASYRRLLNSLGTPKDTITLRDNLHKTSQNILQLAKDAKDKLQKAAEADKSTDTSADKRIADMKLAKDFAATMEEFRKLQSLAIQRETAYKPVVPQNTQSNYSTDERSSESGNMPEQRALLAESMRSVLSY

SEQ ID NO: 184016 - protein, 268 aa, Zea Mays
MPHQKRFFLSHKFDRPGGFTTSLLRPLLLHTTPATGRRRRTPRLRRRRPPQLTPLSSPLLPLTMFSPLLRSRPADRSLKSSWPPRLTLQELLLQEQVRRASLGLSFAAGLPRQSRPCRWRSAARWRRRSTRSSTRRCCDRPWTRGTCCRPTSRQWTSCRRRPAPSCAAQSRAASPEGPTSGTGPTPSTSRVGRTTSSTATACCTRSSSRRRSRRRRTPSCARATCRRTSTSWSATQERRSCRTSSPDSTAWLGWRAAPSWRPEYSLGR

SEQ ID NO: 184017 - protein, 320 aa, Zea Mays
MPTITHYVLDPFLETGSPAQAEKATPKPPPSPPDKATPVPVAPIRAQTSPASLYATPESTTLPDSPSSFPGTWSPYIINHKRRGASLAKTVPQGDVGSEGSQPKLPVILPALPKGGEPTAVEEPEFAFQQSGNDQAEGDSGVDEAPINGKNEMLLKGKGPVTAKNEHEQPEFEFHRGNLEALVRPVNVGRPLIGGAPKNDESDTFLELQDSMSVASNTETDDAGTQEWWWKPSSPLGISVGTPCAEFYDAFEEISSDGGTRSSRAMDDDLREMRLSLLTEIERRKQAEETLEIWQKEWKKLSHHLSHVALSLPSPRFCSC

SEQ ID NO: 184018 - protein, 407 aa, Zea Mays
MPTITHYVLDPFLETGSPAQAEKATPKPPPSPPDKATPVPVAPIRAQTSPASLYATPESTTLPDSPSSFPGTWSPYIINHKRRGASLAKTVPQGDVGSEGSQPKLPVILPALPKGGEPTAVEEPEFAFQQSGNDQAEGDSGVDEAPINGKNEMLLKGKGPVTAKNEHEQPEFEFHRGNLEALVRPVNVGRPLIGGAPKNDESDTFLELQDSMSVASNTETDDAGTQEWWWKPSSPLGISVGTPCAEFYDAFEEISSDGGTRSSRAMDDDLREMRLSLLTEIERRKQAEETLEIWQKEWKKLSHHLSHVALSLPSPSIAEDTDDSSVDPGAELCQQITVSQLVAAAISQDFARAEVASEMEAVIATKNFEIARLSDRVQYYEAANREMSQRNQEAIGRAPASRPPLLQ

SEQ ID NO: 184019 - protein, 367 aa, Zea Mays
MSREAARTRSRVLVVGATGRLGGSIARASLAAGHPTFALVRPHHFARPDSPVLGPLVAAGATLLQGSLEDYSSLLEAVCQVDVVICAVSTKQVLEQKPLIRAIKEAGCVKRFIPAEFGADPTKVQICGMDYGFYEKKIEIRHSIESEGIPHTYICCNFFMRYLLPSLVQPGLDAPPRDEIKIFGEGNTKGVFVKENDVAKFTICTIEDPRTLNKTLYLRPPGNVFSMNELADLWESKLKKSLKRLYVTEEQLLKEIHDAPFPLKMDLIFIYSAFVKGDHTYFEIDLSMEGTQLYPHMAGMARVGDVVVGELWFSLLYDPIIHNSNKIIMPASTYESHSICQSYSIQFYSWNNNNEQSYAGYKTSNSG

SEQ ID NO: 184020 - protein, 117 aa, Zea Mays
MSREAARTRSRVLVVGATGRLGGSIARASLAAGHPTFALVRPHHFARPDSPVLGPLVAAGATLLQGSLEDYSSLLEAVCQVDVVICAVSTKQVLEQKPLIRAIKEAGCVKGVCFEKE

SEQ ID NO: 184021 - protein, 568 aa, Zea Mays
MANGNNEVMGISQRKSCPKVHSSMCSELTMMLDKVSSILPSIEAARPGCKAGIQELCNLYNVVEKGRLIIIHCIDCSKLYLAITGETIVARCERIRDSLRRSLFLIQNMVPPALANQIAEVHNDLRDVKFLLDPMEEEAGKAMLQMLRQSDASEELELETFLQAASKLELTSPKEVLIERRAIKKLLGKVSGNDAKKEGVLKFFMYLIKKYGKIIRQDSGEQNENLQSESQSLTLSTPSCDASAPGKCYTPTDFQIYEDHSNMSGAATPPPEFCCPISTKIMHDPVIITSGQTYEREYIERWFNEGYDTCPRTQMKLENFSMIPNTCMRDLICNWCKEHGFTVSDFIPPNENAYSYLPEQLHGYSMSSLHNVSVPLIAGKANSYVIDHSNTSVALSDASFVSNASHARDMEDSKDISQFSWNADYQKYLSFHNFNQEMFLKFFHELSMLPFELQDKSIKDLKNVLDYGSEISYDMMSNGFVEAFLEFLRNDTGSYSVQDQEAGFRFFLAFISNSRHGSRGCSQELGSQAACVEVVQVFPEETEHLLEASVAHAVLKPGLCLSELVVLF

SEQ ID NO: 184022 - protein, 65 aa, Zea Mays
MNARVQREGEVEKLLTHHRCSTVLTSHVGQLSILYPVKLWNFKFVVTCYPRRSARVVLHVHCFDE

SEQ ID NO: 184023 - protein, 246 aa, Zea Mays
MGRAFVYVILGGGVAAGYAALEFARRGGYSRGELCIISEEAVAPYERPALSKGYLLPEGAARLPGFHTCVGANDELLTPKWYKEQGIELVLGTKVISADVRRKTLLTGTGETISYKTLIIATGARALKLQEFGIQGSDASNICYLRNIDDADKLVSVMKSCPGGNAVVIGGGYIGMECAAALVTNKIRVTMVFPEKHCMGRLFTPKIAEFYENYYTSKGVTFVKGTVLTSFEKDTTGKVRFHNFRP

SEQ ID NO: 184024 - protein, 98 aa, Zea Mays
MLGIPGGSGGGECHALSALRYAAGLGENLQVQGLPFGARAEHDAMEMKPAATDRLLSLDWYSETSRAPESAISSLGALGLWSGMLGGAHQHHGSSAAI

SEQ ID NO: 184025 - protein, 50 aa, Zea Mays
MHMMLRLLKCFVRYYNFCPSLHHVVWKVAIYGCSKLNIVIPKLNDRLRTK

SEQ ID NO: 184026 - protein, 389 aa, Zea Mays
MDWSTRFRIRNPSPAASHFAGHRRSQADRVFLRTMASAAPVEEPTAAAEAKGRLTGDSFIRRHLRTLAPYQPILPFEVAAALGSLKFPYVYPDPESRQLRAALAEDSGLESDYILAGCGADELIDLIMRCVLEPGDKIVDCPPTFTMYEFDASVNGALVIKVPRLPDFSLDVDLIVEVVEQEMPKCIFLTSPNNPDGSVINDEDLLKILDLPILVVLDEAYIEFSSLQSRMAWVKKHDNLIVLRTFSKRAGLAGLRVGYGAFPLSIIEYLWRAKQPYNVSVAAEVSACAALQNPTYLENVKNLLVKERERLFNLLKGIPFLKPFPSHSNFILCEVTSGKDAKKIKEDLAKMGVMIRHYDKKELKGYIRISVGKPEHTDALMKGLNALRL

SEQ ID NO: 184027 - protein, 228 aa, Zea Mays
MDWSTRFRIRNPSPAASHFAGHRRSQADRVFLRTMASAAPVEEPTAAAEAKGRLTGDSFIRRHLRTLAPYQPILPFEVLSARLGRRPEDIIKLDANENPYGPPPEVAAALGSLKFPYVYPDPESRQLRAALAEDSGLESDYILAGCGADELIDLIMRCVLEPGDKIVDCPPTFTMYEFDASVNGALVIKVPRLPDFSLDVDLIVEVVEQEMPKCIFLTSPNNPDGSAG

SEQ ID NO: 184028 - protein, 222 aa, Zea Mays
MSSTLQSMVHLLSREMPKCIFLTSPNNPDGSVINDEDLLKILDLPILVVLDEAYIEFSSLQSRMAWVKKHDNLIVLRTFSKRAGLAGLRVGYGAFPLSIIEYLWRAKQPYNVSVAAEVSACAALQNPTYLENVKNLLVKERERLFNLLKGIPFLKPFPSHSNFILCEVTSGKDAKKIKEDLAKMGVMIRHYDKKELKGYIRISVGKPEHTDALMKGLNALRL

SEQ ID NO: 184029 - protein, 222 aa, Zea Mays
MVAERLENVEEQTEDLAPEFALPPKANTLVSELLDNLQRRGGSFVRTPSLLHQHAPSISIREQEVSSGVPPTKASQALMDEPFENDNGQTEELPSELPCSIKRPKFSVAELLEDLQGRSGSYVETASLDATQNHLSLVNKDENQQTMADLFQEVFNPTNMDGAMKSMRSTGAGNYGRMQQIMHMEKDWHVEFSRQYSREHNYVKVIGRKANSLQLHVPGKGQ

SEQ ID NO: 184030 - protein, 270 aa, Zea Mays
MVAERLENVEEQTEDLAPEFALPPKANTLVSELLDNLQRRGGSFVRTPSLLHQHAPSISIREQEVSSGVPPTKASQALMDEPFENDNGQTEELPSELPCSIKRPKFSVAELLEDLQGRSGSYVETASLSHQHTRAKHWKPKFLSSEKKTIAILGDRSIDSEDPLEHVIDGTSSEEEDATQNHLSLVNKDENQQTMADLFQEVFNPTNMDGAMKSMRSTGAGNYGRMQQIMHMEKDWHVEFSRQYSREHNYVKVIGRKANSLQLHVPGKGQ

SEQ ID NO: 184031 - protein, 430 aa, Zea Mays
MEQAEVCYLISSISPLRENVVSKGGLCFVKLYQVDNLMRVLCFHTAGGKSVKKPRFSLRGYDFVPLDVKTDNLCIGEQDGSSAVPSTKASQTMVAERLENVEEQTEDLAPEFALPPKANTLVSELLDNLQRRGGSFVRTPSLLHQHAPSISIREQEVSSGVPPTKASQALMDEPFENDNGQTEELPSELPCSIKRPKFSVAELLEDLQGRSGSYVETASLSHQHTRAKHWKPKFLSSEKKTIAILGDRSIDSEDPLEHVIDGTSSEEEDATQNHLSLVNKDENQQTMADLFQEVFNPTNMDGAMKSMRSTGAGNYGRMQQIMHMEKDWHVEFSRQYSREHNYVKVIGRKANSLQLHVPGKGQDATISNASADGTMDESRTRRTIIFSPKICNNVDLLVGNIIHIFPPWKEVKIQEEHVIICTYFSHHHRT

SEQ ID NO: 184032 - protein, 307 aa, Zea Mays
MENHGKLDGWDEVLEEEDELASVCKYPISTSYLSYGTSRRGKSVKKPRFSLRGYDFVPLDVKTDNLCIGEQDGSSAVPSTKASQTMVAERLENVEEQTEDLAPEFALPPKANTLVSELLDNLQRRGGSFVRTPSLLHQHAPSISIREQEVSSGVPPTKASQALMDEPFENDNGQTEELPSELPCSIKRPKFSVAELLEDLQGRSGSYVETASLDATQNHLSLVNKDENQQTMADLFQEVFNPTNMDGAMKSMRSTGAGNYGRMQQIMHMEKDWHVEFSRQYSREHNYVKVIGRKANSLQLHVPGKGQ

SEQ ID NO: 184033 - protein, 190 aa, Zea Mays
MEQAEVCYLISSISPLRENVVSKGGLCFVKLYQVDNLMRVLCFHTAGGKSVKKPRFSLRGYDFVPLDVKTDNLCIGEQDGSSAVPSTKASQTMVAERLENVEEQTEDLAPEFALPPKANTLVSELLDNLQRRGGSFVRTPSLVCVVLHYFFILEFLHNTYITSEYFNLVAPTCSKHINQGAGSFIRSATN

SEQ ID NO: 184034 - protein, 355 aa, Zea Mays
MENHGKLDGWDEVLEEEDELASVCKYPISTSYLSYGTSRRGKSVKKPRFSLRGYDFVPLDVKTDNLCIGEQDGSSAVPSTKASQTMVAERLENVEEQTEDLAPEFALPPKANTLVSELLDNLQRRGGSFVRTPSLLHQHAPSISIREQEVSSGVPPTKASQALMDEPFENDNGQTEELPSELPCSIKRPKFSVAELLEDLQGRSGSYVETASLSHQHTRAKHWKPKFLSSEKKTIAILGDRSIDSEDPLEHVIDGTSSEEEDATQNHLSLVNKDENQQTMADLFQEVFNPTNMDGAMKSMRSTGAGNYGRMQQIMHMEKDWHVEFSRQYSREHNYVKVIGRKANSLQLHVPGKGQ

SEQ ID NO: 184035 - protein, 156 aa, Zea Mays
MADLFQEVFNPTNMDGAMKSMRSTGAGNYGRMQQIMHMEKDWHVEFSRQYSREHSYSGDLKGTTVQIMSRSLEGKLTVCSCMFQEKGNDATISNASADGTMDESRTRRTIIFSPKICNNVDLLVGNIIHIFPPWKEVKIQEEHVIICTYFSHHHRT

SEQ ID NO: 184036 - protein, 76 aa, Zea Mays
MQAASGTKGGSSGSPVVDCQGRAVALNAGSKSSSASAFFLPLERVVRALDLIRDSWDAFGTKTESVYIPRGTLQAT

SEQ ID NO: 184037 - protein, 341 aa, Zea Mays
MAAQGGWDQAGLIAALNQMSLQGSSPWVLDTGATTHMSSSAGILLSHLPPPSFGITVGNGTTIPITCRGTSTLSSPTSTYRLNNVLVAPALVRNLLSVRQFTRDNSCSIEFDAYGFSVKDKQTGHVTLRCNSGGDLYTYPSTTTPSCSLATTSSLWHHRLGHPGPSSLAQLRSMSVITFNKSSPCLCHACQLGKHVRLPFSHSTSVTHAPFDLLHCDVWTSPVLSNSGFKYYLIILDDYSHYCWSFPLRHKSEVHRHMIEFIAYTQTQFSTTPKSFQADNGTEFVNRATTSFLASHGITLRLSCPYTSPQNGKAERMLRTLVLKASPRRPGARKIQGVPVA

SEQ ID NO: 184038 - protein, 133 aa, Zea Mays
MPFVRLLEVELYPTLLSKARSYGLSDNWVQALAKKDPVRRQVLRVKGCLAGSKAENLLEQGDMILAINKEPITCFLDIEKTCQELDQSIGSDGVLNMTIFRQDPHSAVRALGFLPEEGHGVYVARWCHGQSGT

SEQ ID NO: 184039 - protein, 270 aa, Zea Mays
MDIAIYSAKQYFARLYARYAGDNLSDMYLLVLTFMFLAHNHMPYQLSLSFQVHVPPVCMLDGVHSQHFFGTGVIIYHSEHLGLVAVDRNTVAVSISDIMLSFAAYPIEIPGEVVFLHPVHNFVLVAYDPSALGAGASVVRAAKLLSEPALRRGDSVYLVGLSRSLQATSRKSIITNPCTAVNIGSADCPRYRAINMEVIELDTDFGSTFSGILTDEQGRVQALWASFSTQLKYGCSSSEDHQFVRGQCHLSDFWRWNFIQLCYPRQEVTD

SEQ ID NO: 184040 - protein, 50 aa, Zea Mays
MAEENNKSIAISQGVIFSCFAATFSCFQRSIEERETGKRLGTATRRNGLW

SEQ ID NO: 184041 - protein, 471 aa, Zea Mays
MDVRRLGGRIAAALRALGAGGSLSLPIPAWITNALAMISLVLSSCDLLRLCSDRDRRLRFSLGGREFVTVVCQLASIVYLFSLCGTGIPSADPETPARRDQGAGSPDQTRAADAPETLHGGDEEIVAAVVSGALPSHHLESRLGDCRRAASLRREALRRMTGRGVDGLPLDGMDYQAILGQCCEMPIGYVQLPVGVAGPLLLDGKQYHVPMATTEGCLVASVNRGCRAIAASGGAVSVLLRDAMSRAPVVKLPSIKRAAELKAFVETITNFEILSAVFNRSSRFGKLQGIQCALAGRNLYMRFTCSTGDAMGMNMVSKGVEDVLGYLQNDFPDMDLISLSGNYCSDKKAAAVNWIEGRGKSVVCEATVKGGVVQSVLKTSVQKLIELNIVKNLAGSAVAGALGGFNAHASNIVTALFIATGQDPAQNVESSQCITMMEAVNDGSDLHVSVTMPSIEALLGAALVLLHRLHV

SEQ ID NO: 184042 - protein, 373 aa, Zea Mays
MDVRRLGGRIAAALRALGAGGSLSLPIPAWITNALAMISLVLSSCDLLRLCSDRDRRLRFSLGGREFVTVVCQLASIVYLFSLCGTGIPSADPETPARRDQGAGSPDQTRAADAPETLHGGDEEIVAAVVSGALPSHHLESRLGDCRRAASLRREALRRMTGRGVDGLPLDGMDYQAILGQCCEMPIGYVQLPVGVAGPLLLDGKQYHVPMATTEGCLVASVNRGCRAIAASGGAVSVLLRDAMSRAPVVKLPSIKRAAELKAFVETITNFEILSAVFNRSSRFGKLQGIQCALAGRNLYMRFTCSTGDAMGMNMVSKGVEDVLGYLQNDFPDMDLISLSGLVLPFCYSKEKLVLHSFNKTVQEKNIRQLNTM

SEQ ID NO: 184043 - protein, 551 aa, Zea Mays
MDVRRLGGRIAAALRALGAGGSLSLPIPAWITNALAMISLVLSSCDLLRLCSDRDRRLRFSLGGREFVTVVCQLASIVYLFSLCGTGIPSADPETPARRDQGAGSPDQTRAADAPETLHGGDEEIVAAVVSGALPSHHLESRLGDCRRAASLRREALRRMTGRGVDGLPLDGMDYQAILGQCCEMPIGYVQLPVGVAGPLLLDGKQYHVPMATTEGCLVASVNRGCRAIAASGGAVSVLLRDAMSRAPVVKLPSIKRAAELKAFVETITNFEILSAVFNRSSRFGKLQGIQCALAGRNLYMRFTCSTGDAMGMNMVSKGVEDVLGYLQNDFPDMDLISLSGNYCSDKKAAAVNWIEGRGKSVVCEATVKGGVVQSVLKTSVQKLIELNIVKNLAGSAVAGALGGFNAHASNIVTALFIATGQDPAQNVESSQCITMMEAVNDGSDLHVSVTMPSIEVGTVGGGTCLASQAACLNLLGVRGPNRDSPGANAKLLATIVAGSVLAGELSLLSALAAGQLVKSHMKYNRSSKDVPVAQARSSLNNRDGQRPDCR

SEQ ID NO: 184044 - protein, 198 aa, Zea Mays
MSDPRGRAAGPDRYGDEPHDLPLAEDANGEEAWQTPEKEAVAVSEGAAARSGDTTPDAEQESDDGEEGVGSPDQAEPNASGEGVPPVAATVEPDGIVSGAKVETNSEDAISHDADEEEKDDDDDSTQDASPIAEVNVEGESGAVHRLEVEPDPFLDGDASGTEEEQAAFMVELERFHKEHSLEFKPPKFYGKGLNCLK

SEQ ID NO: 184045 - protein, 71 aa, Zea Mays
MSQRSRDTNFSGDISIIRKKKSKFLAFSKVPYLLGVNLTQGTLCTCIANSSVIQVMAIGILGHLIMEKCTV

SEQ ID NO: 184046 - protein, 174 aa, Zea Mays
MKLGSWNHCYRIRSVRTCEPNTNSRSASLEKVPEGEVPQSEGLPEPPGSVPRVNPSRQEPGVHGFASMQCDRYRQDQPDHEHRAENKHVDVEHPFQRADWREAGGRKHGQHPDRYGQPSKYGRAIQLHSLPLLPVRDRCGQAFVGPHNGHVAELLSSFQERKVVCDTNLQATSD

SEQ ID NO: 184047 - protein, 340 aa, Zea Mays
MTSQQRIEITKPELLGSNEEANVDAFRVDGAFDVNSKNDISIHDYLPAMKAICDKLEEASGKVDCSHIFPIKAMLALVVSDIKVDLDYRMAYGHRAWRNVLHRLIDARLVEIFDAEDDDKVVRCLRLLKNFDPNEFQPKSIASNFKFVKKGQATDQILELPLENCIYDMISSQGTKGITLVEIGKHLGLNNSKKLHKRVSSMLKKFNLTWEAEVPDKTSQYRIWTSKNFSLYKAGTALQNFEALSEDCDDCSDLWSLVSSKDLESPSSQGKLLLLEEENHDKPIGHHIQNNRDASAAVSQLVEEDKLASNQRRRRCRPLSSDDQRHRRILHMLKVASQVL

SEQ ID NO: 184048 - protein, 227 aa, Zea Mays
MTSQQRIEITKPELLGSNEEANVDAFRVDGAFDVNSKNDISIHDYLPAMKAICDKLEEASGKALVVSDIKVDLDYRMAYGHRAWRNVLHRLIDARLVEIFDAEDDDKVVRCLRLLKNFDPNEFQPKSIASNFKFVKKGQATDQILELPLENCIYDMISSQGTKGITLVEIGKHLGLNNSKKLHKRVSSMLKKFNLTWEAEVPDKTSQYRIWTSKNFSLYKAGQITLA

SEQ ID NO: 184049 - protein, 269 aa, Zea Mays
MTSQQRIEITKPELLGSNEEANVDAFRVDGAFDVNSKNDISIHDYLPAMKAICDKLEEASGKALVVSDIKVDLDYRMAYGHRAWRNVVIRELIPFLILSKVLHRLIDARLVEIFDAEDDDKVVRCLRLLKNFDPNEFQPKSIASNFKFVKKGQATDQILELPLENCIYDMISSQGTKGITLVEIGKHLGLNNSKKLHKRVSSMLKKFNLTWEAEVPDKTSQYRIWTSKNFSLYKAVHRANYSCLKKRTMTNQLDIISRTTVMLLLQFPS

SEQ ID NO: 184050 - protein, 255 aa, Zea Mays
MTSQQRIEITKPELLGSNEEANVDAFRVDGAFDVNSKNDISIHDYLPAMKAICDKLEEASGKALVVSDIKVDLDYRMAYGHRAWRNVLHRLIDARLVEIFDAEDDDKVVRCLRLLKNFDPNEFQPKSIASNFKFVKKGQATDQILELPLENCIYDMISSQGTKGITLVEIGKHLGLNNSKKLHKRVSSMLKKFNLTWEAEVPDKTSQYRIWTSKNFSLYKAVHRANYSCLKKRTMTNQLDIISRTTVMLLLQFPS

SEQ ID NO: 184051 - protein, 245 aa, Zea Mays
MIDQVLHRLIDARLVEIFDAEDDDKVVRCLRLLKNFDPNEFQPKSIASNFKFVKKGQATDQILELPLENCIYDMISSQGTKGITLVEIGKHLGLNNSKKLHKRVSSMLKKFNLTWEAEVPDKTSQYRIWTSKNFSLYKAGTALQNFEALSEDCDDCSDLWSLVSSKDLESPSSQGKLLLLEEENHDKPIGHHIQNNRDASAAVSQLVEEDKLASNQRRRRCRPLSSDDQRHRRILHMLKVASQVL

SEQ ID NO: 184052 - protein, 367 aa, Zea Mays
MGAGGRMTEKEREKQEQLARATGGAAMQRSPVEKPPFTLGQIKKAIPPHCFERSVLKSFSYVVHDLGCVCTGVWVIAHECGHHAFSDYSLLDDVVGLVLHSSLMVPYFSWKYSHRRHHSNTGSLERDEVFVPKKKEALPWYTPYVYNNPGRPGGAHRGAAHPRVAAVPGDQRVGAAVPALRLPLRPLRPHLQRPGARPDLRLGRRRRGRGVRAVQAGGGVRGLVGGARVRRAAADRERVAGAHHLPAAHPPVAPPLRLERVGLAARRAGHHGPRLRHPQPRVPQHHGHARRAPPLLHHAALPRHGGHQGDQAHPRGLLPLRPDPCCQGDLARGQGVHLRRARGPQGRLLVQQEVLAAAARRAERTLP

SEQ ID NO: 184053 - protein, 53 aa, Zea Mays
MKDNFIPIKCPNPRTGTRSVPVAPYTCNCNATVVFLNEYTVSHTLFQDVAEDL

SEQ ID NO: 184054 - protein, 1385 aa, Zea Mays
MAGKSKGGKNKGKAQVVGHSASAEPEVLATDGAELVNPDNGEVSEPGEVSDPPATEDGVADVEKGDGDAPEVVQSAKKPAEGELHLYPVPVRTQSGEKLELQLSPGDSVIDVKQFLLDAPETCFYTCYDLILHTEDGSAHQLEDYNEISEIADITSGGCSLEMVAAIYDERSIRSHLRRVRELLSLSTLHVSLSTSLTLQQESAQGKSADSGKSPIQELDGLNFMEDSAGALTNLLASTPAEIKCVESMVFSSFNPPPTYRRLHGDLIYIDVATLEGNKYCITGSSKSFYVNSSNKNIFDSKPTKQGLEASTLVGLLQKISAKFKKGFREVLDRRASAHPFENVQSLLPVTSWLGAYPVPEHRRDAARAEDSVVLSYGTELIGMQRDWNEELQSCREFPHGNPQERILRGRALYKVTCDFVDAAVKGAVGVINRCIPPINPTDPECFHMYVHNNIFFSFAVDSDYEDISKDHKPDCQNGSSRSTKVSSPDVITKPDANHGKSAEVVDSKSEEAQLADSEQATYASANNDLKGTKAYQEADVSGLHNLAMAIVDYRGHRVVAQSIIPGILQGDKSDSLLYGSVDNGKKISWNETFHSKVVEAAKQLHLKEHVVLDGSGNPIKLAATVECKGIVGSDDRHYILDLMRVTPRDSNYIGQEHRFCVLRPELIASFVEVESIKQSLKQKVPDAPVASTSDAKATSVEGDDKSEESSVHTHEENDNSSSEILFNPNVFTEYKLAGSAEEIAADEELVKRAGTYLVDIVIPKFVQDLCSLDISPMDGQTLTDALHLHGINIRYLGKIAGMVKHLPHLWDLFSTEIIVRSAKHVIKDILRQSLDHDIAPAIAHFLNCFVGKVLGASTKSSLSNAQSKTLKGHENSQTQKSTKGPKLSHAAVSRKSLSTYSHLTSDGIWFSIKEFAKSKYQFEVPDEARLSAKRVAVLRNLCRKVGITIAARKYDMDASSPFEASDMLNLQPVVKHSVPTCTDAKNLMEAGKVRMAEGTLNEAYALFSEAFSLLQQITGPMHKDAANCCRYLAMVLYHAGDTAGAIVQQHRELIINERCLGLDHPDTAHSYGNMALFYHGLNQTELALRHMSRTLLLLSLASGPDHPDVAATLINVAMMYQDASNMNTALRYLQEALMKNERLLGPDHVQTAVCYHALAIAFSCMSLYKLSIQHEKKTYDILVKQLGENDSRTKDSENWLNTFKLREEQVNAQKQKDQGANASDNAVKFLKANPAFLQAMKAAALQSGDRSANVNRSLNAAVVGEGVPRLRGVDERAARATAEARKKAVARGLNVRNGPAANHASDELAQILKLINTASGSSTSASAKTEESASEGQATNGSVQNGAATDAKSADINVPPAPANQPVGLGATLELKKQKSKQKS

SEQ ID NO: 184055 - protein, 406 aa, Zea Mays
MRKFGKEALSQCYLDILVHVLRQRTPVHHLRPQQDGLKQKQRRLPTQSGGNMVPAFQASLRRAQFTLLPEIPPLAMPRRWGPNSHSASLPFLGKPIPRFGAHHKADLRKREEDERDRTKLRAAPTDQTLGVRRASPRRRRKGASRRLGVPEVVDGAARSASSSMSRRVPCKFFLHGACFKGDYCEFSHDCNDQPDNVCTFYQKGTCTFGSRCRNEHVEVHCNCPQPATTVARASSNSSQLVASSRDPHCSECQTDLCDQTQQICKSTAALSAHQPAWVVDYHDHDTPDDTTSWPLHQAVQNQTSQYPVHLPICSSTADGTCPYGKGCSQMHGDLCAFCERQCMNPYQSDERGVHVKLCKKNNRVLEAMRRSEDIECGIGVAPLLRLAWMSTLHSGLVQFAANCHTM

SEQ ID NO: 184056 - protein, 522 aa, Zea Mays
MRKFGKEALSQCYLDILVHVLRQRTPVHHLRPQQDGLKQKQRRLPTQSGGNMVPAFQASLRRAQFTLLPEIPPLAMPRRWGPNSHSASLPFLGKPIPRFGAHHKADLRKREEDERDRTKLRAAPTDQTLGVRRASPRRRRKGASRRLGVPEVVDGAARSASSSMSRRVPCKFFLHGACFKGDYCEFSHDCNDQPDNKGTCTFGSRCRNEHVEVHCNCPQPATTVARASSNSSQLVASSRDPHCSECQTDLCDQTQQICKSTAALSAHQPAWVVDYHDHDTPDDTTSWPLHQAVQNQTSQYPVHLPICSSTADGTCPYGKGCSQMHGDLCAFCERQCMNPYQSDERGVHVKLCKKNNRVLEAMRRSEDIECGVCLDRVLSKPTAAERRFGLLSDCDHSFCISCIRNWRSTSPTSGMDVNSTLRACPICRKLSYYVVPSITWYSSKEEKQEIVEGYKAKLRSIDCKHFDFGKGTCPFGSSCFYKHAYDDGRLEDALLNHHDADDASAAIAKLMRLSYLLTRLHV

SEQ ID NO: 184057 - protein, 275 aa, Zea Mays
MAATLASVCSVPLTSVLLLFELTKDYRILLPLMGAVGLAIWVPSVVNQPNDSEPSGFRTSRRGYSSMSPEERNGSLRQGDVVDDLELSIIQTDMSNYGTYNAEMLLDDLKVFQAMSKIYLKVLPSATVTEVLNLLHDRQQNCALVVDPEDFLEGIITLGDIRRMGYGLHVESFINGDHPKADDNSSSISLCLTRGFQYRGSERGLLTCFPDTDLTTAKSLMEARGIKQLPVVKRGVAHRTAGKRRPIALLHYDSIGCCVREEIENWKTIYQRLAC

SEQ ID NO: 184058 - protein, 625 aa, Zea Mays
MSSCDDDHASLLRSHAGASSPSCPSPRGSAGHQHHADVEADEATVTASPRLASGGGGVRGLLRNLERRMSARGSGPGRRQHQHYQQLDRSVAIESPPSQRQRERAAAGDDDELGDGAPPEWALLLIGCLLGLATGICVAAFNRGVHVIHEWAWAGTPNEGAAWLRLQKIADTWHRILLIPVTGGVVVGMMHGLLDIFEQLKLVKSGQRQGINFVGAIFPTIKAVQAAVTLGTGCSLGPEGPSVDIGKSCANACSEMMESNRERRIALVAAGAAAGIASGFNAAVAGCFFAIETVLRPLKAENSPPFTTAMIILASVISSTVSNVLLGARPAFIVPAYELKSAAELPLYLILGMLCGAVSVVFDRLVGWFSRFFGHIKEKFDFPIIVYPALGGLGAGIIALKYPGILYWGFTNVEEILHTGKSASAPGIWLLTQLAAAKVVATALCKGSGLVGGLYAPSLMIGAAVGAVFGGSAAYLINSALPGNAAVAQPQAYALVGMAATLASVCSVPLTSVLLLFELTKDYRILLPLMGAVGLAIWVPSVVNQPNDSEPSGFRTSRRGYSSMSPEERNGSLRQGDVVDDLELSIIQTDMSNYGTYNAEMLLDDLKGGNRELEDHISETGLLII

SEQ ID NO: 184059 - protein, 626 aa, Zea Mays
MSSCDDDHASLLRSHAGASSPSCPSPRGSAGHQHHADVEADEATVTASPRLASGGGGVRGLLRNLERRMSARGSGPGRRQHQHYQQLDRSVAIESPPSQRQRERAAAGDDDELGDGAPPEWALLLIGCLLGLATGICVAAFNRGVHVIHEWAWAGTPNEGAAWLRLQKIADTWHRILLIPVTGGVVVGMMHGLLDIFEQLKLVKSGQRQGINFVGAIFPTIKAVQAAVTLGTGCSLGPEGPSVDIGKSCANACSEMMESNRERRIALVAAGAAAGIASGFNAAVAGCFFAIETVLRPLKAENSPPFTTAMIILASVISSTVSNVLLGARPAFIVPAYELKSAAELPLYLILGMLCGAVSVVFDRLVGWFSRFFGHIKEKFDFPIIVYPALGGLGAGIIALKYPGILYWGFTNVEEILHTGKSASAPGIWLLTQLAAAKVVATALCKGSGLVGGLYAPSLMIGAAVGAVFGGSAAYLINSALPGNAAVAQPQAYALVGMAATLASVCSVPLTSVLLLFELTKDYRILLPLMGAVGLAIWVPSVVNQPNDSEPSGFRTSRRGYSSMSPEERNGSLRQGDVVDDLELSIIQTDMSNYGTYNAEMLLDDLKVCRPLFSQILLISGSCYHV

SEQ ID NO: 184060 - protein, 481 aa, Zea Mays
MHAVDTFSGIRGSMSNYYDDYDDIDGMEDDYDMDDPIDDMVDEQQGIRDSDVEDNDYGQPSDVLTQLQNVLLKIATTQIMDLNDKIPDTSSADARKGRDIQGIPWEQINITRKKYRQSRLEQYKNYENVPNSGEEAMKDCKPTEKGGIYYEFRRNTRSVKSTILHFQLRNLVWATSKHDIYLVSHYSIRHWSALSGVDTELINVQGHVAPREKHAGSLLEGFYQTQVSTLTVKDNLLVAGGFQGELICKHLDQEGISFCCRTTYDDNAITNAVEIFNTSSGAVHFMASNNDSGVRYYDMERFQLFKHFQFEWPVNHASLSPDRKVVVIVGDDPDGLLIDANSGKTVHSIKGHRDYSFASAWSPDGRTFATGNQDKTCRIWDVRNLSKSVHVLRGNLGAIRSIRFTSDGQFMSMAEPADFVHIYDVKSDYNKRQELDFFGEISGTSFSPDTDTLFVGVWDRMYGSLLQFGRLYNYSYLDSLF

SEQ ID NO: 184061 - protein, 196 aa, Zea Mays
MASNNDSGVRYYDMERFQLFKHFQFEWPVNHASLSPDRKVVVIVGDDPDGLLIDANSGKTVHSIKGHRDYSFASAWSPDGRTFATGNQDKTCRIWDVRNLSKSVHVLRGNLGAIRSIRFTSDGQFMSMAEPADFVHIYDVKSDYNKRQELDFFGEISGTSFSPDTDTLFVGVWDRMYGSLLQFGRLYNYSYLDSLF

SEQ ID NO: 184062 - protein, 371 aa, Zea Mays
MQKIDGDYYPETLHQMFIVNAGPGFKLIWSTVKGLLDPKTSSKIHVLGTKYQSRLLEAIDASQLPEYFGGSCTCSNHGGCLRSNKGPWSDPSIMKLVHSMESLKEIGQVSDIEETVTGSMRLRALKLPERISDTSNAESGSDVDDLGSPVAPEDVEYPSLAPVREEARESGSTTYSGSIGMSRMADKVVGSNGRYNSTGNETRQVNAEQGSLINGGLLAPGQRAPNDAVGNDDGFLKYISRRVVAIFLEVLSFLRFFIRRRQHSENVHSHTATAPSSLANLQTIKEDRVNPCLERLDRLESMFNQLSKKPPELPEDKDRAIQDSFDRIKSIEFDLQKTKKVLHATVIKQMQMAETLEAVTEPDLRRRKFCT

SEQ ID NO: 184063 - protein, 192 aa, Zea Mays
MSRMADKVVGSNGRYNSTGNETRQVNAEQGSLINGGLLAPAGQRAPNDAVGNDDGFLKYISRRVVAIFLEVLSFLRFFIRRRQHSENVHSHTATAPSSLANLQTIKEDRVNPCLERLDRLESMFNQLSKKPPELPEDKDRAIQDSFDRIKSIEFDLQKTKKVLHATVIKQMQMAETLEAVTEPDLRRRKFCT

SEQ ID NO: 184064 - protein, 423 aa, Zea Mays
MSEGNVDSIQISVSNDERRNRADAEISEDEPRHTRMRSLKKKALHASTRLTHSLKKRGKRKVDCRVPRIAIEDVRDAEEEQAVNSFREVLFARGLLPVKHDNYHTMLRFLKARKFDFEKAAQMWADMLQWRKEFGTDTIFEDFEFHELEEVLQYYPHGYHGVDKEGRPVYIELLGKVEPNKLIQITTVERYIKYHVQEFERAFREKFPACSISAKRHIDTTTTILDVHGVGWKNFSKIARDLVRCMQKIDGDYYPETLHQMFIVNAGPGFKLIWSTVKGLLDPKTSSKIHVLGTKYQSRLLEAIDASQLPEYFGGSCTCSNHGGCLRSNKGPWSDPSIMKLVHSMESLKEIGQVSDIEETVTGSMRLRALKVQMLMILDPLWLLKMLNILVWPQFERKYSLTKFCYVFLEIFYYFCRMSILEL

SEQ ID NO: 184065 - protein, 316 aa, Zea Mays
MSEGNVDSIQISVSNDERRNRADAEISEDEPRHTRMRSLKKKALHASTRLTHSLKKRGKRKVDCRVPRIAIEDVRDAEEEQAVNSFREVLFARGLLPVKHDNYHTMLRFLKARKFDFEKAAQMWADMLQWRKEFGTDTIFEDFEFHELEEVLQYYPHGYHGVDKEGRPVYIELLGKVEPNKLIQITTVERYIKYHVQEFERAFREKFPACSISAKRHIDTTTTILDVHGVGWKNFSKIARDLVRCMQKIDGDYYPETLHQMFIVNAGPGFKLIWSTVKGLLDPKTSSKIHVLGTKYQSRLLEAIDARVLWWFVHMF

SEQ ID NO: 184066 - protein, 293 aa, Zea Mays
MWADMLQWRKEFGTDTIFEDFEFHELEEVLQYYPHGYHGVDKEGRPVYIELLGKVEPNKLIQITTVERYIKYHVQEFERAFREKFPACSISAKRHIDTTTTILDVHGVGWKNFSKIARDLVRCMQKIDGDYYPETLHQMFIVNAGPGFKLIWSTVKGLLDPKTSSKIHVLGTKYQSRLLEAIDASQLPEYFGGSCTCSNHGGCLRSNKGPWSDPSIMKLVHSMESLKEIGQVSDIEETVTGSMRLRALKLPERISDTSNAESGSDVDDLGSPVAPEDVEYPSLAPVREEVQSY

SEQ ID NO: 184067 - protein, 521 aa, Zea Mays
MIITTRCLVLCCRFLKARKFDFEKAAQMWADMLQWRKEFGTDTIFEDFEFHELEEVLQYYPHGYHGVDKEGRPVYIELLGKVEPNKLIQITTVERYIKYHVQEFERAFREKFPACSISAKRHIDTTTTILDVHGVGWKNFSKIARDLVRCMQKIDGDYYPETLHQMFIVNAGPGFKLIWSTVKGLLDPKTSSKIHVLGTKYQSRLLEAIDASQLPEYFGGSCTCSNHGGCLRSNKGPWSDPSIMKLVHSMESLKEIGQVSDIEETVTGSMRLRALKLPERISDTSNAESGSDVDDLGSPVAPEDVEYPSLAPVREEARESGSTTYSGSIGMSRMADKVVGSNGRYNSTGNETRQVNAEQGSLINGGLLAPGQRAPNDAVGNDDGFLKYISRRVVAIFLEVLSFLRFFIRRRQHSENVHSHTATAPSSLANLQTIKEDRVNPCLERLDRLESMFNQLSKKPPELPEDKDRAIQDSFDRIKSIEFDLQKTKKVLHATVIKQMQMAETLEAVTEPDLRRRKFCT

SEQ ID NO: 184068 - protein, 191 aa, Zea Mays
MSRMADKVVGSNGRYNSTGNETRQVNAEQGSLINGGLLAPGQRAPNDAVGNDDGFLKYISRRVVAIFLEVLSFLRFFIRRRQHSENVHSHTATAPSSLANLQTIKEDRVNPCLERLDRLESMFNQLSKKPPELPEDKDRAIQDSFDRIKSIEFDLQKTKKVLHATVIKQMQMAETLEAVTEPDLRRRKFCT

SEQ ID NO: 184069 - protein, 420 aa, Zea Mays
MSEGNVDSIQISVSNDERRNRADAEISEDEPRHTRMRSLKKKALHASTRLTHSLKKRGKRKVDCRVPRIAIEDVRDAEEEQAVNSFREVLFARGLLPVKHDNYHTMLRFLKARKFDFEKAAQMWADMLQWRKEFGTDTIFEDFEFHELEEVLQYYPHGYHGVDKEGRPVYIELLGKVEPNKLIQITTVERYIKYHVQEFERAFREKFPACSISAKRHIDTTTTILDVHGVGWKNFSKIARDLVRCMQKIDGDYYPETLHQMFIVNAGPGFKLIWSTVKGLLDPKTSSKIHVLGTKYQSRLLEAIDASQLPEYFGGSCTCSNHGGCLRSNKGPWSDPSIMKLVHSMESLKEIGQVSDIEETVTGSMRLRALKVQMLMILDPLWLLKMLNILVWPQFERKRGNQDLQHIVVQLACLVWQIKL

SEQ ID NO: 184070 - protein, 300 aa, Zea Mays
MSTANRYQHIKSTKPVVGKARKLKDLMIKSDNRICADCGAPDPKWASANIGVFLCLKCGDVHRALGPDISKVLSVTLDDWSDSDIDSMVEVGGNSYANSIYEAFLPKDHPKPKPDSTMEYRTKFIRAKYETQDFLKPSLRISSRSSFKSTTSVKSVDSNFSSTSRKDVFEDTREFVGELNITLVKGTNLAVRDMLTSDPYVVLTLGGQEVYDHDMFSADDIMGEAEIDLQPMITAAMAFGDTSRLGDMQIGRWFMTKDNALMKDSTVNVVAGKVKQEVHLKLQNVESGELELELEWVPIL

SEQ ID NO: 184071 - protein, 217 aa, Zea Mays
MSTANRYQHIKSTKPVVGKARKLKDLMIKSDNRICADCGAPDPKWASANIGVFLCLKCGDVHRALGPDISKVLSVTLDDWSDSDIDSMVEVGGNSYANSIYEAFLPKDHPKPKPDSTMEYRTKFIRAKYETQDFLKPSLRISSRSSFKSTTSVKSVDSNFSSTSRKDVFEDTREFVGELNITLVKGTNLAVRDMLTSDPYVVLTLGGQFNQRLKKVI

SEQ ID NO: 184072 - protein, 847 aa, Zea Mays
MPILSLTGTHDSQPDSEQVVQVYCVQTMAIQQYGLELPLCLPPTADSTGFGRDPAISRVYEAPLEMAGTESSTGTSFTDSYSVSSLSKPSTVDQSAELDLKPSAPPLAYSEGDGSVPLPSAPPAPKMEAPGSGPAPGGRGIDQSAFDYTTNRNVERDVLKRQDTPMPIRKDILGKDEPRDGHSDVPMLPNPRLMFQVGGNATHLVTPSEIISGTLSSSENNDASKSDGGKSQDVSSRSSQVPEVEPKHIDESKQDQNLGLEAVKETQIVCENMEKTRSSLDQTVEMISERSVTTDKYSVEESQSSSDRPTSDQTGISENVLKKFVEMPEKIDYSSASREQSSSFTKEEKVLHPQTSGQPSPPVSAFNSTESHEPLSSTYLPITVSSYPEVGATQGMLQQLMGRQEDMEKQLSTVVPASIAKEGKRLETSLGRTVEKSIKANIDAFWARLQEENTKREKADRDRMQQFVTLITSSINKDLPSNLEKSLKKEISSLGPVVARAITPIIEKCLTSAVSDSVQKGLGDKLFNQLEKSITGKLEATLARQIQIQFHTSGKQALQDALRTSFESLLVPAFEQACKTMFEQIDGAFQKGMSEHSTAIQHQVESSHSPLALTLKEIINSASSITQSFSSELLDGNRKLLALVTSGNAMAHNTSALQPINGPMGGSQEVEAPLDPMKELGRLISERKFDEAFTMALQRSDVSIVSWLCSQVSSLHQIDHLRCTLVLHIRTTLFWPCDAYTPLVQVDLRALCAMVPVPLNQGVLLALLQQLAIDIHNETSRKVQWMTDVAMAINPADQMIAVHVRPIFEQVYNQLAHQRTLPTMTAADGTSIRVIMHVINSVLLSYK

SEQ ID NO: 184073 - protein, 1111 aa, Zea Mays
MASPSGNPNPNPNTPFEIGKLFRPPNPMTTATPNPIFPGVAGGPTGSPPPSGPYSYPPVTPPFHRGPYIHYQQDPHAMARPVVSFPMPNPNLNPNPNPNANPNAASPGPNPGARLMQLLGNSGPTQLETAVSMPPPTSEFAQLQQLPAMPSAPPARMLSSTSSKVPRGRLLGTGERAVHDVDSRLPGEAQPPQLEVTPITKYTSDPGLVLGRQIAVNRTYIVYGLKLGNIRVLNINTALRALLRGHTQRVTDMAFFAEDVHRLASASIDGRIYVWRIDEGPDEENKPQITGKIEIAIQIVGEAEAYHPRICWHSHKQEILFVGIGNCVLRIDTTKVGRGKDFTVEDPVKCHLEKLVDGVRLVGKHDGDVTDLSISQWMSTRLASGSKDGSVKIWDDRKQVPLSIFKPHDGQAVYSVAFLTAPERPNHINLITAGLLNREVKIWASTNEDGWLLPSDSETWKCTQTLELVSSLEPRVEEAFFNQVAVLPQASLILLANAKKNAIYAVHVEYGPDPASTRLDYIADFTVAMPILSLTGTHDSQPDSEQVVQVYCVQTMAIQQYGLELPLCLPPTADSTGFGRDPAISRVYEAPLEMAGTESSTGTSFTDSYSVSSLSKPSTVDQSAELDLKPSAPPLAYSEGDGSVPLPSAPPAPKMEAPGSGPAPGGRGIDQSAFDYTTNRNVERDVLKRQDTPMPIRKDILGKDEPRDGHSDVPMLPNPRLMFQVGGNATHLVTPSEIISGTLSSSENNDASKSDGGKSQDVSSRSSQVPEVEPKHIDESKQDQNLGLEAVKETQIVCENMEKTRSSLDQTVEMISERSVTTDKYSVEESQSSSDRPTSDQTGISENVLKKFVEMPEKIDYSSASREQSSSFTKEEKVLHPQTSGQPSPPVSAFNSTESHEPLSSTYLPITVSSYPEVGATQGMLQQLMGRQEDMEKQLSTVVPASIAKEGKRLETSLGRTVEKSIKANIDAFWARLQEENTKREKADRDRMQQFVTLITSSINKDLPSNLEKSLKKEISSLGPVVARAITPIIEKCLTSAVSDSVQGWVTSCSISWKSLLLENLKLHLPGKSKSSSIHLENRLFRMLYVLALNHCLFQRLSKHARQCLSK

SEQ ID NO: 184074 - protein, 436 aa, Zea Mays
MARELLHQLEVAQDNRSSSPGELWLRNMLKKHSIALSSISRTMARLKSRIGWFKEGDANTSLFLAQTRFRKKKNFIAAIHSEDGQIWTAHEGKAAAFFNFYQGLLGTAEVRDVTVDLEALGMPSYDLDALDAPVSEEEVWDTIKALPSDKSPGPDGFTGRFYKSCWSVIMADFMAAVHCIWARNFRNLGPLNSAFITLLPKVEGATSVREFRPISLVHSFAKLVTKLLANRLAGRLQNMVSPNQTAFIKKRFILDNFMLVQQTTRFLHCQKQARILLKLDISKAFDSVSWAFLLKVLKKLGFGQIWCDIISGLLATSSTKILLNGLPRECIGHQRGLRQGDPLSPMLFILVMDVLNLLVQRASGEGFFQPLSSRNMQHRISLYADDTVLFLSPTAPDISVVMDILHLFGSASGLRTNIQKSSVFPICCGEEEVNCL

SEQ ID NO: 184075 - protein, 58 aa, Zea Mays
MEQPPDPHAGTMHGTSHARRYMDYHYQSISELNDSEVGLEISKSEKHLYLPKQPEILT

SEQ ID NO: 184076 - protein, 93 aa, Zea Mays
MGRTSIHWRGVARLWTRSHLSAVWSWVVVPWIFARRCGGAGAVPLGCGHGVARQSPWTSGRVLYEEQKSNFPFECVKQSKHPTLIRSEQPRAV

SEQ ID NO: 184077 - protein, 80 aa, Zea Mays
MIYNQLYEQNSLCTKCVGPIMLHEGMRLLCIKSVLGFTWHLHDVYGFASLMIELCNKELYKFHGLELKLDAHLFLMLLEL

SEQ ID NO: 184078 - protein, 130 aa, Zea Mays
MGEELSGLGVRDLQSLENQIGMSLHSIRMRKDHLLKSEIEVLQRKGSLIHQENMELSRRVHFMSQQKEELYRKASEPRGAAGASSSTPYSFCIATQQADAPVNLEQRHSQPKEGNRCQEFMAPELGLQLP

SEQ ID NO: 184079 - protein, 89 aa, Zea Mays
MGRGKIVIRRIDNSTSRQVTFSKRRSGLLKKAKELSILCDAEVGLIIFSSTGRLYDFSNTNMKAVIDRYGKAKDEQLGKNDATSELMVR

SEQ ID NO: 184080 - protein, 374 aa, Zea Mays
MDTALPSVLIGGGLSVSVSISTATKAGSQSISSHLSTSSLRLTARHRNRRRLPLLASSSESPPAQLAAASTESQSRSSRWVVVMDTPPAAAGGSGVSRAEAVDYYAATLAQVVGSEKEAQMRICEASWDGTYEFRCEIDEDASKELAKMPGVLSVQLDMGNKSEKDNHSLSLSTANLVSISDGASTSSSGKNEFWLVRMEKPGVEVVTKAQMVDHYTQILMKVLGNEQDAQVSIYHVSWDRDYGFCCHIDEECAKELADVPGVLSVQPDTNFGSDNKNYKGLSFYTSEKTLRAAFEPFGELVEVKIIMDRISKRSKGYAFVEYTTEEAGGAALKAMNGQIINGWMIVVDVAKTRSRDRLSGGSNQAFRPHYQAR

SEQ ID NO: 184081 - protein, 340 aa, Zea Mays
MDTALPSVLIGGGLSVSVSISTATKAGSQSISSHLSTSSLRLTARHRNRRRLPLLASSSESPPAQLAAASTESQSRSSRWVVVMDTPPAAAGGSGVSRAEAVDYYAATLAQVVGSEKEAQMRICEASWDGTYEFRCEIDEDASKELAKMPGVLSVQLDMGNKSEKDNHSLSLSTANLVSISDGASTSSSGKNEFWLVRMEKPGVEVVTKAQMVDHYTQILMKVLGNEQDAQVSIYHVSWDRDYGFCCHIDEECAKELADVPGVLSVQPDTNFGSDNKNYKVSGDDGVKSSEGTGAVDIKTKRLFVTGLSFYTSEKTLRAAFEPFGELVEGYQKGQKVMPS

SEQ ID NO: 184082 - protein, 393 aa, Zea Mays
MDTALPSVLIGGGLSVSVSISTATKAGSQSISSHLSTSSLRLTARHRNRRRLPLLASSSESPPAQLAAASTESQSRSSRWVVVMDTPPAAAGGSGVSRAEAVDYYAATLAQVVGSEKEAQMRICEASWDGTYEFRCEIDEDASKELAKMPGVLSVQLDMGNKSEKDNHSLSLSTANLVSISDGASTSSSGKNEFWLVRMEKPGVEVVTKAQMVDHYTQILMKVLGNEQDAQVSIYHVSWDRDYGFCCHIDEECAKELADVPGVLSVQPDTNFGSDNKNYKGDDGVKSSEGTGAVDIKTKRLFVTGLSFYTSEKTLRAAFEPFVKIIMDRISKRSKGYAFVEYTTEEAGGAALKAMNGQIINGWMIVVDVAKTRSRDRLSGGSNQAFRPHYQAR

SEQ ID NO: 184083 - protein, 254 aa, Zea Mays
MDTALPSVLIGGGLSVSVSISTATKAGSQSISSHLSTSSLRLTARHRNRRRLPLLASSSESPPAQLAAASTESQSRSSRWVVVMDTPPAAAGGSGVSRAEAVDYYAATLAQVVGSEKEAQMRICEASWDGTYEFRCEIDEDASKELAKMPGVLSVQLDMGNKSEKDNHSLSLSTANLVSISDGASTSSSGKNEFWLVRMEKPGVEVVTKAQMVDHYTQILMKVLGKMLRLVYITFHGIGIMVSVVILMKNAQKS

SEQ ID NO: 184084 - protein, 63 aa, Zea Mays
MFDKKKHLRLCVGEIAAVSSRSVVPRLGSVLKSSAPGRTLSIAEGDSAAGCTPSIRPGIFTHR

SEQ ID NO: 184085 - protein, 360 aa, Zea Mays
MNHPKGFTVDDRGNIYVADAMNMAIRKISDTGVTTIAGGKSGRGGHVDGPSDEAKFSTDFEVRYIGSSCSLLVIDRGNQAIREIQLHFDDCVYQYEAGFPLGVALLLAAAFFGYMLALLQRRVLGMYSNGDDHESPVKAKLTSIPPPYQKPLKPYVHPLLIPNDDEPVKQEEEEGLFTSIGKLVGGAKSSIAEIIGAAFSRKKRVNVHHHQLGRPTSWPAQESYAIPRDETPPPLDTRAPTPRKNYAFMSKEPEKIHHIRHGRPQLHGWTGEAAPQQQQPQQVRHQQYVQHHRQYSAGPQTYYEPSCDATKEIVFGAVQEGDTSRRPVEIKAVNHGDAAPYEQNGLRFRSSYSVRYNGNN

SEQ ID NO: 184086 - protein, 399 aa, Zea Mays
MAMSLLACSLHSLHSRPKLVAGSPEGFPGHVDGKLREARMNHPKGFTVDDRGNIYVADAMNMAIRKISDTGVTTIAGGKSGRGGHVDGPSDEAKFSTDFEVRYIGSSCSLLVIDRGNQAIREIQLHFDDCVYQYEAGFPLGVALLLAAAFFGYMLALLQRRVLGMYSNGDDHESPVKAKLTSIPPPYQKPLKPYVHPLLIPNDDEPVKQEEEEGLFTSIGKLVGGAKSSIAEIIGAAFSRKKRVNVHHHQLGRPTSWPAQESYAIPRDETPPPLDTRAPTPRKNYAFMSKEPEKIHHIRHGRPQLHGWTGEAAPQQQQPQQVRHQQYVQHHRQYSAGPQTYYEPSCDATKEIVFGAVQEGDTSRRPVEIKAVNHGDAAPYEQNGLRFRSSYSVRYNGNN

SEQ ID NO: 184087 - protein, 509 aa, Zea Mays
MATKGGNARGVPVGVLLVAALLLCSLAPASASSYPARVVSGFLSNAASAVVKRLWSLKSTTKIAASGGKSMVKYEGGYTVETVFDGSKLGIEPYSVEVTQGGELLVMDSMNSNIYRMALPLSRYSRPKLVAGSPEGFPGHVDGKLREARMNHPKGFTVDDRGNIYVADAMNMAIRKISDTGVTTIAGGKSGRGGHVDGPSDEAKFSTDFEVRYIGSSCSLLVIDRGNQAIREIQLHFDDCVYQYEAGFPLGVALLLAAAFFGYMLALLQRRVLGMYSNGDDHESPVKAKLTSIPPPYQKPLKPYVHPLLIPNDDEPVKQEEEEGLFTSIGKLVGGAKSSIAEIIGAAFSRKKRVNVHHHQLGRPTSWPAQESYAIPRDETPPPLDTRAPTPRKNYAFMSKEPEKIHHIRHGRPQLHGWTGEAAPQQQQPQQVRHQQYVQHHRQYSAGPQTYYEPSCDATKEIVFGAVQEGDTSRRPVEIKAVNHGDAAPYEQNGLRFRSSYSVRYNGNN

SEQ ID NO: 184088 - protein, 514 aa, Zea Mays
MYQFLRKTQTGGWMSLGGILLCVTGSEAMYADLGHFSQSSIQIAFISVVYPALVLAYMGQAAFISQHHSFESSYHIGFYVSVPETLRWPVLVIAILAAVVGSQAIITGTFSIIKQCSSLSCFPGVKIVHTSSTLHGQIYIPEINWMLMILCLAVTIGFRDTKHLANAQGLAVITVMLVTTCLMSLVIVLCWNKSIFLALGFLLFFGTIEVIYFSASLVKFHEGAWVPISLSFIFMVIMSVWHYGTIKKYEFDVQNKVSVNWLLNLGPSLGIVRVRGIGLIHTELMSGIPAIFSHFVTNLPAFHQVLVFLCVKSVPVPHVQPEERFLVGRIGPKEYRLYRVIVRYGYRDVQKDDLEFEKELVSNIAEFIRSSGEYDKNGFVEDADKPFEKLSTISTGINMLEEDGEVDAHVSPHKEIDPHNAAPKRKKARFMIPKSAQVDSEVRRELQELMDAREAGMSFILGHSYMKAKSGSSFIKRVVINFFYEFLRKNSRGPAYAANIPHASTLEVGMVYQV

SEQ ID NO: 184089 - protein, 369 aa, Zea Mays
MLMILCLAVTIGFRDTKHLANAQGLAVITVMLVTTCLMSLVIVLCWNKSIFLALGFLLFFGTIEVIYFSASLVKFHEGAWVPISLSFIFMVIMSVWHYGTIKKYEFDVQNKVSVNWLLNLGPSLGIVRVRGIGLIHTELMSGIPAIFSHFVTNLPAFHQVLVFLCVKSVPVPHVQPEERFLVGRIGPKEYRLYRVIVRYGYRDVQKDDLEFEKELVSNIAEFIRSSGEYDKNGFVEDADKPFEKLSTISTGINMLEEDGEVDAHVSPHKEIDPHNAAPKRKKARFMIPKSAQVDSEVRRELQELMDAREAGMSFILGHSYMKAKSGSSFIKRVVINFFYEFLRKNSRGPAYAANIPHASTLEVGMVYQV

SEQ ID NO: 184090 - protein, 176 aa, Zea Mays
MVTTSATSHNPCRRRLLHPAVAMGKFRKLDRGYSHRLSMLRTMVSQLVKHERIETTVAKVLSFAAFLRARACGVGGPAEGGSDGAAREGDLGGQQAPHCEGQSQRGRELSAEGKLAMRGSSTRRASSLWKRYQRGGQARCGRELSGTQHAATRAAAFVRGDDVVHKLFTDLAYRYS

SEQ ID NO: 184091 - protein, 66 aa, Zea Mays
MSGHFVASINLCRAVAVNNLADIFAKYAHRLEVFARKKLVFLLPIFSRIHLYNSDCFSTWPVCIAT

SEQ ID NO: 184092 - protein, 67 aa, Zea Mays
MAPVADPVVLLPRLALVRLVPIRLDWHPRLPPSALAHRGRLLLHRMTVEFEVFIIAPMSKLEFVNNT

SEQ ID NO: 184093 - protein, 94 aa, Zea Mays
MQTCLKDNCNLETDTYIESAGGRDCWVTLYQINNKGTQVHYSEYHQICIFIFFILLKLKNLNHDVCSCIYHVILCVYDCCYPDIFQLYSFTGYP

SEQ ID NO: 184094 - protein, 94 aa, Zea Mays
MGLWDSLLNWLRSLFFKQEMELSLVGLQNAGKTSLVNAVATGGYSEDMIPTVGFNMRKITKGNVTIKLWDLGGQRRFRTMWERYCRGVSAILHA

SEQ ID NO: 184095 - protein, 92 aa, Zea Mays
MGLWDSLLNWLRSLFFKQEMELSLVGLQNAGKTSLVNAVATGGYSEDMIPTVGFNMRKITKGNVTIKLWDLGGQRRFRTMWERYCRGVSAIL

SEQ ID NO: 184096 - protein, 590 aa, Zea Mays
MIDFTNLDERATGMFWVLSFTMAQPACEAVMNWFTSAGMADLIQGPNMQPSERIMMMRETYPLSMSLLSGLSINLCLKLAYQLEETIFLGQAVPSIAMVETYVRLLLIAPHSLFRPHFTALTQRSPSILSKSGVSLLLLEILNYRLLPLYRYHGKSKALMYDVTKIISMIKGKRGEHRLFRLAENLCMNLILSLKDFFFVKKELKGPTEFTETLNRITIISLAITIKTRGIAEVEHMIYLQPLLEQIMATSQHTWSEKTLRYFPPLIRDFLMGRVDKRGLAIQAWQQAETTVINQCNQLLSPSAEPNYVMTYLSHSFPQHRQYLCAGAWMLMNGHLEINSANLARVLREFSPEEVTANIYTVVDVLLHHIQCEVQRGHLAQDLLSKAITNLSFFIWTHELLPLDILLLALIDRDDDPYALRLVISLLEKPELQQRVKNFCNTRSPEHWLKNQHPKRAELQKALGSHLSWKDRYPPFFDDIAARLLPVIPLIIYRLIENDATDIADRVLAFYSSLLAFHPLRFTFVRDILAYFYGHLPIKLIGRILNLLGVSTKVTLLPFCIPFLAIFHKSGWNLLILSSNTFGQSIQLPC

SEQ ID NO: 184097 - protein, 1401 aa, Zea Mays
MDGGHTTRHPMSPAISASTVLPQQRQMQPHHHPARPAIADLFTLYLGVRASLAPKFLISSRVGVSLLVLTLGVVGLQMNSKQRAEDPLRESSNKLQKRVTALNRDLPPRDEQFISDYEQLRMQFPFLENIPDDEALVSIIMEIHRRRDMVCMHMQMLDQHLHCPTFGTHRFLSQSYPSIAGESVTNLRYSPITYPSVLGEPLHGEDLANSIPKGGLDWERALRCLRHALRTTPSPDWWRRVLLVAPCYRSQSQQSSTPGAVFSPDMIGEAVADRTIELLKLTNSETQCWQDWLLFADIFFFLMKSGCIDFLDFVDKLASRVTNSDQQILRSNHVTWLLAQIIRIEIVMNTLSSDPRKVDTTRKIISFHKEDKSLDANNIGPQSILLDFISSSQTLRIWSFNTSIREHLNSDQLQKGKQIDEWWKQMMKASGERMIDFTNLDERATGMFWVLSFTMAQPACEAVMNWFTSAGMADLIQGPNMQPSERIMMMRETYPLSMSLLSGLSINLCLKLAYQLEETIFLGQAVPSIAMVETYVRLLLIAPHSLFRPHFTALTQRSPSILSKSGVSLLLLEILNYRLLPLYRYHGKSKALMYDVTKIISMIKGKRGEHRLFRLAENLCMNLILSLKDFFFVKKELKGPTEFTETLNRITIISLAITIKTRGIAEVEHMIYLQPLLEQIMATSQHTWSEKTLRYFPPLIRDFLMGRVDKRGLAIQAWQQAETTVINQCNQLLSPSAEPNYVMTYLSHSFPQHRQYLCAGAWMLMNGHLEINSANLARVLREFSPEEVTANIYTVVDVLLHHIQCEVQRGHLAQDLLSKAITNLSFFIWTHELLPLDILLLALIDRDDDPYALRLVISLLEKPELQQRVKNFCNTRSPEHWLKNQHPKRAELQKALGSHLSWKDRYPPFFDDIAARLLPVIPLIIYRLIENDATDIADRVLAFYSSLLAFHPLRFTFVRDILAYFYGHLPIKLIGRILNLLGVSTKTPFSESFAKYLVSSNSSICPPPEYFANLLLNLVNNVIPPLSSKSKSNPADTTRSTFNKHHASSQPGGVGNTDGQRAFYQNQDPGSYTQLVLETAAIEILSLPVPAAQIVSSLVQIIAHVQAILIQSNSGQGMSGGLGQSSGLPTSPSGAAESSGPNQANSAATGINATNFVSRSGYSCQQLSVLMIQACGLLLAQLPPEFHMQLYSEAARVIKDCWWLADGSRPVKELDSAVGYALLDPTWASQDNTSTAIGNIVALLHSFFSNLPQEWLESTHTVIKHLRPVNSVAMLRIAFRILGPLLPRLAFARPLFMKTLALLFNVLGDVFGKNPQVSNPNPVEASEIADIIDFLHHAVMYEGQGGPVQSTSKPKLEILTLCGKVIEILRPDVQHLLSHLKIDPTSSIYAATHPKLVQNPS

SEQ ID NO: 184098 - protein, 1054 aa, Zea Mays
MNTLSSDPRKVDTTRKIISFHKEDKSLDANNIGPQSILLDFISSSQTLRIWSFNTSIREHLNSDQLQKGKQIDEWWKQMMKASGERMIDFTNLDERATGMFWVLSFTMAQPACEAVMNWFTSAGMADLIQGPNMQPSERIMMMRETYPLSMSLLSGLSINLCLKLAYQLEETIFLGQAVPSIAMVETYVRLLLIAPHSLFRPHFTALTQRSPSILSKSGVSLLLLEILNYRLLPLYRYHGKSKALMYDVTKIISMIKGKRGEHRLFRLAENLCMNLILSLKDFFFVKKELKGPTEFTETLNRITIISLAITIKTRGIAEVEHMIYLQPLLEQIMATSQHTWSEKTLRYFPPLIRDFLMGRVDKRGLAIQAWQQAETTVINQCNQLLSPSAEPNYVMTYLSHSFPQHRQYLCAGAWMLMNGHLEINSANLARVLREFSPEEVTANIYTVVDVLLHHIQCEVQRGHLAQDLLSKAITNLSFFIWTHELLPLDILLLALIDRDDDPYALRLVISLLEKPELQQRVKNFCNTRSPEHWLKNQHPKRAELQKALGSHLSWKDRYPPFFDDIAARLLPVIPLIIYRLIENDATDIADRVLAFYSSLLAFHPLRFTFVRDILAYFYGHLPIKLIGRILNLLGVSTKTPFSESFAKYLVSSNSSICPPPEYFANLLLNLVNNVIPPLSSKSKSNPADTTRSTFNKHHASSQPGGVGNTDGQRAFYQNQDPGSYTQLVLETAAIEILSLPVPAAQIVSSLVQIIAHVQAILIQSNSGQGMSGGLGQSSGLPTSPSGAAESSGPNQANSAATGINATNFVSRSGYSCQQLSVLMIQACGLLLAQLPPEFHMQLYSEAARVIKDCWWLADGSRPVKELDSAVGYALLDPTWASQDNTSTAIGNIVALLHSFFSNLPQEWLESTHTVIKHLRPVNSVAMLRIAFRILGPLLPRLAFARPLFMKTLALLFNVLGDVFGKNPQVSNPNPVEASEIADIIDFLHHAVMYEGQGGPVQSTSKPKLEILTLCGKVIEILRPDVQHLLSHLKIDPTSSIYAATHPKLVQNPS

SEQ ID NO: 184099 - protein, 1101 aa, Zea Mays
MDGGHTTRHPMSPAISASTVLPQQRQMQPHHHPARPAIADLFTLYLGVRASLAPKFLISSRVGVSLLVLTLGVVGLQMNSKQRAEDPLRESSNKLQKRVTALNRDLPPRDEQFISDYEQLRMQFPDAEQLQAITESVLISFVLQCSSHAPQSEFLLFATRCLCARGHLRWDSLLPSLLNTVSSIEAPMVQGVSVTGGGSVTPSSAITMPNAPNFHQSNPASPLSVMNTIGSPTQSGIDQPVGANVSPIKAAEFSSSAQLGTAARGDQSRRGAEASYLHHLSCRIILAGLEFNLKPATHAVIFQHMVNWLVNWDQRPQGMDETDTMQTCRLEKPLHEWMHLCLDVIWILVNEDKCRIPFYELVRCNLQFLENIPDDEALVSIIMEIHRRRDMVCMHMQMLDQHLHCPTFGTHRFLSQSYPSIAGESVTNLRYSPITYPSVLGEPLHGEDLANSIPKGGLDWERALRCLRHALRTTPSPDWWRRVLLVAPCYRSQSQQSSTPGAVFSPDMIGEAVADRTIELLKLTNSETQCWQDWLLFADIFFFLMKSGCIDFLDFVDKLASRVTNSDQQILRSNHVTWLLAQIIRIEIVMNTLSSDPRKVDTTRKIISFHKEDKSLDANNIGPQSILLDFISSSQTLRIWSFNTSIREHLNSDQLQKGKQIDEWWKQMMKASGERMIDFTNLDERATGMFWVLSFTMAQPACEAVMNWFTSAGMADLIQGPNMQPSERIMMMRETYPLSMSLLSGLSINLCLKLAYQLEETIFLGQAVPSIAMVETYVRLLLIAPHSLFRPHFTALTQRSPSILSKSGVSLLLLEILNYRLLPLYRYHGKSKALMYDVTKIISMIKGKRGEHRLFRLAENLCMNLILSLKDFFFVKKELKGPTEFTETLNRITIISLAITIKTRGIAEVEHMIYLQPLLEQIMATSQHTWSEKTLRYFPPLIRDFLMGRVDKRGLAIQAWQQAETTVINQCNQLLSPSAEPNYVMTYLSHSFPQHRQYLCAGAWMLMNGHLEINSANLARVLREFSPEEVTANIYTVVDVLLHHIQCEVQRGHLAQDLLSKAITNLSFFIWTHELLPLDILLLALIDRDDDPYALRLVDQF

SEQ ID NO: 184100 - protein, 1508 aa, Zea Mays
MDGGHTTRHPMSPAISASTVLPQQRQMQPHHHPARPAIADLFTLYLGVRASLAPKFLISSRVGVSLLVLTLGVVGLQMNSKQRAEDPLRESSNKLQKRVTALNRDLPPRDEQFISDYEQLRMQFPDAEQLQAITESVLISFVLQCSSHAPQSEFLLFATRCLCARGHLRWDSLLPSLLNTVSSIEAPMVQGVSVTGGGSVTPSSAITMPNAPNFHQSNPASPLSVMNTIGSPTQSGIDQPVGANVSPIKAAEFSSSAQLGTAARGDQSRRGAEASYLHHLSCRIILAGLEFNLKPATHAVIFQHMVNWLVNWDQRPQGMDETDTMQTCRLEKPLHEWMHLCLDVIWILVNEDKCRIPFYELVRCNLQFLENIPDDEALVSIIMEIHRRRDMVCMHMQMLDQHLHCPTFGTHRFLSQSYPSIAGESVTNLRYSPITYPSVLGEPLHGEIIRIEIVMNTLSSDPRKVDTTRKIISFHKEDKSLDANNIGPQSILLDFISSSQTLRIWSFNTSIREHLNSDQLQKGKQIDEWWKQMMKASGERMIDFTNLDERATGMFWVLSFTMAQPACEAVMNWFTSAGMADLIQGPNMQPSERIMMMRETYPLSMSLLSGLSINLCLKLAYQLEETIFLGQAVPSIAMVETYVRLLLIAPHSLFRPHFTALTQRSPSILSKSGVSLLLLEILNYRLLPLYRYHGKSKALMYDVTKIISMIKGKRGEHRLFRLAENLCMNLILSLKDFFFVKKELKGPTEFTETLNRITIISLAITIKTRGIAEVEHMIYLQPLLEQIMATSQHTWSEKTLRYFPPLIRDFLMGRVDKRGLAIQAWQQAETTVINQCNQLLSPSAEPNYVMTYLSHSFPQHRQYLCAGAWMLMNGHLEINSANLARVLREFSPEEVTANIYTVVDVLLHHIQCEVQRGHLAQDLLSKAITNLSFFIWTHELLPLDILLLALIDRDDDPYALRLVISLLEKPELQQRVKNFCNTRSPEHWLKNQHPKRAELQKALGSHLSWKDRYPPFFDDIAARLLPVIPLIIYRLIENDATDIADRVLAFYSSLLAFHPLRFTFVRDILAYFYGHLPIKLIGRILNLLGVSTKTPFSESFAKYLVSSNSSICPPPEYFANLLLNLVNNVIPPLSSKSKSNPADTTRSTFNKHHASSQPGGVGNTDGQRAFYQNQDPGSYTQLVLETAAIEILSLPVPAAQIVSSLVQIIAHVQAILIQSNSGQGMSGGLGQSSGLPTSPSGAAESSGPNQANSAATGINATNFVSRSGYSCQQLSVLMIQACGLLLAQLPPEFHMQLYSEAARVIKDCWWLADGSRPVKELDSAVGYALLDPTWASQDNTSTAIGNIVALLHSFFSNLPQEWLESTHTVIKHLRPVNSVAMLRIAFRILGPLLPRLAFARPLFMKTLALLFNVLGDVFGKNPQVSNPNPVEASEIADIIDFLHHAVMYEGQGGPVQSTSKPKLEILTLCGKVIEILRPDVQHLLSHLKIDPTSSIYAATHPKLVQNPS

SEQ ID NO: 184101 - protein, 1297 aa, Zea Mays
MCRQSRQLNSPALRSLVLQQEFLENIPDDEALVSIIMEIHRRRDMVCMHMQMLDQHLHCPTFGTHRFLSQSYPSIAGESVTNLRYSPITYPSVLGEPLHGEDLANSIPKGGLDWERALRCLRHALRTTPSPDWWRRVLLVAPCYRSQSQQSSTPGAVFSPDMIGEAVADRTIELLKLTNSETQCWQDWLLFADIFFFLMKSGCIDFLDFVDKLASRVTNSDQQILRSNHVTWLLAQIIRIEIVMNTLSSDPRKVDTTRKIISFHKEDKSLDANNIGPQSILLDFISSSQTLRIWSFNTSIREHLNSDQLQKGKQIDEWWKQMMKASGERMIDFTNLDERATGMFWVLSFTMAQPACEAVMNWFTSAGMADLIQGPNMQPSERIMMMRETYPLSMSLLSGLSINLCLKLAYQLEETIFLGQAVPSIAMVETYVRLLLIAPHSLFRPHFTALTQRSPSILSKSGVSLLLLEILNYRLLPLYRYHGKSKALMYDVTKIISMIKGKRGEHRLFRLAENLCMNLILSLKDFFFVKKELKGPTEFTETLNRITIISLAITIKTRGIAEVEHMIYLQPLLEQIMATSQHTWSEKTLRYFPPLIRDFLMGRVDKRGLAIQAWQQAETTVINQCNQLLSPSAEPNYVMTYLSHSFPQHRQYLCAGAWMLMNGHLEINSANLARVLREFSPEEVTANIYTVVDVLLHHIQCEVQRGHLAQDLLSKAITNLSFFIWTHELLPLDILLLALIDRDDDPYALRLVISLLEKPELQQRVKNFCNTRSPEHWLKNQHPKRAELQKALGSHLSWKDRYPPFFDDIAARLLPVIPLIIYRLIENDATDIADRVLAFYSSLLAFHPLRFTFVRDILAYFYGHLPIKLIGRILNLLGVSTKTPFSESFAKYLVSSNSSICPPPEYFANLLLNLVNNVIPPLSSKSKSNPADTTRSTFNKHHASSQPGGVGNTDGQRAFYQNQDPGSYTQLVLETAAIEILSLPVPAAQIVSSLVQIIAHVQAILIQSNSGQGMSGGLGQSSGLPTSPSGAAESSGPNQANSAATGINATNFVSRSGYSCQQLSVLMIQACGLLLAQLPPEFHMQLYSEAARVIKDCWWLADGSRPVKELDSAVGYALLDPTWASQDNTSTAIGNIVALLHSFFSNLPQEWLESTHTVIKHLRPVNSVAMLRIAFRILGPLLPRLAFARPLFMKTLALLFNVLGDVFGKNPQVSNPNPVEASEIADIIDFLHHAVMYEGQGGPVQSTSKPKLEILTLCGKVIEILRPDVQHLLSHLKIDPTSSIYAATHPKLVQNPS

SEQ ID NO: 184102 - protein, 1261 aa, Zea Mays
MEIHRRRDMVCMHMQMLDQHLHCPTFGTHRFLSQSYPSIAGESVTNLRYSPITYPSVLGEPLHGEDLANSIPKGGLDWERALRCLRHALRTTPSPDWWRRVLLVAPCYRSQSQQSSTPGAVFSPDMIGEAVADRTIELLKLTNSETQCWQDWLLFADIFFFLMKSGCIDFLDFVDKLASRVTNSDQQILRSNHVTWLLAQIIRIEIVMNTLSSDPRKVDTTRKIISFHKEDKSLDANNIGPQSILLDFISSSQTLRIWSFNTSIREHLNSDQLQKGKQIDEWWKQMMKASGERMIDFTNLDERATGMFWVLSFTMAQPACEAVMNWFTSAGMADLIQGPNMQPSERIMMMRETYPLSMSLLSGLSINLCLKLAYQLEETIFLGQAVPSIAMVETYVRLLLIAPHSLFRPHFTALTQRSPSILSKSGVSLLLLEILNYRLLPLYRYHGKSKALMYDVTKIISMIKGKRGEHRLFRLAENLCMNLILSLKDFFFVKKELKGPTEFTETLNRITIISLAITIKTRGIAEVEHMIYLQPLLEQIMATSQHTWSEKTLRYFPPLIRDFLMGRVDKRGLAIQAWQQAETTVINQCNQLLSPSAEPNYVMTYLSHSFPQHRQYLCAGAWMLMNGHLEINSANLARVLREFSPEEVTANIYTVVDVLLHHIQCEVQRGHLAQDLLSKAITNLSFFIWTHELLPLDILLLALIDRDDDPYALRLVISLLEKPELQQRVKNFCNTRSPEHWLKNQHPKRAELQKALGSHLSWKDRYPPFFDDIAARLLPVIPLIIYRLIENDATDIADRVLAFYSSLLAFHPLRFTFVRDILAYFYGHLPIKLIGRILNLLGVSTKTPFSESFAKYLVSSNSSICPPPEYFANLLLNLVNNVIPPLSSKSKSNPADTTRSTFNKHHASSQPGGVGNTDGQRAFYQNQDPGSYTQLVLETAAIEILSLPVPAAQIVSSLVQIIAHVQAILIQSNSGQGMSGGLGQSSGLPTSPSGAAESSGPNQANSAATGINATNFVSRSGYSCQQLSVLMIQACGLLLAQLPPEFHMQLYSEAARVIKDCWWLADGSRPVKELDSAVGYALLDPTWASQDNTSTAIGNIVALLHSFFSNLPQEWLESTHTVIKHLRPVNSVAMLRIAFRILGPLLPRLAFARPLFMKTLALLFNVLGDVFGKNPQVSNPNPVEASEIADIIDFLHHAVMYEGQGGPVQSTSKPKLEILTLCGKVIEILRPDVQHLLSHLKIDPTSSIYAATHPKLVQNPS

SEQ ID NO: 184103 - protein, 676 aa, Zea Mays
MNTLSSDPRKVDTTRKIISFHKEDKSLDANNIGPQSILLDFISSSQTLRIWSFNTSIREHLNSDQLQKGKQIDEWWKQMMKASGERMIDFTNLDERATGMFWVLSFTMAQPACEAVMNWFTSAGMADLIQGPNMQPSERIMMMRETYPLSMSLLSGLSINLCLKLAYQLEETIFLGQAVPSIAMVETYVRLLLIAPHSLFRPHFTALTQRSPSILSKSGVSLLLLEILNYRLLPLYRYHGKSKALMYDVTKIISMIKGKRGEHRLFRLAENLCMNLILSLKDFFFVKKELKGPTEFTETLNRITIISLAITIKTRGIAEVEHMIYLQPLLEQIMATSQHTWSEKTLRYFPPLIRDFLMGRVDKRGLAIQAWQQAETTVINQCNQLLSPSAEPNYVMTYLSHSFPQHRQYLCAGAWMLMNGHLEINSANLARVLREFSPEEVTANIYTVVDVLLHHIQCEVQRGHLAQDLLSKAITNLSFFIWTHELLPLDILLLALIDRDDDPYALRLVISLLEKPELQQRVKNFCNTRSPEHWLKNQHPKRAELQKALGSHLSWKDRYPPFFDDIAARLLPVIPLIIYRLIENDATDIADRVLAFYSSLLAFHPLRFTFVRDILAYFYGHLPIKLIGRILNLLGVSTKVTLLPFCIPFLAIFHKSGWNLLILSSNTFGQSIQLPC

SEQ ID NO: 184104 - protein, 883 aa, Zea Mays
MEIHRRRDMVCMHMQMLDQHLHCPTFGTHRFLSQSYPSIAGESVTNLRYSPITYPSVLGEPLHGEDLANSIPKGGLDWERALRCLRHALRTTPSPDWWRRVLLVAPCYRSQSQQSSTPGAVFSPDMIGEAVADRTIELLKLTNSETQCWQDWLLFADIFFFLMKSGCIDFLDFVDKLASRVTNSDQQILRSNHVTWLLAQIIRIEIVMNTLSSDPRKVDTTRKIISFHKEDKSLDANNIGPQSILLDFISSSQTLRIWSFNTSIREHLNSDQLQKGKQIDEWWKQMMKASGERMIDFTNLDERATGMFWVLSFTMAQPACEAVMNWFTSAGMADLIQGPNMQPSERIMMMRETYPLSMSLLSGLSINLCLKLAYQLEETIFLGQAVPSIAMVETYVRLLLIAPHSLFRPHFTALTQRSPSILSKSGVSLLLLEILNYRLLPLYRYHGKSKALMYDVTKIISMIKGKRGEHRLFRLAENLCMNLILSLKDFFFVKKELKGPTEFTETLNRITIISLAITIKTRGIAEVEHMIYLQPLLEQIMATSQHTWSEKTLRYFPPLIRDFLMGRVDKRGLAIQAWQQAETTVINQCNQLLSPSAEPNYVMTYLSHSFPQHRQYLCAGAWMLMNGHLEINSANLARVLREFSPEEVTANIYTVVDVLLHHIQCEVQRGHLAQDLLSKAITNLSFFIWTHELLPLDILLLALIDRDDDPYALRLVISLLEKPELQQRVKNFCNTRSPEHWLKNQHPKRAELQKALGSHLSWKDRYPPFFDDIAARLLPVIPLIIYRLIENDATDIADRVLAFYSSLLAFHPLRFTFVRDILAYFYGHLPIKLIGRILNLLGVSTKVTLLPFCIPFLAIFHKSGWNLLILSSNTFGQSIQLPC

SEQ ID NO: 184105 - protein, 983 aa, Zea Mays
MDGGHTTRHPMSPAISASTVLPQQRQMQPHHHPARPAIADLFTLYLGVRASLAPKFLISSRVGVSLLVLTLGVVGLQMNSKQRAEDPLRESSNKLQKRVTALNRDLPPRDEQFISDYEQLRMQFPDAEQLQAITESVLISFVLQCSSHAPQSEFLLFATRCLCARGHLRWDSLLPSLLNTVSSIEAPMVQGVSVTGGGSVTPSSAITMPNAPNFHQSNPASPLSVMNTIGSPTQSGIDQPVGANVSPIKAAEFSSSAQLGTAARGDQSRRGAEASYLHHLSCRIILAGLEFNLKPATHAVIFQHMVNWLVNWDQRPQGMDETDTMQTCRLEKPLHEWMHLCLDVIWILVNEDKCRIPFYELVRCNLQFLENIPDDEALVSIIMEIHRRRDMVCMHMQMLDQHLHCPTFGTHRFLSQSYPSIAGESVTNLRYSPITYPSVLGEPLHGEDLANSIPKGGLDWERALRCLRHALRTTPSPDWWRRVLLVAPCYRSQSQQSSTPGAVFSPDMIGEAVADRTIELLKLTNSETQCWQDWLLFADIFFFLMKSGCIDFLDFVDKLASRVTNSDQQILRSNHVTWLLAQIIRIEIVMNTLSSDPRKVDTTRKIISFHKEDKSLDANNIGPQSILLDFISSSQTLRIWSFNTSIREHLNSDQLQKGKQIDEWWKQMMKASGERMIDFTNLDERATGMFWVLSFTMAQPACEAVMNWFTSAGMADLIQGPNMQPSERIMMMRETYPLSMSLLSGLSINLCLKLAYQLEETIFLGQAVPSIAMVETYVRLLLIAPHSLFRPHFTALTQRSPSILSKSGVSLLLLEILNYRLLPLYRYHGKSKALMYDVTKIISMIKGKRGEHRLFRLAENLCMNLILSLKDFFFVKKELKGPTEFTETLNRITIISLAITIKTRGIAEVEHMIYLQPLLEQIMATSQHTWSEKTLRYFPPLIRDFLMGRVDKRGLAIQAWQQKRLLLTNVISCSHHLLSQTMS

SEQ ID NO: 184106 - protein, 1077 aa, Zea Mays
MDGGHTTRHPMSPAISASTVLPQQRQMQPHHHPARPAIADLFTLYLGMNSKQRAEDPLRESSNKLQKRVTALNRDLPPRDEQFISDYEQLRMQFPDAEQLQAITESVLISFVLQCSSHAPQSEFLLFATRCLCARGHLRWDSLLPSLLNTVSSIEAPMVQGVSVTGGGSVTPSSAITMPNAPNFHQSNPASPLSVMNTIGSPTQSGIDQPVGANVSPIKAAEFSSSAQLGTAARGDQSRRGAEASYLHHLSCRIILAGLEFNLKPATHAVIFQHMVNWLVNWDQRPQGMDETDTMQTCRLEKPLHEWMHLCLDVIWILVNEDKCRIPFYELVRCNLQFLENIPDDEALVSIIMEIHRRRDMVCMHMQMLDQHLHCPTFGTHRFLSQSYPSIAGESVTNLRYSPITYPSVLGEPLHGEDLANSIPKGGLDWERALRCLRHALRTTPSPDWWRRVLLVAPCYRSQSQQSSTPGAVFSPDMIGEAVADRTIELLKLTNSETQCWQDWLLFADIFFFLMKSGCIDFLDFVDKLASRVTNSDQQILRSNHVTWLLAQIIRIEIVMNTLSSDPRKVDTTRKIISFHKEDKSLDANNIGPQSILLDFISSSQTLRIWSFNTSIREHLNSDQLQKGKQIDEWWKQMMKASGERMIDFTNLDERATGMFWVLSFTMAQPACEAVMNWFTSAGMADLIQGPNMQPSERIMMMRETYPLSMSLLSGLSINLCLKLAYQLEETIFLGQAVPSIAMVETYVRLLLIAPHSLFRPHFTALTQRSPSILSKSGVSLLLLEILNYRLLPLYRYHGKSKALMYDVTKIISMIKGKRGEHRLFRLAENLCMNLILSLKDFFFVKKELKGPTEFTETLNRITIISLAITIKTRGIAEVEHMIYLQPLLEQIMATSQHTWSEKTLRYFPPLIRDFLMGRVDKRGLAIQAWQQAETTVINQCNQLLSPSAEPNYVMTYLSHSFPQHRQYLCAGAWMLMNGHLEINSANLARVLREFSPEEVTANIYTVVDVLLHHIQCEVQRGHLAQDLLSKAITNLSFFIWTHELLPLDILLLALIDRDDDPYALRLVGCSLDADHN

SEQ ID NO: 184107 - protein, 815 aa, Zea Mays
MDGGHTTRHPMSPAISASTVLPQQRQMQPHHHPARPAIADLFTLYLGVRASLAPKFLISSRVGVSLLVLTLGVVGLQMNSKQRAEDPLRESSNKLQKRVTALNRDLPPRDEQFISDYEQLRMQFPDAEQLQAITESVLISFVLQCSSHAPQSEFLLFATRCLCARGHLRWDSLLPSLLNTVSSIEAPMVQGVSVTGGGSVTPSSAITMPNAPNFHQSNPASPLSVMNTIGSPTQSGIDQPVGANVSPIKAAEFSSSAQLGTAARGDQSRRGAEASYLHHLSCRIILAGLEFNLKPATHAVIFQHMVNWLVNWDQRPQGMDETDTMQTCRLEKPLHEWMHLCLDVIWILVNEDKCRIPFYELVRCNLQFLENIPDDEALVSIIMEIHRRRDMVCMHMQMLDQHLHCPTFGTHRFLSQSYPSIAGESVTNLRYSPITYPSVLGEPLHGEDLANSIPKGGLDWERALRCLRHALRTTPSPDWWRRVLLVAPCYRSQSQQSSTPGAVFSPDMIGEAVADRTIELLKLTNSETQCWQDWLLFADIFFFLMKSGCIDFLDFVDKLASRVTNSDQQILRSNHVTWLLAQIIRIEIVMNTLSSDPRKVDTTRKIISFHKEDKSLDANNIGPQSILLDFISSSQTLRIWSFNTSIREHLNSDQLQKGKQIDEWWKQMMKASGERMIDFTNLDERATGMFWVLSFTMAQPACEAVMNWFTSAGMADLIQGPNMQPSERIMMMRETYPLSMSLLSGLSINLCLKLAYQLEETIFLGQAVPSIAMVETYVRLLLIAPHSLFRPHFTALTQRSPSILSKSGIMVKARR

SEQ ID NO: 184108 - protein, 597 aa, Zea Mays
MIGEAVADRTIELLKLTNSETQCWQDWLLFADIFFFLMKSGCIDFLDFVDKLASRVTNSDQQILRSNHVTWLLAQIIRIEIVMNTLSSDPRKVDTTRKIISFHKEDKSLDANNIGPQSILLDFISSSQTLRIWSFNTSIREHLNSDQLQKGKQIDEWWKQMMKASGERMIDFTNLDERATGMFWVLSFTMAQPACEAVMNWFTSAGMADLIQGPNMQPSERIMMMRETYPLSMSLLSGLSINLCLKLAYQLEETIFLGQAVPSIAMVETYVRLLLIAPHSLFRPHFTALTQRSPSILSKSGVSLLLLEILNYRLLPLYRYHGKSKALMYDVTKIISMIKGKRGEHRLFRLAENLCMNLILSLKDFFFVKKELKGPTEFTETLNRITIISLAITIKTRGIAEVEHMIYLQPLLEQIMATSQHTWSEKTLRYFPPLIRDFLMGRVDKRGLAIQAWQQAETTVINQCNQLLSPSAEPNYVMTYLSHSFPQHRQYLCAGAWMLMNGHLEINSANLARVLREFSPEEVTANIYTVVDVLLHHIQCEVQRGHLAQDLLSKAITNLSFFIWTHELLPLDILLLALIDRDDDPYALRLVTALFTE

SEQ ID NO: 184109 - protein, 69 aa, Zea Mays
MLLTGQLGTASWGRVSVHMSRTPGVDSCIFPSIRSTSCSSGQPWSPSRIDGHQPTSNGQMVHKNAQFLG

SEQ ID NO: 184110 - protein, 369 aa, Zea Mays
MACLTDLVNLNLSDNTEKIIAEYIWIGGSGMDLRSKARTLSGPVTDPSKLPKWNYDGSSTGQAPGEDSEVILYPQAIFKDPFRRGNNILVMCDCYTPAGEPIPTNKRYNAAKIFSSPEVAAEEPWYGIEQEYTLLQKDTNWPLGWPIGGFPGPQGPYYCGIGAEKSFGRDIVDAHYKACLYAGINISGINGEVMPGQWEFQVGPSVGISSGDQVWVARYILERITEIAGVVVTFDPKPIPGDWNGAGAHTNYSTESMRKEGGYEVIKAAIEKLKLRHREHHHLEALSAAAVALQGPRSDCKAIVPSVPFAYYCYYLARSSGGQVVVVCQNRTQKEEEEKKNKTCGVYVISSNNGRTTLVVPFSTYACIV

SEQ ID NO: 184111 - protein, 228 aa, Zea Mays
MEVAATSPWPEEPLLRPPSPQPNLRADAASSGDPASPPPSAVRPSRLAALIGRAAGRRGPSMLVRETAALQLQRRRADWAHSRPVLALDIAWNVAFAAAAAAVLSSSAEESPVKPLRLWVVGYAAQCLVHVGLVCADTRRETRRARRSASDVESAGAGTDSSDADSEDDERAEGRSSYTGRCETMNTLISFLWWIIGFYWIFSGGEVLEHGAPRLYWRVHQMQILVFF

SEQ ID NO: 184112 - protein, 204 aa, Zea Mays
MEVAATSPWPEEPLLRPPSPQPNLRADAASSGDPASPPPSAVRPSRLAALIGRAAGRRGPSMLVRETAALQLQRRRADWAHSRPVLALDIAWNVAFAAAAAAVLSSSAEESPVKPLRLWVVGYAAQCLVHVGLVCADTRRETRRARRSASDVESAGAGTDSSDADSEDDERAEGRSSYTGRCETMNTLISFLWWIIGFYWIFSG

SEQ ID NO: 184113 - protein, 313 aa, Zea Mays
MEVAATSPWPEEPLLRPPSPQPNLRADAASSGDPASPPPSAVRPSRLAALIGRAAGRRGPSMLVRETAALQLQRRRADWAHSRPVLALDIAWNVAFAAAAAAVLSSSAEESPVKPLRLWVVGYAAQCLVHVGLVCADTRRETRRARRSASDVESAGAGTDSSDADSEDDERAEGRSSYTGRCETMNTLISFLWWIIGFYWIFSGGEVLEHGAPRLYWLTIVFLAFDVFFAVFCVAVACFIGIALCCCLPCVIAILYALAGQEGASDADISVLLRYRYSDPSEDGEKGVDEGLMIPILNNSGMSTRMLYLSIII

SEQ ID NO: 184114 - protein, 226 aa, Zea Mays
MEVAATSPWPEEPLLRPPSPQPNLRADAASSGDPASPPPSAVRPSRLAALIGRAAGRRGPSMLVRETAALQLQRRRADWAHSRPVLALDIAWNVAFAAAAAAVLSSSAEESPVKPLRLWVVGYAAQCLVHVGLVCADTRRETRRARRSASDVESAGAGTDSSDADSEDDERAEGRSSYTGRCETMNTLISFLWWIIGFYWIFSGGEVLEHGAPRLYWYATFIFVAS

SEQ ID NO: 184115 - protein, 408 aa, Zea Mays
MESLTLRASTAASPLQRRRLLPGRQRATYVRATASAGEPDLSVRVNGLQMPNPFVIGSGPPGTNYTVMKRAFDEGWGAVIAKTVSLDAEKVINVTPRYAKLRAEPNGAAMGRIIGWQNIELISDRPLETMLNEFKQLKKEYPDRILIGSIMEEYNKAAWHELIERVEESGVDALEINFSCPHGMPERKMGAAVGQDCDLLEEVCGWINEKATVPVWAKMTPNITDITQSGCEGVSAINTIMSVMGINLKTLRPEPCVEGYSTPGGYSARAVHPIALAKVMQIARMMKEEFADGQSLSAIGGVETGNDAAEFILLGADTVQVCTGVMIHGYPLVKKLCAELQDFMREHNFSSIEEFRGASLPYFTTHTDLVHRQQEAVRQRKAIKKGLQSDKEWTGDGFVKETESMVSN

SEQ ID NO: 184116 - protein, 111 aa, Zea Mays
MCTLGAHATTPGREPAAALSFSPPLSKVASAMTPKGGRVGDVGSKKPTPRAHPRYVPRRGSVLKGIVRGVLGLVFTLISAPANSGGHRVRPAPPPAPGEGGESDDGAEQGK

SEQ ID NO: 184117 - protein, 682 aa, Zea Mays
MSSSAAMEAIDELVQLSESMRQAASLLADDDPSDETASRRPSTFLNAVALGNVGAGKSAVLNSLIGHPVLPTGENGATRAPIVVDLARDPGLSSKSIVLQIDSKSQQVSASALRHSLQDRLSKGASSGSGRSRSDEIYLKLRTSTAPPLKLIDLPGIDQRVMDDSTISEYAGHNDALLIVVIPAMQAADVASSRALRLAKDIDPDGTRTIGVLSKIDQAAADAKTVSCVQSILSNKGAPRAAADIEWVALIGQSVSIASAQSGSVGSDNSLETAWRAEAETLKSILTGAPQSKLGRIALVDTIAKQIRKRMKVRLPNLLTGLQGKSQIVQDELARLGEQMVQSAEGTRAVALELCREFEDKFLAHITSGEGSGWKIVASFEGKFPDRIKQLPLDRHFDLNNVKRIVLEADGYQPYLISPEKGLRSLIKGVLEMAKEPSRLCVEEVHRVLLDIVNAAANATPGLGRYPPFKREVIAIASNALDAFKSDAKKMVVALVDMERAFVPPQHFIRLVQRRMERQRREDELKNNRSSKKGQDAELSKMNRASSPQTGSDEAGGNLKSMKDKSNKQDNDTKEGPNLQVAGPGGEITAGYLLKKSAKNNEWSKRWFVLNEKSGKLGYTKKQEERHFRGVIVLEECNLEEIEEEEISKSSKDSKKANGQEKGPSLVFKITNRVSYKTVLKG

SEQ ID NO: 184118 - protein, 256 aa, Zea Mays
MSAEQRNEYNNKRRQMRQRNKGQNVMPAISGDGDKKVNVDPDDDSDWLHRNETFQSNDYVATTDLLPPGSVHESVGTIGESGIGVREYRLERLRLYNQTPKRKEAKIEYMRKRRVLQADTLNVVSIAMEDPTYTPEVVHPATEPSTVIACDWVIPEFVRTPFLPAQTQTEDVGSFDMSTEAIKRKHHVPRGERQAILARRNQQFQASIARNVTTLNGDTIGDANNNAQCSVPCQAATLPTNGSEGITEQASGVEHT

SEQ ID NO: 184119 - protein, 185 aa, Zea Mays
MAPDLAMAFMIWKPHNLHCRFGKHDLGTAITTTIPQMSRPPTTRTPRFGNAPFGTIALDLAIVCMIFVADLESARSTTLIWKVPCQTIPAQIPQIVHPPSLKRSQLPSCSNLPTTTEILRSHSSRNPNQCRLTATTRPVDFISPEVCVPDVNYMLLIVVRLRTLSSLIWQLVCPRVRCSCKEKSE

SEQ ID NO: 184120 - protein, 71 aa, Zea Mays
MIFVADLESARSTTLIWKVPCQTIPAQIPQIVHPPSLKRSQLPSCSNLPTTTEILRSHSSSVRCSCKEKSE

SEQ ID NO: 184121 - protein, 379 aa, Zea Mays
MAAAALLRRIPAARAPATAFMAARPVSDSTAALTIETSVPFTSHLVDPPSRDVTTTPAELVTFFRDMSLMRRMEIAADSLYKAKLIRGFCHLYDGQEAVAVGMEAAITRSDSIITAYRDHCTYLARGGDLVSAFSELMGREAGCSRGKGGSMHFYKKDANFYGGHGIVGAQVPLGCGLAFAQKYKKEETATFALYGDGAANQGQLFEALNISALWKLPAILVCENNHYGMGTAEWRAAKSPAYYKRGDYVPGLKVDGMDVLAVKQACKFAKDHAVANGPIVLEMDTYRYHGHSMSDPGSTYRTRDEISGVRQERDPIERVRKLLLAHDLATAAELKDMEKEIRKQVDDAIAKAKESSMPDTSELFTNVYKKGFNVECLI

SEQ ID NO: 184122 - protein, 305 aa, Zea Mays
MFFVEISDDEDDDTLGKEVANIENEKLSQTVNNPSDKPGAPRCRLRSDHRKEKSLGLLTQNFVKLFLTMEQVDTISLDEAAKLLLGEGHEETNMRTKVRRLYDIANVLSSLNLIEKIQQGDSRKPAFRWLGRATTPDTENGVTVVVPPPGKTKSNKRAFGTELTNIDMHRSNLDSKVQKKAKLAKSGGDVLINCKLDSGGDVLINCKLDVRNRLGQGKQSGIVYGPFHPAGARKHELAGGNNPGQREMAEDWKSLSAPFRPQYKNQALSDLFAHYVDAWKTWYSEFAQGSNIMQQHFGHFGNHFL

SEQ ID NO: 184123 - protein, 449 aa, Zea Mays
MVAASSTVVEVAVAAAAAAASALPQEQQAQPRPRPMHAGGANGRHHAYSRKDKSLGLLCSNFVVLYNREDVESVGLDEAAKRLGVERRRIYDIVNVLESVGILSRKAKNRYTWIGFGGIPMALLELKERALRDKSGLASQQTEQQSAATISDDEDDDTLGKEVANIENEKLSQTVNNPSDKPGAPRCRLRSDHRKEKSLGLLTQNFVKLFLTMEQVDTISLDEAAKLLLGEGHEETNMRTKVRRLYDIANVLSSLNLIEKIQQGDSRKPAFRWLGRATTPDTENGVTVVVPPPGKTKSNKRAFGTELTNIDMHRSNLDSKVQKKAKLAKSGGDVLINCKLDSGGDVLINCKLDVRNRLGQGKQSGIVYGPFHPAGARKHELAGGNNPGQREMAEDWKSLSAPFRPQYKNQALSDLFAHYVDAWKTWYSEFAQGSNIMQQHFGHFGNHFL

SEQ ID NO: 184124 - protein, 486 aa, Zea Mays
MVAASSTVVEVAVAAAAAAASALPQEQQAQPRPRPMHAGGANGRHHAYSRKDKSLGLLCSNFVVLYNREDVESVGLDEAAKRLGVERRRIYDIVNVLESVGKILSRKAKNRYTWIGFGGIPMALLELKERALRDKSGLASQQTEQQSAATISDDEDDDTLGKEVANIENEKLSQTVNNPSDKPGAPRCRLRSDHRKEKSLGLLTQNFVKLFLTMEQVDTISLDEAAKLLLGEGHEETNMRTKVRRLYDIANVLSSLNLIEKIQQGDSRKPAFRWLGRATTPDTENGVTVVVPPPGKTKSNKRAFGTELTNIDMHRSNLDSKVQKKAKLAKSGGDVLINCKLDSGGDVLINCKLDVRNRLGQGKQSGIVYGPFHPAGARKHELAGGNNPGQREMAEDWKSLSAPFRPQYKNQALSDLFAHYVDAWKTWYSEFAQGSNIMQQHFGHFEMLQNRESLEAWPVDVCTQIMQSQLIPSSCFNLTVKTIMVA

SEQ ID NO: 184125 - protein, 235 aa, Zea Mays
MEVDTISLDEAAKLLLGEGHEETNMRTKVRRLYDIANVLSSLNLIEKIQQGDSRKPAFRWLGRATTPDTENGVTVVVPPPGKTKSNKRAFGTELTNIDMHRSNLDSKVQKKAKLAKSGGDVLINCKLDSGGDVLINCKLDVRNRLGQGKQSGIVYGPFHPAGARKHELAGGNNPGQREMAEDWKSLSAPFRPQYKNQALSDLFAHYVDAWKTWYSEFAQGSNIMQQHFGHFDATK

SEQ ID NO: 184126 - protein, 453 aa, Zea Mays
MVAASSTVVEVAVAAAAAAASALPQEQQAQPRPRPMHAGGANGRHHAYSRKDKSLGLLCSNFVVLYNREDVESVGLDEAAKRLGVERRRIYDIVNVLESVGKILSRKAKNRYTWIGFGGIPMALLELKERALRDKSGLASQQTEQQSAATISDDEDDDTLGKEVANIENEKLSQTVNNPSDKPGAPRCRLRSDHRKEKSLGLLTQNFVKLFLTMEQVDTISLDEAAKLLLGEGHEETNMRTKVRRLYDIANVLSSLNLIEKIQQGDSRKPAFRWLGRATTPDTENGVTVVVPPPGKTKSNKRAFGTELTNIDMHRSNLDSKVQKKAKLAKSGGDVLINCKLDSGGDVLINCKLDVRNRLGQGKQSGIVYGPFHPAGARKHELAGGNNPGQREMAEDWKSLSAPFRPQYKNQALSDLFAHYVDAWKTWYSEFAQGSNIMQQHFGHFGKASRPGL

SEQ ID NO: 184127 - protein, 250 aa, Zea Mays
MYRSGSASDGRYPAASLGSNSVPSATRRSRLPVSRSSPPDVSPSVTKTYSPSSIRNKKLSPPSYRKARQANNCNYKVEIAVAPDATPIKVVTEEKLLEGGNVRGRLEARRALFQGSQDRSAKLAGYKAGSRVVPYEGGGNLEEISEVEGRSERYAVQKDESLSEIRTQLLQIENQQSSLLDLLQEGCQAESLMQRRAAFRAQNSGEGTMVVGLPQGFLSQTQQTAQMGAELLTSGRGRGLGFRVGLSQTH

SEQ ID NO: 184128 - protein, 148 aa, Zea Mays
MMILLAARAANLRQIDLALFFLRAHLGQARHLQLELLPNKQEFHYYMCHLKLLCQNIMAKVSVYWDLFFHLQMIFLKEVDSFAIARDSEIHEATRRILSVILRQIDGFEQDRRVVVIAATNRKEDLDPALIRSANSCGNSCTVCQAFD

SEQ ID NO: 184129 - protein, 338 aa, Zea Mays
MPSNCNVSHLIVDLVTHIGLEAEQHGGGSEVLVRAWDSPAARQITLNPPKKTSTGDHNEDGLCVLIFEPLIGSDYSEIEFIKPGSFSLKELEALISALKIASEKGSSGKNTPRKGNGQRSKHLPSLEKVVSDLEAMGVRVYGFDETSSVPMDGTVIWENLAGYEPQKREIEDTVLLALQSPEVYDDIARGTRCKFETNRPRAVLFEGPPGTGKTSSARVIAKQAGIPLLYVPLEVVMSKYYGESERLLGSVFSLANDLPEGGIIFLDEVDSFAIARDSEIHEATRRILSVILRQIDGFEQDRRVVVIAATNRKEDLDPALIRSANSCGNSCTVCQAFD

SEQ ID NO: 184130 - protein, 297 aa, Zea Mays
MGVRVYGFDETSSVPMDGTVIWENLAGYEPQKREIEDTVLLALQSPEVYDDIARGTRCKFETNRPRAVLFEGPPGTGKTSSARVIAKQAGIPLLYVPLEVVMSKYYGESERLLGSVFSLANDLPEGGIIFLDEVDSFAIARDSEIHEATRRILSVILRQIDGFEQDRRVVVIAATNRKEDLDPALISRFDSIICFGLPDQQTRVEIAAQYAKHLTRSELVQFSLATQEMSGRDIRDVCQQAERHWASKLIRGQVPKDEKGEPSLPPIDEYLSCAEQRRKSLPGRTSQTSRSPALKLA

SEQ ID NO: 184131 - protein, 205 aa, Zea Mays
MAMLLRRRLPLLRLLRPLHTGSMASISSSSTPPPPPPPPLQKPHAAFVGPRSRRLRFPNAAPVESGRGAGKSSPAAAYLAMGAAAALASLPVAYADSNEQGAVDTVASADPAVGEDLARKERKRILELVQSRGMQRGSYPKFDVAVKGQKVVVKFNMPSNCNVSHLIVDLVTHIGLEAEQHGGGSEVLVRAWDRKLNSSSLGVLV

SEQ ID NO: 184132 - protein, 206 aa, Zea Mays
MAMLLRRRLPLLRLLRPLHTGSMASISSSSTPPPPPPPPLQKPHAAFVGPRSRRLRFPNAAPVESGRGAGKSSPAAAYLAMGAAAALASLPVAYADSNEQGAVDTVASADPAVGEDLARKERKRILELVQSRGMQRGSYPKFDVAVKGQKVVVKFNMPSNCNVSHLIVDLVTHIGLEAEQHGGGSEVLVRAWDSCTSNHTEPSQED

SEQ ID NO: 184133 - protein, 427 aa, Zea Mays
MAMLLRRRLPLLRLLRPLHTGSMASISSSSTPPPPPPPPLQKPHAAFVGPRSRRLRFPNAAPVESGRGAGKSSPAAAYLAMGAAAALASLPVAYADSNEQGAVDTVASADPAVGEDLARKERKRILELVQSRGMQRGSYPKFDVAVKGQKVVVKFNMPSNCNVSHLIVDLVTHIGLEAEQHGGGSEVLVRAWDSPAARQITLNPPKKTSTGDHNEDGLCVLIFEPLIGSDYSEIEFIKPGSFSLKELEALISALKIASEKGSSGKNTPRKGNGQRSKHLPSLEKVVSDLEAMGVRVYGFDETSSVPMDGTVIWENLAGYEPQKREIEDTVLLALQSPEVYDDIARGTRCKFETNRPRAVLFEGPPGTGKTSSARVIAKQAGIPLLYVPLEVVMSKYYGESERLLGSVFSLANDLPEGGGFFCYCSRQ

SEQ ID NO: 184134 - protein, 345 aa, Zea Mays
MAMLLRRRLPLLRLLRPLHTGSMASISSSSTPPPPPPPPLQKPHAAFVGPRSRRLRFPNAAPVESGRGAGKSSPAAAYLAMGAAAALASLPVAYADSNEQGAVDTVASADPAVGEDLARKERKRILELVQSRGMQRGSYPKFDVAVKGQKVVVKFNMPSNCNVSHLIVDLVTHIGLEAEQHGGGSEVLVRAWDSPAARQITLNPPKKTSTGDHNEDGLCVLIFEPLIGSDYSEIEFIKPGSFSLKELEALISALKIASEKGSSGKNTPRKGNGQRSKHLPSLEKVVSDLEAMGVRVYGFDETSSVPMDGTVIWENLAGYEPQKRHVPPVCYSFPFLNQLFNVPLG

SEQ ID NO: 184135 - protein, 534 aa, Zea Mays
MAMLLRRRLPLLRLLRPLHTGSMASISSSSTPPPPPPPPLQKPHAAFVGPRSRRLRFPNAAPVESGRGAGKSSPAAAYLAMGAAAALASLPVAYADSNEQGAVDTVASADPAVGEDLARKERKRILELVQSRGMQRGSYPKFDVAVKGQKVVVKFNMPSNCNVSHLIVDLVTHIGLEAEQHGGGSEVLVRAWDSPAARQITLNPPKKTSTGDHNEDGLCVLIFEPLIGSDYSEIEFIKPGSFSLKELEALISALKIASEKGSSGKNTPRKGNGQRSKHLPSLEKVVSDLEAMGVRVYGFDETSSVPMDGTVIWENLAGYEPQKREIEDTVLLALQSPEVYDDIARGTRCKFETNRPRAVLFEGPPGTGKTSSARVIAKQAGIPLLYVPLEVVMSKYYGESERLLGSVFSLANDLPEGGIIFLDEVDSFAIARDSEIHEATRRILSVILRQIDGFEQDRRVVVIAATNRKEDLDPALISRFDSIICFGLPDQQTRVEIAAQYAKHLTRSELVQFSLATQDFYRLVYPYSWLASED

SEQ ID NO: 184136 - protein, 255 aa, Zea Mays
MAMLLRRRLPLLRLLRPLHTGSMASISSSSTPPPPPPPPLQKPHAAFVGPRSRRLRFPNAAPVESGRGAGKSSPAAAYLAMGAAAALASLPVAYADSNEQGAVDTVASADPAVGEDLARKERKRILELVQSRGMQRGSYPKFDVAVKGQKVVVKFNMPSNCNVSHLIVDLVTHIGLEAEQHGGGSEVLVRAWDSPAARQITLNPPKKTSTGDHNEDGLCVLIFEPLIGSDYSVSYFRPFIDDSEKKFILLFPFIS

SEQ ID NO: 184137 - protein, 51 aa, Zea Mays
MSAPYSRSAVIIDYRWACTFGDHLASVSSSQGLLFGLLLRLHTVEWSELGA

SEQ ID NO: 184138 - protein, 284 aa, Zea Mays
MAGGGGGGAAPKHDDFTPHPVKDQLPGVSYCITSPPPWPEAVLLGFQHYLVMLGTTVIIPTALVPQMGGNNEDKAVVIQTLLFVAGINTLLQSFFGTMLPAVIGGSYTFVLPTISIILAGRYANEPNPHIKFLRIMRGTQGALIVASALQIIVGFSGLWRNVARYLSPLSAAPLVALVGFGLYELGFPSVAKCVEIGLPQLILLVIFTMYLPHAVHMLKSIFDRFAVLFTIPIVWLYAYLLTVGGAYRNAPPKTQFHCRTDRSGLIGGAPCGVLQLLMRVKLSR

SEQ ID NO: 184139 - protein, 549 aa, Zea Mays
MASSASRFIKCVTVGDGAVGKTCMLICYTSNKFPTDYIPTVFDNFSANVVVDGTTVNLGLWDTAGQEDYNRLRPLSYRGADVFVLAFSLVSRASYENIMKKWIPELQHYAPGVPVVLAGTKLDLREDKHYLMDHPGLVPVTTAQGEELRRQIGAMYYIECSSKTQQNVKAVFDAAIKVVIQPPTKIREKKKKKSRKGCSMMQTCVRDWRRITPRLPPSPRKNSARPKKADESLLPVFPWVLAAINLRDESKIVSVVSPSHKSNHPLPELQSSPELQLESIQFQSLKHTTAVLVVIISPGCGAGRLVNWAILSRDDQPRAVSPPDQQQAADSPVSRTPSNPPPPPRRRSSLSSQPPPIEPLAPAPGGGMEAGGEEFAIGVVLSAKTTLGEEFEGQIVAFDRPSNLLVIQEGVGRAESGERRNVRVLKANYIREFSVLSKGDDPLDPAGCMLDLNSIYAREDAALRQAEIEAEKIGVGVTPEAQNIFDALSKTLPVQWDKTDIVVMKEVRVRSPYLPENVSGGTAAANERVKKVIDFERKRLHSRAPGQFS

SEQ ID NO: 184140 - protein, 213 aa, Zea Mays
MLTPWSTIPRLSLRSAAPTPSTLPPSWPSAQSATLIDAAINSGNSGGPAFNDRGKCVGIAFQSLKHEDAENIGYVIPTPVITHFIEDYKKSGEYTGFPILGVEWQKMENPDLRKAMGMKPDQKGVRVRRVEPTAPESGCLRPSDIILSFDGVDIANDGTVPFRHGERIGFSYLVSQKYTGEKALVKVLRDSKVHEFKISYLCSISSIRVWKRL

SEQ ID NO: 184141 - protein, 421 aa, Zea Mays
MDDPSSASNKHKRKRGRKPKASPPFPDRSSPSPSAAPAPAGRRGRKPRRHEAPADADATRPPSPPRRGEPKPVANGGDVVAVAESGPASWDEVVRVVPCMDAVVKVFCVHTEPNFSLPWQRKRQYSSSSSGFIIGGRRVLTNAHSVEHYTQVKLKKRGSDTKYLATVLAIGTECDIALLTVNDDEFWEGVSPVEFGTLPALQDAVTVVGYPIGGDTISVTSGVVSRIEILSYVHGSTELLGLQIDAAINSGNSGGPAFNDRGKCVGIAFQSLKHEDAENIGYVIPTPVITHFIEDYKKSGEYTGFPILGVEWQKMENPDLRKAMGMKPDQKGVRVRRVEPTAPESGCLRPSDIILSFDGVDIANDGTVPFRHGERIGFSYLVSQKYTGEKALVKVLRDSKVHEFKISYLCSISSIRVWKRL

SEQ ID NO: 184142 - protein, 549 aa, Zea Mays
MDDPSSASNKHKRKRGRKPKASPPFPDRSSPSPSAAPAPAGRRGRKPRRHEAPADADATRPPSPPRRGEPKPVANGGDVVAVAESGPASWDEVVRVVPCMDAVVKVFCVHTEPNFSLPWQRKRQYSSSSSGFIIGGRRVLTNAHSVEHYTQVKLKKRGSDTKYLATVLAIGTECDIALLTVNDDEFWEGVSPVEFGTLPALQDAVTVVGYPIGGDTISVTSGVVSRIEILSYVHGSTELLGLQIDAAINSGNSGGPAFNDRGKCVGIAFQSLKHEDAENIGYVIPTPVITHFIEDYKKSGEYTGFPILGVEWQKMENPDLRKAMGMKPDQKGVRVRRVEPTAPESGCLRPSDIILSFDGVDIANDGTVPFRHGERIGFSYLVSQKYTGEKALVKVLRDSKVHEFKIRLATHKRLVAAHVKGRPPSYYIVAGFVFAAISVPYLRSEYGKDYEYDAPVKLLVKHLHAMAESPDEQLVVVSQVLVSDINIGYEEIVNTQVLAFNGQPVKNLKNLATMVENCKDEFLKFDLEYDQDILTTHCIPSATSDDLKA

SEQ ID NO: 184143 - protein, 72 aa, Zea Mays
MFICSMLNILLVGSSFDFQISPMRMHQIFPNAGGFGFMETSCSSLLSTAPEDQPALSIYGPMQSDIRYAHTL

SEQ ID NO: 184144 - protein, 625 aa, Zea Mays
MDDNAQKVKENYLQKLNALESQVHELKKKQEAQQQLLRQKQRSDEAAKRLQEDIQRIKSQKVQLQQKIKQESEQFRSWKAAREKEVLQLKKEGRRNEYEMHKLLALNQRQKMVLQRKTEEAAAATKRLKELLEAKKSSRETYGSANGSGMQALIRAIDDELEVTVRAHELRSYYERQMQERAAISKEIAKLKEESKHKISDCPQAMSPSARSSRISALENMLSSSSSAMVSMASQLSEAEERERVFNGKGRWYHVRSLPEAKNIMNYLFQLASSARSQVLDKEVICNEKEHTITELKEKVVVLNGGIRQLETQVRDLRSQNTQLFTALNNAKKSARSNGTGFAGRKSVRSSQHFGYSKDNFNWVDDMDISDSEHSDELENMSDGSDSDWVQSTRKAKKHQRRVSSHSNPNLDCQNTQGSAEPEKPSDEKCILPKYISSDGCSCSKSSSCKTNKCECRGSGAQCGAGCGCKDSKCSNRDSSTIEKANQGAMLLQTAFSEKEAQDAKPRKPLTNIGNNVVNQTAETKKPRKNRRKSAIQLVPGPLLPSEPVATEAAPRDIANIPLKLPRAMSSVTPAESNPPLTDRNAAKPDESVSTGSKNSTGAAATRAPSQLRKNATTEKENQLR

SEQ ID NO: 184145 - protein, 1141 aa, Zea Mays
MGTNYSGEENCGGIIPQVMDTIFRKVDTSKDGSEFLIRVSFIEIFKEDVFDLLDANQAAVRLDAGSMAKASAPGRVPIQIRETATGGIILAGVTEAEVKSKEEMASYLTRGSSSRATASTNMNMQSSRSHAIFTICVEQKRTSGTSDKSASSDYDILSSKFHLVDLAGSERAKRTGADGHRLKEGIHINKGLLALGNVISALGDEKKRKEGAFVPYRDSKLTRLLQDSLGGNSKTVMIACISPADINAEETINTLKYANRARNIQNKAVVNRDPATAEMQKLRSQLEQLQTELLFSRSGSAALEELQLLQKKVSLLELKTSELNNELKEKELSCEQLAERAQAAQLERDQLMLKIESVRNGKSLDDIENIDNDQDMDLLKGYISKIQQLESALMRQNFSNACRHGLHDQLAMDQDIFLNELGSGCEVETTDASNEVDEEEKEREHSFMQDQLDKELQELDKRLQQKEAEMKQFAKSDTSVLKQHYEKKLTDLEQEKKALQKEIENLRHALTNISSSMDDNAQKVKENYLQKLNALESQVHELKKKQEAQQQLLRQKQRSDEAAKRLQEDIQRIKSQKVQLQQKIKQESEQFRSWKAAREKEVLQLKKEGRRNEYEMHKLLALNQRQKMVLQRKTEEAAAATKRLKELLEAKKSSRETYGSANGSGMQALIRAIDDELEVTVRAHELRSYYERQMQERAAISKEIAKLKEESKHKISDCPQAMSPSARSSRISALENMLSSSSSAMVSMASQLSEAEERERVFNGKGRWYHVRSLPEAKNIMNYLFQLASSARSQVLDKEVICNEKEHTITELKEKVVVLNGGIRQLETQVRDLRSQNTQLFTALNNAKKSARSNGTGFAGRKSVRSSQHFGYSKDNFNWVDDMDISDSEHSDELENMSDGSDSDWVQSTRKAKKHQRRVSSHSNPNLDCQNTQGSAEPEKPSDEKCILPKYISSDGCSCSKSSSCKTNKCECRGSGAQCGAGCGCKDSKCSNRDSSTIEKANQGAMLLQTAFSEKEAQDAKPRKPLTNIGNNVVNQTAETKKPRKNRRKSAIQLVPGPLLPSEPVATEAAPRDIANIPLKLPRAMSSVTPAESNPPLTDRNAAKPDESVSTGSKNSTGAAATRAPSQLRKNATTEKENQLR

SEQ ID NO: 184146 - protein, 846 aa, Zea Mays
MSQSVANPARSAGLRVPMETTEAAAAHPQKDSVKVAVNIRPLITVELQDGCTDCVTVTQGEPQVQIGPHVFTFDHVYGSSGPSSSLIFEQCVHPLIDALFSGYNATVLAYGQTGSGKTYTMGTNYSGEENCGGIIPQVMDTIFRKVDTSKDGSEFLIRVSFIEIFKEDVFDLLDANQAAVRLDAGSMAKASAPGRVPIQIRETATGGIILAGVTEAEVKSKEEMASYLTRGSSSRATASTNMNMQSSRSHAIFTICVEQKRTSGTSDKSASSDYDILSSKFHLVDLAGSERAKRTGADGHRLKEGIHINKGLLALGNVISALGDEKKRKEGAFVPYRDSKLTRLLQDSLGGNSKTVMIACISPADINAEETINTLKYANRARNIQNKAVVNRDPATAEMQKLRSQLEQLQTELLFSRSGSAALEELQLLQKKVSLLELKTSELNNELKEKELSCEQLAERAQAAQLERDQLMLKIESVRNGKSLDDIENIDNDQDMDLLKGYISKIQQLESALMRQNFSNACRHGLHDQLAMDQDIFLNELGSGCEVETTDASNEVDEEEKEREHSFMQDQLDKELQELDKRLQQKEAEMKQFAKSDTSVLKQHYEKKLTDLEQEKKALQKEIENLRHALTNISSSMDDNAQKVKENYLQKLNALESQVHELKKKQEAQQQLLRQKQRSDEAAKRLQEDIQRIKSQKVQLQQKIKQESEQFRSWKAAREKEVLQLKKEGRRNEYEMHKLLALNQRQKMVLQRKTEEAAAATKRLKELLEAKKSSRETYGSANGSGMQALIRAIDDELEVTVRAHELRSYYERQMQERAAISKEIAKLKEESKHKIRSRGAGACIQW

SEQ ID NO: 184147 - protein, 1261 aa, Zea Mays
MSQSVANPARSAGLRVPMETTEAAAAHPQKDSVKVAVNIRPLITVELQDGCTDCVTVTQGEPQVQIGPHVFTFDHVYGSSGPSSSLIFEQCVHPLIDALFSGYNATVLAYGQTGSGKTYTMGTNYSGEENCGGIIPQVMDTIFRKVDTSKDGSEFLIRVSFIEIFKEDVFDLLDANQAAVRLDAGSMAKASAPGRVPIQIRETATGGIILAGVTEAEVKSKEEMASYLTRGSSSRATASTNMNMQSSRSHAIFTICVEQKRTSGTSDKSASSDYDILSSKFHLVDLAGSERAKRTGADGHRLKEGIHINKGLLALGNVISALGDEKKRKEGAFVPYRDSKLTRLLQDSLGGNSKTVMIACISPADINAEETINTLKYANRARNIQNKAVVNRDPATAEMQKLRSQLEQLQTELLFSRSGSAALEELQLLQKKVSLLELKTSELNNELKEKELSCEQLAERAQAAQLERDQLMLKIESVRNGKSLDDIENIDNDQDMDLLKGYISKIQQLESALMRQNFSNACRHGLHDQLAMDQDIFLNELGSGCEVETTDASNEVDEEEKEREHSFMQDQLDKELQELDKRLQQKEAEMKQFAKSDTSVLKQHYEKKLTDLEQEKKALQKEIENLRHALTNISSSMDDNAQKVKENYLQKLNALESQVHELKKKQEAQQQLLRQKQRSDEAAKRLQEDIQRIKSQKVQLQQKIKQESEQFRSWKAAREKEVLQLKKEGRRNEYEMHKLLALNQRQKMVLQRKTEEAAAATKRLKELLEAKKSSRETYGSANGSGMQALIRAIDDELEVTVRAHELRSYYERQMQERAAISKEIAKLKEESKHKISDCPQAMSPSARSSRISALENMLSSSSSAMVSMASQLSEAEERERVFNGKGRWYHVRSLPEAKNIMNYLFQLASSARSQVLDKEVICNEKEHTITELKEKVVVLNGGIRQLETQVRDLRSQNTQLFTALNNAKKSARSNGTGFAGRKSVRSSQHFGYSKDNFNWVDDMDISDSEHSDELENMSDGSDSDWVQSTRKAKKHQRRVSSHSNPNLDCQNTQGSAEPEKPSDEKCILPKYISSDGCSCSKSSSCKTNKCECRGSGAQCGAGCGCKDSKCSNRDSSTIEKANQGAMLLQTAFSEKEAQDAKPRKPLTNIGNNVVNQTAETKKPRKNRRKSAIQLVPGPLLPSEPVATEAAPRDIANIPLKLPRAMSSVTPAESNPPLTDRNAAKPDESVSTGSKNSTGAAATRAPSQLRKNATTEKENQLR

SEQ ID NO: 184148 - protein, 164 aa, Zea Mays
MDTDHGGASAAGMDEAEAAFFARGGRRCCCFPWPAAASSSSSHQRVGAGGRPAVEDLHPAVRPQRPARAAAPPPLRRPQAQLRRAQLRAQLRRGPRRQPRGRLHRLPRLLRALRRTACLRQVVHGPRRPRRAAALRPAAAAAPRRSRPRLTATSVVGPEQGKER

SEQ ID NO: 184149 - protein, 769 aa, Zea Mays
MSRPLSSQYAALLSAAARTEPHAAGALHCVILRTLPHPPPTHLLNHLLTAYGKAGRHARARRVFDATPHPNLFTYNALLSTLAHARLLDDMDSLFASMAQRDTVSYNAVIAGFSGGGAHARAVRLYHTLLRAGSSVRPSRITMSAMVMAASALGDRALGRQFHCQILRLGFGVNAFVGSPLVGMYAKMGLIGDAKRVFDEMDGKNVVMYNTMITGLLRCKMVEEARRLFEVMTDRDCITWTTMVTGFTQNGLESQALNFFRRMRFQGIAIDQYTFGSILTACGALSALEQGKQIHAYIIRTHYDDNVFVGSALVDMYSKCRSIKPAETAFRRMSCKNIISWTALIVGYGQNGCSEEAVRVFSEMQRDGIDPDDFTLGSVISSCANLASLEEGAQFHCLALVSGLMHYITVSNALVTLYGKCGSIEDAHRLFDEMLFHDQVSWTALVTGYAQFGRAKETIDLFEKMLAKDVKPDGVTFIGVLSACSRAGFVEKGCSYFHSMQKDHGIVPIDDHYTCMIDLYSRSGRLKEAEEFIKQMPMHPDAIGWGTLLSACRLRGDMEIGQWAAENLLEIDPQNPASYVLLCSMHATKGNWNQVAQLRRGMRDRQVKKEPGCSWIKYKNKVHIFSADDQSHPFSKGIYEKLEWLNSKMLEEGYKPDVSSVLHDVADTDKVHMVSHHSEKLAIAFGLMFVPHEMPIRIVKNLRVCVDCHNATKLISKITGRDILVRDAVRFHKFSNGVCSCGDFWCCIGGVQYIRDCCQCCSCCNREMQ

SEQ ID NO: 184150 - protein, 1033 aa, Zea Mays
MKNFLRKLHIGEGSSDGASTPPPPPSRKGGTGTGGGVGGVHHHQPHHDQRHQTSAVSSWLDSVPTRPPPPIPVEAEVPTSSSSASSLGVGAQDRKARQSGGVERRRSQQEERERRRSQEEVTLRERRRSQEEETLRELRRSREEEMEQERRRSQEQDEVEERVIRESSEAEERKREREKEEDDLEAYQIQLVLEMSARDNPEEMEMEVAKQLSLGFCPPQRSPAEVLAVRYRNFNALGYDDKILDGFYDLFYVGNGPAAVTMPSFAELRVQPFSHKVDWEAVLVHRGEDPELMKLQQEALIMNHELHSRTSESVGNALVKGLANLVARHMGGVFDPERMSAKYQNMLSYLRSDIGSVIVPLGQLKIGLARHRALLFKVLADGLDVPCRLLKGKRYTGSDDGALNIVKFKDGREFIVDLVSDPGTLIPSDVSVLSTELDRNFVSDNQHFGQDDNTNLLGSSLSGVSSSAYGSFEYELLDRRSTSSNVGPSDTDGPTTNLTSNQQNMSSNSFDKLSVSTFTSENRPVSKESTNPDYIIVGKNKEKYTAAVDSSSSSPSTPDMGSAPAVRRMKVKDISEYMINAAKENPQLVQKIHEVLLENGVMAPPDLFSEDSMEEPKDLIVYDTTLFQSKDEMKRRMNELGSREYTDRGHDPLLPHHPGHELQPKVAPHRAPLESLKPVEGLGIYHPHDIRDIASPFVSQYEPSAPPQEASSQLTKQLPVTAAAVATAAVVASSMVAAAALSTNDVNFDVPVAAAATVTAAAVVATTAAVSKQYEHSDPGNQLFSVPSTSQGNKSVEKAGGDLWDKHHVETDHGQDNCLDQEVPQEAERTSDKSNKSSGTEDVKSDLALDNVAEFEIQWEEISIGERIGLGSFGEVYRGEWHGTEVAVKKFLQQDISSDALEEFRAEVRIMKRLRHPNVVLFMGAITRVPNLSIVTEFLPRGSLFRLIHRPNNQLDERKRLRMALDVARGMNYLHNCSPVIVHRDLKSPNLLVDKNWVVKVCDFGLSRMKNNTFLSSRSTAGTVLINLLYGAP

SEQ ID NO: 184151 - protein, 922 aa, Zea Mays
MKNFLRKLHIGEGSSDGASTPPPPPSRKGGTGTGGGVGGVHHHQPHHDQRHQTSAVSSWLDSVPTRPPPPIPVEAEVPTSSSSASSLGVGAQDRKARQSGGVERRRSQQEERERRRSQEEVTLRERRRSQEEETLRELRRSREEEMEQERRRSQEQDEVEERVIRESSEAEERKREREKEEDDLEAYQIQLVLEMSARDNPEEMEMEVAKQLSLGFCPPQRSPAEVLAVRYRNFNALGYDDKILDGFYDLFYVGNGPAAVTMPSFAELRVQPFSHKVDWEAVLVHRGEDPELMKLQQEALIMNHELHSRTSESVGNALVKGLANLVARHMGGVFDPERMSAKYQNMLSYLRSDIGSVIVPLGQLKIGLARHRALLFKVLADGLDVPCRLLKGKRYTGSDDGALNIVKFKDGREFIVDLVSDPGTLIPSDVSVLSTELDRNFVSDNQHFGQDDNTNLLGSSLSGVSSSAYGSFEYELLDRRSTSSNVGPSDTDGPTTNLTSNQQNMSSNSFDKLSVSTFTSENRPVSKESTNPDYIIVGKNKEKYTAAVDSSSSSPSTPDMGSAPAVRRMKVKDISEYMINAAKENPQLVQKIHEVLLENGVMAPPDLFSEDSMEEPKDLIVYDTTLFQSKDEMKRRMNELGSREYTDRGHDPLLPHHPGHELQPKVAPHRAPLESLKPVEGLGIYHPHDIRDIASPFVSQYEPSAPPQEASSQLTKQLPVTAAAVATAAVVASSMVAAAALSTNDVNFDVPVAAAATVTAAAVVATTAAVSKQYEHSDPGNQLFSVPSTSQGNKSVEKAGGDLWDKHHVETDHGQDNCLDQEVPQEAERTSDKSNKSSGTEDVKSDLALDNVAEFEIQWEEISIGERIGLGSFGEVYRGEWHGTEVAVKKFLQQDISSDALEEFRAERQFVSFDSPTQQPVR

SEQ ID NO: 184152 - protein, 887 aa, Zea Mays
MKNFLRKLHIGEGSSDGASTPPPPPSRKGGTGTGGGVGGVHHHQPHHDQRHQTSAVSSWLDSVPTRPPPPIPVEAEVPTSSSSASSLGVGAQDRKARQSGGVERRRSQQEERERRRSQEEVTLRERRRSQEEETLRELRRSREEEMEQERRRSQEQDEVEERVIRESSEAEERKREREKEEDDLEAYQIQLVLEMSARDNPEEMEMEVAKQLSLGFCPPQRSPAEVLAVRYRVLADGLDVPCRLLKGKRYTGSDDGALNIVKFKDGREFIVDLVSDPGTLIPSDVSVLSTELDRNFVSDNQHFGQDDNTNLLGSSLSGVSSSAYGSFEYELLDRRSTSSNVGPSDTDGPTTNLTSNQQNMSSNSFDKLSVSTFTSENRPVSKESTNPDYIIVGKNKEKYTAAVDSSSSSPSTPDMGSAPAVRRMKVKDISEYMINAAKENPQLVQKIHEVLLENGVMAPPDLFSEDSMEEPKDLIVYDTTLFQSKDEMKRRMNELGSREYTDRGHDPLLPHHPGHELQPKVAPHRAPLESLKPVEGLGIYHPHDIRDIASPFVSQYEPSAPPQEASSQLTKQLPVTAAAVATAAVVASSMVAAAALSTNDVNFDVPVAAAATVTAAAVVATTAAVSKQYEHSDPGNQLFSVPSTSQGNKSVEKAGGDLWDKHHVETDHGQDNCLDQEVPQEAERTSDKSNKSSGTEDVKSDLALDNVAEFEIQWEEISIGERIGLGSFGEVYRGEWHGTEVAVKKFLQQDISSDALEEFRAEVRIMKRLRHPNVVLFMGAITRVPNLSIVTEFLPRGSLFRLIHRPNNQLDERKRLRMALDVARGMNYLHNCSPVIVHRDLKSPNLLVDKNWVVKVCDFGLSRMKNNTFLSSRSTAGTVYPNCLKCV

SEQ ID NO: 184153 - protein, 974 aa, Zea Mays
MKNFLRKLHIGEGSSDGASTPPPPPSRKGGTGTGGGVGGVHHHQPHHDQRHQTSAVSSWLDSVPTRPPPPIPVEAEVPTSSSSASSLGVGAQDRKARQSGGVERRRSQQEERERRRSQEEVTLRERRRSQEEETLRELRRSREEEMEQERRRSQEQDEVEERVIRESSEAEERKREREKEEDDLEAYQIQLVLEMSARDNPEEMEMEVAKQLSLGFCPPQRSPAEVLAVRYRNFNALGYDDKILDGFYDLFYVGNGPAAVTMPSFAELRVQPFSHKVDWEAVLVHRGEDPELMKLQQEALIMNHELHSRTSESVGNALVKGLANLVARHMGGVFDPERMSAKYQNMLSYLRSDIGSVIVPLGQLKIGLARHRALLFKVLADGLDVPCRLLKGKRYTGSDDGALNIVKFKDGREFIVDLVSDPGTLIPSDVSVLSTELDRNFVSDNQHFGQDDNTNLLGSSLSGVSSSAYGSFEYELLDRRSTSSNVGPSDTDGPTTNLTSNQQNMSSNSFDKLSVSTFTSENRPVSKESTNPDYIIVGKNKEKYTAAVDSSSSSPSTPDMGSAPAVRRMKVKDISEYMINAAKENPQLVQKIHEVLLENGVMAPPDLFSEDSMEEPKDLIVYDTTLFQSKDEMKRRMNELGSREYTDRGHDPLLPHHPGHELQPKVAPHRAPLESLKPVEGLGIYHPHDIRDIASPFVSQYEPSAPPQEASSQLTKQLPVTAAAVATAAVVASSMVAAAALSTNDVNFDVPVAAAATVTAAAVVATTAAVSKQYEHSDPGNQLFSVPSTSQGNKSVEKAGGDLWDKHHVETDHGQDNCLDQEVPQEAERTSDKSNKSSGTEDVKSDLALDNVAEFEIQWEEISIGERIGLGSFGEVYRGEWHGTEVAVKKFLQQDISSDALEEFRAEVRIMKRLRHPNVVLFMGAITRVPNLSIVTEFLPRGSLFRLIHRPNNQLDERKRLRMALDGSWYELSA

SEQ ID NO: 184154 - protein, 707 aa, Zea Mays
MPLAMTTKYWMDFMICFMLEMGQQQLLCPLLLSYESSHFHIKSIGKLCWSTEVLADGLDVPCRLLKGKRYTGSDDGALNIVKFKDGREFIVDLVSDPGTLIPSDVSVLSTELDRNFVSDNQHFGQDDNTNLLGSSLSGVSSSAYGSFEYELLDRRSTSSNVGPSDTDGPTTNLTSNQQNMSSNSFDKLSVSTFTSENRPVSKESTNPDYIIVGKNKEKYTAAVDSSSSSPSTPDMGSAPAVRRMKVKDISEYMINAAKENPQLVQKIHEVLLENGVMAPPDLFSEDSMEEPKDLIVYDTTLFQSKDEMKRRMNELGSREYTDRGHDPLLPHHPGHELQPKVAPHRAPLESLKPVEGLGIYHPHDIRDIASPFVSQYEPSAPPQEASSQLTKQLPVTAAAVATAAVVASSMVAAAALSTNDVNFDVPVAAAATVTAAAVVATTAAVSKQYEHSDPGNQLFSVPSTSQGNKSVEKAGGDLWDKHHVETDHGQDNCLDQEVPQEAERTSDKSNKSSGTEDVKSDLALDNVAEFEIQWEEISIGERIGLGSFGEVYRGEWHGTEVAVKKFLQQDISSDALEEFRAEVRIMKRLRHPNVVLFMGAITRVPNLSIVTEFLPRGSLFRLIHRPNNQLDERKRLRMALDVARGMNYLHNCSPVIVHRDLKSPNLLVDKNWVVKVCDFGLSRMKNNTFLSSRSTAGTVYPNCLKCV

SEQ ID NO: 184155 - protein, 528 aa, Zea Mays
MSSNSFDKLSVSTFTSENRPVSKESTNPDYIIVGKNKEKYTAAVDSSSSSPSTPDMGSAPAVRRMKVKDISEYMINAAKENPQLVQKIHEVLLENGVMAPPDLFSEDSMEEPKDLIVYDTTLFQSKDEMKRRMNELGSREYTDRGHDPLLPHHPGHELQPKVAPHRAPLESLKPVEGLGIYHPHDIRDIASPFVSQYEPSAPPQEASSQLTKQLPVTAAAVATAAVVASSMVAAAALSTNDVNFDVPVAAAATVTAAAVVATTAAVSKQYEHSDPGNQLFSVPSTSQGNKSVEKAGGDLWDKHHVETDHGQDNCLDQEVPQEAERTSDKSNKSSGTEDVKSDLALDNVAEFEIQWEEISIGERIGLGSFGEVYRGEWHGTEVAVKKFLQQDISSDALEEFRAEVRIMKRLRHPNVVLFMGAITRVPNLSIVTEFLPRGSLFRLIHRPNNQLDERKRLRMALDVARGMNYLHNCSPVIVHRDLKSPNLLVDKNWVVKVCDFGLSRMKNNTFLSSRSTAGTVYPNCLKCV

SEQ ID NO: 184156 - protein, 443 aa, Zea Mays
MDVIGGRGIITIKVDSNAGQRVYQLSIEAACRLTWPVDRLIVQVLDDSTDSVIKELVKGECERWATEEGINVKYETRKDRAGYKAGNLKEGMRHAYVRACEFVAMFDADFQPPPDFLVRTVPFLVHNPSLALVQTRWKFVNANDCLLTRMQEMSMDYHFKVEQEAGSSLCNFFGYNGTAGVWRTQAIVESGGWEDRTTAEDMDLALRAGLLGWEFVYVGSIKVKSELPSTLKAYRSQQHRWSCGPALLFKKMFWQILAAERVSVWKKWYMVYDFFIARRIVGTFYTFFFFSVLIPLNILLPEAQIPVWELIYIPIAITLLNSVGTPRSIHLVILWVLFENVMALHRFKAILIGFLEADRANEWIVTQKLGNLQKLKSIARLTGSYRFKDRFHFLEVFIGLFLLASACFDYLYRDDYVYLFVLPQSIMYFAIGFQFVGLNVSED

SEQ ID NO: 184157 - protein, 428 aa, Zea Mays
MSLIVLAEKVFLGAVSSVAKLRRRRPGRVCRCDPDEEAAAASQAYPMVLVQIPMYNEREVYQLSIEAACRLTWPVDRLIVQVLDDSTDSVIKELVKGECERWATEEGINVKYETRKDRAGYKAGNLKEGMRHAYVRACEFVAMFDADFQPPPDFLVRTVPFLVHNPSLALVQTRWKFVNANDCLLTRMQEMSMDYHFKVEQEAGSSLCNFFGYNGTAGVWRTQAIVESGGWEDRTTAEDMDLALRAGLLGWEFVYVGSIKVKSELPSTLKAYRSQQHRWSCGPALLFKKMFWQILAAERVSVWKKWYMVYDFFIARRIVGTFYTFFFFSVLIPLNILLPEAQIPVWELIYIPIAITLLNSVGTPRSIHLVILWVLFENVMALHRFKAILIGFLEADRANEWIVTQKLGNLQKLKSIARLTGSYRFKDR

SEQ ID NO: 184158 - protein, 444 aa, Zea Mays
MGAAAAGGHALRAVGDVVSFPATVAAFVEALLQGWAEARAGLLVPLLRAAVLLCTAMSLIVLAEKVFLGAVSSVAKLRRRRPGRVCRCDPDEEAAAASQAYPMVLVQIPMYNEREVYQLSIEAACRLTWPVDRLIVQVLDDSTDSVIKELVKGECERWATEEGINVKYETRKDRAGYKAGNLKEGMRHAYVRACEFVAMFDADFQPPPDFLVRTVPFLVHNPSLALVQTRWKFVNANDCLLTRMQEMSMDYHFKVEQEAGSSLCNFFGYNGTAGVWRTQAIVESGGWEDRTTAEDMDLALRAGLLGWEFVYVGSIKVKSELPSTLKAYRSQQHRWSCGPALLFKKMFWQILAAERVSVWKKWYMVYDFFIARRIVGTFYTFFFFSVLIPLNILLPEAQIPVWELIYIPIAITLLNSVGTPSVLQVYPSGHTVGLVRERNGVASV

SEQ ID NO: 184159 - protein, 413 aa, Zea Mays
MAGRSTNSAGAGRLHRLRHQGAGEGRVRAVGHGGGDQRQVRDAQGQGRVQGRQPQGGDAPRLRARLRVRRHVRRRLPAAAGLPRQNRPVPRPQPQPRARADTLEVRCPVVNANDCLLTRMQEMSMDYHFKVEQEAGSSLCNFFGYNGTAGVWRTQAIVESGGWEDRTTAEDMDLALRAGLLGWEFVYVGSIKVKSELPSTLKAYRSQQHRWSCGPALLFKKMFWQILAAERVSVWKKWYMVYDFFIARRIVGTFYTFFFFSVLIPLNILLPEAQIPVWELIYIPIAITLLNSVGTPRSIHLVILWVLFENVMALHRFKAILIGFLEADRANEWIVTQKLGNLQKLKSIARLTGSYRFKDRFHFLEVFIGLFLLASACFDYLYRDDYVYLFVLPQSIMYFAIGFQFVGLNVSED

SEQ ID NO: 184160 - protein, 278 aa, Zea Mays
MADQVVTVSNGYLWELRTSEGGWGLHDIINQNDWKLQGIVNGIDMSEWNPAVDVHLHSDEYTNYTFETLDTGKRQCKAALQRQLGLQVRDDVPLIGFIGRLDHQKGVDIIADAIHWIAGQDVQLVMLGTGRPDLEDMLRRCEAEHSDKVRAWVGFSVPLAHRITAGADVLLMPSRFEPCGLNQLYAMAYGTVPVVHAVGGLRDTVAPFDPFNDTGLGWTFDRAEANRMIDALSHCLNTFRNYKESWRGLEARGMAQDLSWDHAAVLYEDVLVKAKYQW

SEQ ID NO: 184161 - protein, 402 aa, Zea Mays
MAGATSSSSVSLILILVASSSPRRSRGRVGIALRSYGYSGAELRLHWARRGSSRDGPAVVRAAAVPAGGEGEDAAAVGKSSSSKAVAVQGSESKTQAVYSTSPPKTATSAPKQNQSAAKQNGTVGSSSASKSPAPAVSESKAEPSAPVTKTETDASAKVEELKPSVDDAKPVESIGIPEPVDAKVDAAAATDAAASAADDTEDKEHGPLAGPNVMNVVVVASECAPFCKTGGLGDVVGALPKALARRGHRVMVVIPRYGEYAEARDLGVRRRYRVAGQDSEVTYFHSYIDGVDFVFIEAPPFRHRHNDIYGGERSDVLKRIILFCKAAVEVPWYAPCGGTVYGDGNLVFIANDWHTALLPVYLKAYYRDNGLMQYARSVLVIHNIAHQVFCTLNLGRLLFSL

SEQ ID NO: 184162 - protein, 294 aa, Zea Mays
MAGATSSSSVSLILILVASSSPRRSRGRVGIALRSYGYSGAELRLHWARRGSSRDGPAVVRAAAVPAGGEGEDAAAVGKSSSSKAVAVQGSESKTQAVYSTSPPKTATSAPKQNQSAAKQNGTVGSSSASKSPAPAVSESKAEPSAPVTKTETDASAKVEELKPSVDDAKPVESIGIPEPVDAKVDAAAATDAAASAADDTEDKEHGPLAGPNVMNVVVVASECAPFCKTGGLGDVVGALPKALARRGHRVMVVIPRYGEYAEARDLGVRRRYRVAGQKLLIFTLTLMALILYS

SEQ ID NO: 184163 - protein, 101 aa, Zea Mays
MAGATSSSSVSLILILVASSSPRRSRGRVGIALRSYGYSGAELRLHWARRGSSRDGPAVVRAAAVPAGGEGEDAAAVGKSSSSKAVAVQGSESKLHVHRPF

SEQ ID NO: 184164 - protein, 203 aa, Zea Mays
MEHESHLDVVELVVVDRDGLALQAAELEGGELLRHVLVAGRLLEADVGVGPGPGERAEDGAQEVDPEAGVEVARQRRPQRPRRVHRSARHCPCEDGRNANRGTNCQPRQLTHRSRVRGDGEGDEHHVEGDDDLDDERVPVRREDVRQRPVVVRGGHAGVLRRADVMDLVVEVGPGVGPRVGRHFRPAVDRSSYYAPACCAWSS

SEQ ID NO: 184165 - protein, 112 aa, Zea Mays
MLYNGTYGLLQSWQLQNHYLYRDHLIVKQQYSRFTYRLTQVSNIFSNWKIKYRPYSWLPLMDHTSTKHVKNQAELTQSLHTSIESAATLRMFGKLWPKHRANPFCLFCSFLP

SEQ ID NO: 184166 - protein, 149 aa, Zea Mays
MWLVAHNRCWTADRLAKKGLNHPQRCLLCDQDDETMNHLLISCVFTRIFWYMLLRKFGLHALAPQPGLTSFFEWWKGAAEAVQGMVRKGLNSLIMLGAWKIWNLRNRCVFDGETPSLSRILQQAEEERNLWVLAGAKGLSFLAAPLLVV

SEQ ID NO: 184167 - protein, 362 aa, Zea Mays
MEESDLGGNLGKQTEEDKAAGESGDEGKIERSQSINLNRVPAVAVEAMSTQGNCETHGAAVPGTKDAGTGKAGQSSGDRQEEKLPKCEQVDYGSEVEGCADDENPGKRAALVTLVGNEYCGDEDERVQVLTIVKKDEHADDIVDRINPGTVAGYSEVKGAVGASAATSAVRPAGSRSSSFHGVTRHRWSGKYEAHLWDSSCRVEGRRRKGKQGSYDTEEKAARAYDVAAIKYWGENTRLNFPISQYGKELEDIRDLSREECVTYLRRRSSCFSRGASIYRGVTRRQKDGRWQARIGLVAGTRDIYLGTFKTEEEAAEAYDIAAIEIRGKNAVTNFDRSNYVDKGMHCIEGEGLRLLASKPEE

SEQ ID NO: 184168 - protein, 655 aa, Zea Mays
MALKLDSLVGDIEDAVSSSVTGKLKSRVDNSEETHHVAIGYLKSIEDLLASVAVTRPQWTRLLSSVDHRVDRSLAILRPQAIVDHRSLLSSLGWPPSLAGSKFSSINSGKQAEIVNPLFVMRGDLKSKYSESFLALCNLQGLQKRRKARQLKGHCVGNQLRQPLWVIEELVNPISTAAQRHFSKWAEKPEFVFALAYKIIRDFVDSMDEILQPLVDKANLIGYSCREEWISGMVIALSTYLAKEIFPKQIEVLQESSSSSDSGSTAYQARVSWLSLVDLMISFDKRIQDLILSAGLLLTVKDDDSWQRISVLCVFCDRPDWLQVWAEIERQESLNKLRSAMDLEKNWSTGIRGTMLEYSDDYKAPVITSVVHHTLSLLIDRARPIPSITLRAEFISMSAAPIISEFLGYMLRRCQEAEGLTALADDNAVLKVSQSINAARYFESTLAEWCEDVFFLEMENLTVNGESGCIFQQEINHLKEFRVEWTDKISTVILRGFDARSRDYLKNKRQWLEKSDGPAVSRTFIESLDYMQEQLSKLQGGLNTVDFVTVWRGVASGVDQLLFAGIFTSGTKVSSDGVERLQGDLSVLFAIFSAWCLRPEGFFPRLSEGLRLLKIDEQQLREGAFKDKNWLREHGIRHLAAADTERIIKNRVYDA

SEQ ID NO: 184169 - protein, 811 aa, Zea Mays
MEAAAQPHPLQLFQDMDPGVRRFLDARFRSAADLATASDVEAEIRGHCAELEASIYDLYVRLQETAAAYSSCCEVAGSALRGVRGRLGALKASGSTGAGEEVEVRTEQMQFEQLPALASEVARVEMVREYAEMALKLDSLVGDIEDAVSSSVTGKLKSRVDNSEETHHVAIGYLKSIEDLLASVAVTRPQWTRLLSSVDHRVDRSLAILRPQAIVDHRSLLSSLGWPPSLAGSKFSSINSGKQAEIVNPLFVMRGDLKSKYSESFLALCNLQGLQKRRKARQLKGHCVGNQLRQPLWVIEELVNPISTAAQRHFSKWAEKPEFVFALAYKIIRDFVDSMDEILQPLVDKANLIGYSCREEWISGMVIALSTYLAKEIFPKQIEVLQESSSSSDSGSTAYQARVSWLSLVDLMISFDKRIQDLILSAGLLLTVKDDDSWQRISVLCVFCDRPDWLQVWAEIERQESLNKLRSAMDLEKNWSTGIRGTMLEYSDDYKAPVITSVVHHTLSLLIDRARPIPSITLRAEFISMSAAPIISEFLGYMLRRCQEAEGLTALADDNAVLKVSQSINAARYFESTLAEWCEDVFFLEMENLTVNGESGCIFQQEINHLKEFRVEWTDKISTVILRGFDARSRDYLKNKRQWLEKSDGPAVSRTFIESLDYMQEQLSKLQGGLNTVDFVTVWRGVASGVDQLLFAGIFTSGTKVSSDGVERLQGDLSVLFAIFSAWCLRPEGFFPRLSEGLRLLKIDEQQLREGAFKDKNWLREHGIRHLAAADTERIIKNRVLFLLYIHLRSWRIGWCNKVHYIYQIYI

SEQ ID NO: 184170 - protein, 196 aa, Zea Mays
MFPSIFILFPDWLEGMVTEYLVATFADYFGDVKMYIEERSFRRFVEACIEETIVVYVDHLLSQKNYIKEETIERMRLDEEVLMDFFREHINVTKVESRVRILADMRELASAESLDSFTLIYTNILEHQPDCPPEVVEKLVAMREGIPKKEAKEVVQECKEIYENSLVDGNPQKSGFVFGKLKCLTAKKGIWRKLGQ

SEQ ID NO: 184171 - protein, 421 aa, Zea Mays
MVNLYTERFIQMLRLLSDRANDIQNINILKVTGWVVQYQENLIGLGVDESLAQVCSESGALDPLMNMYVERMQATTKKWYSNILEADKTQPPKSTEDGKLYTPAAVDLFRILTEQVQIVRDNSTDVMLYRIALAVIQVMLDFQAAERQRLEEPASDVGLESLCALINNNLRCYELSSELSSSTLEALPQNYAEQVNFEDTCKGFLEVAKEAVLQTVSVIFEDPGVQDLLVKLYQKDWLEGMVTEYLVATFADYFGDVKMYIEERSFRRFVEACIEETIVVYVDHLLSQKNYIKEETIERMRLDEEVLMDFFREHINVTKVESRVRILADMRELASAESLDSFTLIYTNILEHQPDCPPEVVEKLVAMREGIPKKEAKEVVQECKEIYENSLVDGNPQKSGFVFGKLKCLTAKKGIWRKLGQ

SEQ ID NO: 184172 - protein, 594 aa, Zea Mays
MMCYLADAEPEYFEDVDRTWETFEKTLWSHISNFFKLSKESPQTLVRALRVVEMQEILDQQVAEEAAEAEGAGAMATITNQRRTAKKGAGATVTPRKGTQEKSKVQGKGYKDKCYESIRMAVEARFNKLLTELVFVEDLMEALEEAKAIGDELGDIYDYVAPCFPPRYEIFQLMVNLYTERFIQMLRLLSDRANDIQNINILKVTGWVVQYQENLIGLGVDESLAQVCSESGALDPLMNMYVERMQATTKKWYSNILEADKTQPPKSTEDGKLYTPAAVDLFRILTEQVQIVRDNSTDVMLYRIALAVIQVMLDFQAAERQRLEEPASDVGLESLCALINNNLRCYELSSELSSSTLEALPQNYAEQVNFEDTCKGFLEVAKEAVLQTVSVIFEDPGVQDLLVKLYQKDWLEGMVTEYLVATFADYFGDVKMYIEERSFRRFVEACIEETIVVYVDHLLSQKNYIKEETIERMRLDEEVLMDFFREHINVTKVESRVRILADMRELASAESLDSFTLIYTNILEHQPDCPPEVVEKLVAMREGIPKKEAKEVVQECKEIYENSLVDGNPQKSGFVFGKLKCLTAKKGIWRKLGQ

SEQ ID NO: 184173 - protein, 339 aa, Zea Mays
MMCYLADAEPEYFEDVDRTWETFEKTLWSHISNFFKLSKESPQTLVRALRVVEMQEILDQQVAEEAAEAEGAGAMATITNQRRTAKKGAGATVTPRKGTQEKSKVQGKGYKDKCYESIRMAVEARFNKLLTELVFVEDLMEALEEAKAIGDELGDIYDYVAPCFPPRYEIFQLMVNLYTERFIQMLRLLSDRANDIQNINILKVTGWVVQYQENLIGLGVDESLAQVCSESGALDPLMNMYVERMQATTKKWYSNILEADKTQPPKSTEDGKLYTPAAVDLFRILTEQVQIVRDNSTDVMLYRIALAVIQVMLDFQAAERQRLEEPASDVGLESLCALS

SEQ ID NO: 184174 - protein, 762 aa, Zea Mays
MEGRARLSLVHAAAALVVLLQLHGGAVVVASEPPYTCGAGAPPNIPFCDAGLPIDRRVDDLVSRMTVAEKISQLGDQSPAIPRLGVPAYKWWSEALHGISNQGRGIHLDGPLRAATSFPQVIGVEARAVYNNGQAEGLTFWAPNINVFRDPRWGRGQETPGEDPTMTGKYAAVFVRGVQGYGLAGPVNSTGLEASACCKHFTAYDLENWKGVTRYVFDAKVTAQDLADTYNPPFKSCVEDGHASGIMCSYNRVNGVPTCADYNLLSTTARQDWGFYGYITSDCDAVAIIHDAQGYAKTAEDAVADVLKAGMDVNCGSYVQDHGASALQQGKITEQDINRALHNLFAVRMRLGLFNGDPRRNLYGDIGPDQVCTQEHQDLALEAAQDGIVLLKNDGGAGALPLSKPNVASLAVIGFNANDAIRLRGNYFGPPCVTVTPLQVLQGYVKDTSFVAGCNSAACNVTTIPEAVQAASSADSVVLFMGLDQDQEREEVDRLDLTLPGQQQTLIESVANAAKKPVILVLLCGGPVDVSFAKTNPKIGAILWAGYPGEAGGIAIAQVLFGEHNPGGRLPVTWYPQDFTRVPMTDMRMRADPATGYPGRTYRFYRGPTVFNFGYGLSYSKYSHRFATKPPPTSNVAGLKAVEATAGGMASYDVEAIGSETCDRLKFPAVVRVQNHGPMDGKHSVLVFMRWPNATDGSGRPASQLIGFQSLHLRATQTAHVEFEVSPCKHFSRATEDGRKVIDQGSHFVMVGEDEFEMSFMA

SEQ ID NO: 184175 - protein, 351 aa, Zea Mays
MKTQHPQAMEDPSPTTTPVISATRRSRTLGGSSDRPARRAVAVKSGRGSNGAATDLLVCFPSRAHLALMPPKAICSPSRPSASEPVKRRHSTSRPPSGLYKSAAGAARNPSRRGADVPVDDEPTSPKVTCVGQIKARQAKPKGPGPGGGGGGGKKTKKATWLQALGIKKDALALLDALHGAFRFNVAGCFGSFPGAVGVGYTSGEDDEDEEHDAPRTEKETEHGAALARWFMVLEEGKKVSAKKLQGQKPEQSHQEEDREEDAAPPANALMLMRCRSAPAKGLARRLETEEERNDVKGAAKKTPDQEEKENEGLVLMTYSPDFFKVSLDIAKETWIVGGDDAVLRCRSWKR

SEQ ID NO: 184176 - protein, 127 aa, Zea Mays
MVARNNNEGAVVVAKPQLVTTIGANPPGSVTSGSVDGKRIIGAANPGPEDAADLLRMCLQCGVPKTYSHGKGMVCPQCGDRPALTKEPEKKKGSTVKDKEKIKRMRGQSSHASWKSETEMALRQHFD

SEQ ID NO: 184177 - protein, 171 aa, Zea Mays
MARRLPLWTALLLPFLLTGVGTAAAASPPHDECPVPTIVESVLGTRDTCSTLDLGNPVGVVEGDEFTLATAVNLLHANKDDYIAVLFYASWCPFSQECKPNFETLASLFPTIRHFAFEESAIRPSIISRYGIHGFPTLFLLNSTMRVRYHGPRTVKPLAAFYTDVSVIYGR

SEQ ID NO: 184178 - protein, 180 aa, Zea Mays
MARRLPLWTALLLPFLLTGVGTAAAASPPHDECPVPTIVESVLGTRDTCSTLDLGNPVGVVEGDEFTLATAVNLLHANKDDYIAVLFYASWCPFSQECKPNFETLASLFPTIRHFAFEESAIRPSIISRYGIHGFPTLFLLNSTMRVRYHGPRTVKPLAAFYTDVSVNCRGDHGTSLARY

SEQ ID NO: 184179 - protein, 309 aa, Zea Mays
MARRLPLWTALLLPFLLTGVGTAAAASPPHDECPVPTIVESVLGTRDTCSTLDLGNPVGVVEGDEFTLATAVNLLHANKDDYIAVLFYASWCPFSQECKPNFETLASLFPTIRHFAFEESAIRPSIISRYGIHGFPTLFLLNSTMRVRYHGPRTVKPLAAFYTDVSGETMVHPLHDIERQKDAEQENCPFWWARSPEKILQQDTYLALATAFVILRLLYRLFPKIDSFARWAWRRHNLFANLMGAHEYFLTYLEQGRQKFHRLYPSSSKRGNLQEGAMNATAWASKSLASVSIGEPSAIGRTNSTSELR

SEQ ID NO: 184180 - protein, 194 aa, Zea Mays
MARRLPLWTALLLPFLLTGVGTAAAASPPHDECPVPTIVESVLGTRDTCSTLDLGNPVGVVEGDEFTLATAVNLLHANKDDYIAVLFYASWCPFSQECKPNFETLASLFPTIRHFAFEESAIRPSIISRYGIHGFPTLFLLNSTMRVRYHGPRTVKPLAAFYTDVSACLWFSFSRNLNLVLGGYYTLSHLRKIN

SEQ ID NO: 184181 - protein, 478 aa, Zea Mays
MSRPLYRGVSGIGGKLAAADEAYYDPKEPSENGIGGGFGRGGARKRHLAAAAVKIGVLLLLAAALVGSVAWAGTLYAGRGAAARAAAAAAHRGYRRLQEQLVTDLLDIGELAGGGVRAKEAEVCPPEYDNYVPCYYNITDAVDVSDLGAGVVISYDRQCTRDGRVTCLVAPPRSYRVPVRWPSGKGFIWKDNVRISGQEFSSGSLFKRMMVEEDQISFPSDAHMADGVEDYAHQIAEMIGLRNEFNFNEAGVRTVLDIECGFGTFGAHLFERDLLTMCIANYEASGSQVQITLERGIPAMIGSFATKQLPYPYLSFDMVHCAKCNIEWYKNDGIFLVEVNRLLRPGGYFVWTSNLNTHRALRDKENQKKWTAIRDYAEGLCWEMLSQQDETIVWKKTNKRECYKSRKFGPELCGHDPESPYYQPLSPCISGTRSQRWIPIEHRTTWPSQARQNSTELDIHGVHSEVFADDNSSWDSMI

SEQ ID NO: 184182 - protein, 286 aa, Zea Mays
MCIANYEASGSQVQITLERGIPAMIGSFATKQLPYPYLSFDMVHCAKCNIEWYKNDGIFLVEVNRLLRPGGYFVWTSNLNTHRALRDKENQKKWTAIRDYAEGLCWEMLSQQDETIVWKKTNKRECYKSRKFGPELCGHDPESPYYQPLSPCISGTRSQRWIPIEHRTTWPSQARQNSTELDIHGVHSEVFADDNSSWDSMVRNYWSLLSPLIFSDHPKRPGDEDPQPPFNMLRNVLDMNAHFGGFNAALLKSGKSVWVMNVVPTNAPNYLPLIFDRGFIGVQHDC

SEQ ID NO: 184183 - protein, 81 aa, Zea Mays
MAVSSPRRALIAAVSLCFLLGAASSVRTATFSPSQQQNLAEDKSRLGSTPPSCRNRCSACNPCMPVQDIVLEIDKVARLIK

SEQ ID NO: 184184 - protein, 78 aa, Zea Mays
MAVSSPRRALIAAVSLCFLLGAASSVRTATFSPSQQQNLAEDKSRLGSTPPSCRNRCSACNPCMPVQCRESAARAHLF

SEQ ID NO: 184185 - protein, 110 aa, Zea Mays
MYPISRCRSLGMLHAMACASSCWHALSARSIGCITRRSPARDLQCLPNASRPRAPIFVQLLMSRKVTFGSRGATDSTMESLISLLGISKVRRARALASFQQKRKQDQAGV

SEQ ID NO: 184186 - protein, 161 aa, Zea Mays
MEALKYWMEQDHVSELFCRLLIVVYGILWGFSAPGPGADPKVDYACTPEEVQQHFQACGTVNRVTILTDKFGQPKGFAYVEFLEQEGVQEALNLNESELHGRQIKVAPKRTNVPGMKQRPPRGYNPYHGYPYRSYGAPYFPPYGYGRAPRFRRPMRYRPYF

SEQ ID NO: 184187 - protein, 190 aa, Zea Mays
MDEEEHEVYGQEIPEDGDMDGADVDMAASGDDAAKLQELDEMKRRLKEMEEEAAALRDMQAKVAKEMQGGDPSASTAEAKEQVDARSVYVGNVDYACTPEEVQQHFQACGTVNREGVQEALNLNESELHGRQIKVAPKRTNVPGMKQRPPRGYNPYHGYPYRSYGAPYFPPYGYGRAPRFRRPMRYRPYF

SEQ ID NO: 184188 - protein, 279 aa, Zea Mays
MRSRRTLPLALARASAASTAATRFPLALVDDEDDTSPSSAELTVILDAEKKDSFPEKVPARSDCHLLARPRGALRPPRLLPSPALRPRRSRMLCSPAATISLRTCSGSRSVNRSRSRSSRTARECPVECDRASCVGTGLRPDRDRMARRWVPICCSSSASCRRASSSSSVITSITTATGSRLQRQTGQVTWLASHSPMHSGWKAWLHLGKSLSRSSSSNSLRHTAHSSAPPLPTRSALASAYFMVGKASTTSASSPRGRRCLRDREMKASKLGTALARS

SEQ ID NO: 184189 - protein, 309 aa, Zea Mays
MSEVAVDPLEPPKFKHKRVPRASGSPPVPVMHSPPRPVTVKDQQDWKIPPCISNWKNPKGYTIPLDKRLAADGRGLQEVQINDNFAKLSEALYVAEQKAREAVQMRSKVQRELMLKEKERKEQELRALAQRARMERTGAPPAPSGVPAGGGRGAVEGLRLSMKIWIWSDHVNRVSSAGSLEKRGKHGLSVIKFVRSAGARGRGRGGWKPRMLQWARRVRSRETGIVISARRLLLVWQALVLQKLVRSCMTSGCSTRTREWTLALPQMISTTSTLRVSSQRSPLCPRYTGLRRTGILMYTVMQMNSWRRL

SEQ ID NO: 184190 - protein, 81 aa, Zea Mays
MGSYGAGKKYPGAVSACMFLLVTRSFYPLHMVVQFIFFSKLTSLSRGIILRTASCDLDLTKNKGSPPYKLHLWKQKIKNHV

SEQ ID NO: 184191 - protein, 54 aa, Zea Mays
MKEADMFLLLLVCNILFLTMQCKRLFLSWRFVLTLCGPECLWKNRVVSCSFPGN

SEQ ID NO: 184192 - protein, 91 aa, Zea Mays
MQRTNRVLHVWRTGFGKCQLPRWMKSLRISAIIPRVSTQKGAVRYTRLVKNKKGDSRTCNLPSRTCGIFTCPCKLIFSHVCIYTQFRPVEL

SEQ ID NO: 184193 - protein, 63 aa, Zea Mays
MVYCCGAYTSFFFDTITYAESVWIVLLNDGAEKLIRKAMALHRSCKDAASSALRDLGLDNYNA

SEQ ID NO: 184194 - protein, 378 aa, Zea Mays
MAISISQEAFDSMVRENMEDLGMDPDEALADAVEALVALCASARVEQERLLASALKSLSSVLRDVASTEKFRRSEGPRIVMDLLQGGSENSDLLDAGFSVVAAGSAGNEVVKESFMDLKVDELILRVMKDKSKSNVQSLYDAIRVLLKPDDNRVVASQVYGYSRRFAEIGVAEVLVNALREQVAPSSLPSACAALKSIAVNDEICRSISENGGIDVLLQCIDGAGEQKNKAVARSCCSLLSKLAASDANKSIIIQRGGFDRFLKLTSRFSEDPAIIQEVMSMVTVLTLRSPENAARAMEEGYGTLAIQSMQRFPSSVQTQKQACLMIRNLVARNPENRIVLLNDGAEKLIRKAMALHRSCKDAASSALRDLGLDNYNA

SEQ ID NO: 184195 - protein, 417 aa, Zea Mays
MAISISQEAFDSMVRENMEDLGMDPDEALADAVEALTLQGADLSGIVKRVPGEATAAEVSPVVRVLDELKASLSASGGSEQDLDGLVSLLDELRNLCCSGEGSENAAIAVRNGVVEALVALCASARVEQERLLASALKSLSSVLRDVASTEKFRRSEGPRIVMDLLQGGSENSDLLDAGFSVVAAGSAGNEVVKESFMDLKVDELILRVMKDKSKSNVQSLYDAIRVLLKPDDNRVVASQDEICRSISENGGIDVLLQCIDGAGEQKNKAVARSCCSLLSKLAASDANKSIIIQRGGFDRFLKLTSRFSEDPAIIQEVMSMVTVLTLRSPENAARAMEEGYGTLAIQSMQRFPSSVQTQKQACLMIRNLVARNPENRIVLLNDGAEKLIRKAMALHRSCKDAASSALRDLGLDNYNA

SEQ ID NO: 184196 - protein, 311 aa, Zea Mays
MASLSSPSLLSSFLGDRLALSTRPLLLRSAVPGSRRLAYQATRTLCNLVDILFNRRNQDDAPENNPRRLRPGKVSPRLSVPNHIQRPPYVNSRQQRPGMNNGPEIHDENGIECMRASGKLAAQVLKFAGTLVKPGITTDEIDKAVHQMIIDNGAYPSPLGYCGYPKSVCTSVNECICHGIPDSRPLEDGDIINIDVTVYLNGYHGDTSATFLCGDVDDEAKKLVKVTRECLDKAISICSPGVEIKQIGRTIQDHADKFKFGVVRQFVGHGVGKVFHAEPVVLHFRNNEWGRMMLNQTFTIGTPFHSLPVFY

SEQ ID NO: 184197 - protein, 159 aa, Zea Mays
MNNGPEIHDENGIECMRASGKLAAQVLKFAGTLVKPGITTDEIDKAVHQMIIDNGAYPSPLGYCGYPKSVCTSVNECICHGIPDSRPLEDGDIINIDVTVYLNGYHGDTSATFLCGDVDDEAKKLVKVTRECLDKAISICSPGVEIKQIGRTIQYVISE

SEQ ID NO: 184198 - protein, 136 aa, Zea Mays
MASLSSPSLLSSFLGDRLALSTRPLLLRSAVPGSRRLAYQATRTLCNLVDILFNRRNQDDAPENNPRRLRPGKVSPRLSVPNHIQRPPYVNSRQQRPGMNNGPEIHDENGIECMRASGKLAAQVLKFAGTLVKKSL

SEQ ID NO: 184199 - protein, 282 aa, Zea Mays
MASLSSPSLLSSFLGDRLALSTRPLLLRSAVPGSRRLAYQATRTLCNLVDILFNRRNQDDAPENNPRRLRPGKVSPRLSVPNHIQRPPYVNSRQQRPGMNNGPEIHDENGIECMRASGKLAAQVLKFAGTLVKPGITTDEIDKAVHQMIIDNGAYPSPLGYCGYPKSVCTSVNECICHGIPDSRPLEDGDIINIDVTVYLNGYHGDTSATFLCGDVDDEAKKLVKVTRECLDKAISICSPGVEIKQIGRTIQSGNQNELLFQLLYLRHLIFEGIMQTSSSLV

SEQ ID NO: 184200 - protein, 223 aa, Zea Mays
MIIDNGAYPSPLGYCGYPKSVCTSVNECICHGIPDSRPLEDGDIINIDVTVYLNGYHGDTSATFLCGDVDDEAKKLVKVTRECLDKAISICSPGVEIKQIGRTIQDHADKFKFGVVRQFVGHGVGKVFHAEPVVLHFRNNEWGRMMLNQTFTIVNKVKHMKLSHFITLFYHSMSSEPMLTIGSINPVMWSDDWTAVTEDGSLSAQFEHTILITEDGPEILTQC

SEQ ID NO: 184201 - protein, 56 aa, Zea Mays
MASLSSPSLLSSFLGDRLALSTRPLLLRSAVPGSRRLAYQATRTLCNLVDILFNRR

SEQ ID NO: 184202 - protein, 249 aa, Zea Mays
MDSSATDGARLPPPRAGSRLCVRCGERKAALKRPKTLEQICRECFYIIFEDEIHQTIVQNSLFKAGERVAIGASGGKDSTVLAYVLSELNRQHNYGLDLFLLSVDEGITGYRDDSLETVKRNEIQYGLPLKIVSYKDLYGWTMDDIVKAIGLKNNCTFCGVFRRQALDRGAALLKADKIVTGHNADDIAETVLLNILRGDIARLSRCTFITTGEDGPIPRCKPFKYTYEKEIVIYPVYEISYIFIFLLC

SEQ ID NO: 184203 - protein, 229 aa, Zea Mays
MDSSATDGARLPPPRAGSRLCVRCGERKAALKRPKTLEQNSLFKAGERVAIGASGGKDSTVLAYVLSELNRQHNYGLDLFLLSVDEGITGYRDDSLETVKRNEIQYGLPLKIVSYKDLYGWTMDDIVKAIGLKNNCTFCGVFRRQALDRGAALLKADKIVTGHNADDIAETVLLNILRGDIARLSRCTFITTGEDGPIPRCKPFKYTYEKEIVIYPVYEISYIFIFLLC

SEQ ID NO: 184204 - protein, 375 aa, Zea Mays
MDSSATDGARLPPPRAGSRLCVRCGERKAALKRPKTLEQICRECFYIIFEDEIHQTIVQNSLFKAGERVAIGASGGKDSTVLAYVLSELNRQHNYGLDLFLLSVDEGITGYRDDSLETVKRNEIQYGLPLKIVSYKDLYGWTMDDIVKAIGLKNNCTFCGVFRRQALDRGAALLKADKIVTGHNADDIAETVLLNILRGDIARLSRCTFITTGEDGPIPRCKPFKIENGLIWLYHDPGIYSPNAYRGFAREFIKDLERMRPRAILDIIKSGENFRISTTTRMPEQGTCERCGYISSQKLCKACVLLDGLNRGLPKLGIGSTKAGARADSDVVNQKKLCGHNFDAIFSLLKSQKLPCFWRYIRTSSTDPNNPNSES

SEQ ID NO: 184205 - protein, 243 aa, Zea Mays
MDDIVKAIGLKNNCTFCGVFRRQALDRGAALLKADKIVTGHNADDIAETVLLNILRGDIARLSRCTFITTGEDGPIPRCKPFKYTYEKEIVMYAYFKKLDYFSTECIYSPNAYRGFAREFIKDLERMRPRAILDIIKSGENFRISTTTRMPEQGTCERCGYISSQKLCKACVLLDGLNRGLPKLGIGSTKAGARADSDVVNQKKLCGHNFDAIFSLLKSQKLPCFWRYIRTSSTDPNNPNSES

SEQ ID NO: 184206 - protein, 615 aa, Zea Mays
MHSSKFERPGSCDLLICDEAHRLKNDQTLTNKALAALPCTRRILLSGTPMQNDLEEFFSMVNFTNPGVLGDASYFRRYYEAPIICGREPTASAEEKKLGSERSAELSAKVNQFILRRTNALLSNHLPPKIIEVVCCKLTPLQTTLYNHFIHSKNIKRLISEETKQSKILAYITALKKLCNHPKLIYDTIKSNNSGVSGFDDCLHFFPPDLFSGRSGSWTGGGGMWVELSGKMHVLARLLGHLRQKTDDRIVLVSNYTQTLDLFVQLCRERRYPYVRLDGSTSINKRQKLVNQFNDLSRDEFVFLLSSKAGGCGLNLVGGNRLVLFDPDWNPANDKQAAARVWRDGQKKRVYIYRFLSTGTIEEKVYQRQMSKEGLQKVIQQEQADNKMQGNSLSTEDLRDLFIFHEHVRSEIHKNLKCSRCDKDGDPALDGTGFAATGHKASIPGVQDYADIGGFGEISGCLQKMNSTHQQIGRPTEEDLGSWGHHCDPSTVPDTILQCSAGEEVSFVFTNQVDGKLVPVESMVRSAAHQQNGIAATGEKGVQIPNSPSKPGKQSLNGKNLKMGFHLKNSSLKCSTKSRPSPNCLQGLMKTSPFLDQPQIKKLHVASDISDDDFV

SEQ ID NO: 184207 - protein, 278 aa, Zea Mays
MPSRSQYDRRGSDGDEDEIISVPSDLEESESEANRGAEADDDEYVGESSDASGGDEAEEGGSSDCGEGWDGDDHGGNVRRPLRGLQRGVAAPDKEMKSQNVDALVRGNLVVRRQPLIPRILSVSDAAAIVRKPFKPPCQNGYSDSNEQLARRLSARKRFVPWGSTQTFAINIIHHLPQSPVVASDSSSEKEEPLPPGIEPLILWQRDECEKENCNSASIEVDHLLVRYLRPHQREGVQFMFDCVSGSLSADGISGCILADDMGLGKTLQSITLLYTLL

SEQ ID NO: 184208 - protein, 268 aa, Zea Mays
MGKKLKKPGQAEGRKWAPWSSTNVTPNTARPAWGGSGSSHPSGTSWAQAPDHGAATRGNPRPPSQTSRPVLTPPLANGWQWQSRPRPSGSEVKKDDAPPSGSVPEFFEVLNTLSLEQINGQTRQWHCPACKNGPGAIDWYKGLQPLVTHARTKGSTRVKLHRELAALLEEELSRRGTSVLPAGEQFGKWKGLQESTDREIVWPPMVIVMNTFLEKDEDDKLGSLIPFKHNLTLMHLLRAFDLTEQRCNMLPKWISLYYLSIFILCCAC

SEQ ID NO: 184209 - protein, 91 aa, Zea Mays
MVYTLYRKVHPSERCPNCLIFLAMFLCSICSCNFYLVSPALFNALPFNCFSTYWINNLLVKSVGGHHKHKYISIQWSYFISRQWLQYLCQR

SEQ ID NO: 184210 - protein, 65 aa, Zea Mays
MFQITKSKYIMDQKILDNNLVAIVLIKPICAYVSITFCVLVGFYLIVFCALEWHIFILDVEFIYT

SEQ ID NO: 184211 - protein, 51 aa, Zea Mays
MFLSMFYSSSSHYVNRSSLSVILCWSNKTENGQENMQPLFYHQMLKSVCVG

SEQ ID NO: 184212 - protein, 330 aa, Zea Mays
MDFPGGSGRRPQQQEPEHLPPMTPLPLARQGSVYSLTFDEFQSSLGGAAKDFGSMNMDELLRSIWSAEEVHSVAAASASAADHAHAAARGPVSIQHQGSLTLPRTLSQKTVDEVWRDLTCVGGGPSSGSAAPAAPPPPAQRHPTLGEITLEEFLVRAGVVREDMTAPPPVPPAPVCPAPAPRPPVLFPHGNVLAPLVPPLQFGNGFVSGAVGQQRGGPVPPAVSPRPVTASAFGKMEGDDLSSLSPSPVPYIFGGGLRGRKPPAMEKVVERRQRRMIKNRESAARSRQRKQERETGKRLGTATRRNGLWYMDHEGTNGTICTMLATRMEE

SEQ ID NO: 184213 - protein, 358 aa, Zea Mays
MSKSSTTSSRSRSGTGTFPSPGTPSCNRHCAGSMQYSKGWSSERVPLGTGRNRRYGGSGVVLPFNNGRKLPSKWEDAEKWILSPVSCDGLGRMSAPAPHHRRPKSKSGPLGHPAGIPGAYAAVSPLVPCFDGVLAAANFAAHSPFSAGVLIPEHGRIGDFSSGRDRCGDDGSSRSYSAEKESYILRSASIHAWTETLMEASAFANISEETVQDDKLQRQTEATSMISSPIIKKDIGTQMSPEDSISSPKARHSCSSLPSGHLIKEANSHIPKPEIRDVQVDDQVTVTRWSKRHVTRGSDKRSTNIIEWRKKTTETRTPSFDEKERERCMSRAKGRKQRSQLGKIYRKQKQRQLSVSWR

SEQ ID NO: 184214 - protein, 378 aa, Zea Mays
MSKSSTTSSRSRSGTGTFPSPGTPSCNRHCAGSMQYSKGWSSERVPLGTGRNRRYGGSGVVLPFNNGRKLPSKWEDAEKWILSPVSCDGLGRMSAPAPHHRRPKSKSGPLGHPAGIPGAYAAVSPLVPCFDGVLAAANFAAHSPFSAGVLIPEHGRIGDFSSGRDRCGDDGSSRSYSAEKESYILRSASIHAWTETLMEASAFANISEETVQDDKLQRQTEATSMISSPIIKKDIGTQMSPEDSISSPKVDDQVTVTRWSKRHVTRGSDKRSTNIIEWRKKTTETRTPSFDEKERERCMSQCKREEAKITAWENLQKAKAEAAIRKLEMKLEKKRSSSMDKILGKLRSAQKKAQDMRSVVSSSEVVIHSWCLWIQQWI

SEQ ID NO: 184215 - protein, 322 aa, Zea Mays
MILAYSPVASQTGMLEKEIYTQIGVPNSKVSVSMQPYVYADTTYVKFGVLPDPRNTSMSTESIDALRASLIKLTLQQLNLSLTPSVFGDTFCLEILGFPGGITVLLPHSAPHADLREPLFNVTFNSTIHEIRGVLEEMKIELGSTLEQTPDEELYVELTNMNGSTVATPVTVQVSISPVDHSIYLGNYRLEQLARIITNWSARNLGLNTSIFGEIIGLTLSPLLQAFLPSSAPSFSPISPPSMPWPPIPEGPKIYPSREISCPPLVKIQNATTQHRRLMRVPSKTISPQLSTRFHRKHTSEGKKNSIAVPATTFAAPAPKQK

SEQ ID NO: 184216 - protein, 96 aa, Zea Mays
MAGALALAVLLAVASLHAEAVWLDVPQSGTKCVSEEIQSNVVVLTDYSIMLLHHMGTPCITVRILQLVNLHSQPQKLETTLHASGLIVQRKDQEYL

SEQ ID NO: 184217 - protein, 165 aa, Zea Mays
MAGALALAVLLAVASLHAEAVWLDVPQSGTKCVSEEIQSNVVVLTDYSIMYESHPYSHPTIAVKVTSPYGNTLHHSENSTVGQFAFTTAEAGNYVACFWVDSAEKGSGVSVNLDWKIGIATKDWDAIAKKEKIEGVELELRKLEVAVQAIHQNLIYLKERDANCE

SEQ ID NO: 184218 - protein, 170 aa, Zea Mays
MCDHDILAKTKDTVIFSYLACGASSESATTSVNNRSYMQRSDDVTVDSTISGKKTIRFSLKNRDVDRNTADSSRTLISFKRKLSERGPRAGKQLPQRPTIAAEKLEDEDKKTTDKKREMFQKELVMTLDQASTQNQRLPKGYAYVPRDSLSKEKLWNRNTQPLNPQEPGG

SEQ ID NO: 184219 - protein, 1145 aa, Zea Mays
MSGEMARAEALPEGEAPGFGVDLYAQATKAVSLRTPFEGDEAAPRVPTLPARLVSWAGPGDARKKHKKILPPPPDDAAPEPPPQSPVVTPAKVGLWDQFEAYFRPVTLADVEMLRPKLPFGYSKVDSCMLVPFLGSGNESTTQAETYDVAVAETTLYLGVGGEEVVTNRERGVQSVHLASQKERNDQSIEHDIHDVVVQQMVSDKELNRHRGVQGIHEVSIQLGGRSSGVDQAGSSSGIVLGQFVNEEGTSLNWLLGATGRFVLTSERPNKKRKLLGVDAGLEQLVLLPRVGAEASASCDVCCLGESSMESNRIVNCSNCKVSVHQKCYGLHAVPDGQWLCAWCTYLESTGWSLKEDAGNTQSMPCALCPKEKGALKPVKVESTRNEGIGHQKFVHLYCSLWAPEVFVEDMESMEPVLSLENVQENRMKLTCSICKIKHGACVRCSHGTCRTPFHPICARESKHQMEIWGKSRHPNVELRAFCSKHSAVEYASSVDTSNLASEQNPRKSGPYNTTLNSGKIPVIRFTRKNKDKFISCGTSASSSGNLIRVKTIEQDALANTVRNANSQPIRIWETGTGHPSVSGDHIRSSGDIAVVLRKLIDSGKVSVSDVASEVGISSESLEAALVGETTTFSHGLTLKIIKWLQNSVHMHDDDKGVLVDVPDFAVTEPARTRSKSNSKILKENNATCATGVTIVQNGEKNMVKEDSNPECAAKEFANESTQGFSPSSSKDVLKDEHGILILNDTSGNKESGTSTQIPNEKQGALLGRKNNDLTEVELGPCLEKGVPSHGHCFVQGDNGVDGVGSVENSFNTSNCSHGQPFFNFDDSHSYIHPFIKKKVSHHWDITFNQNKETLNHYIQESSYPSHEKIPTDSLVEVESTADTTVTDQVLKARSSKILEHSPDDEVEGEMVYLQSRLLDNAVVLKHRYEKLIAKVVQNLCRELDAFSKRKWDLIFVNQFLRDVREAKKRGRKEKRHKEAQAVLAAAAAAIASSSRNSTVRKDAKENAPESSPKLVAGSSRVGQRTFSLPRINDSSKSSNNKVSSDNKFGSFHMPISSKENGLYCDVCMRTETLLNRIFVCSRCKIATEIWKILLGPGTANFVKMKTFHQKLQVQPLVINHIVMASYPLHSVACAMAHQVLLERL

SEQ ID NO: 184220 - protein, 764 aa, Zea Mays
MSGEMARAEALPEGEAPGFGVDLYAQATKAVSLRTPFEGDEAAPRVPTLPARLVSWAGPGDARKKHKKILPPPPDDAAPEPPPQSPVVTPAKVGLWDQFEAYFRPVTLADVEMLRPKLPFGYSKVDSCMLVPFLGSGNESTTQAETYDVAVAETTLYLGVGGEEVVTNRERGVQSVHLASQKERNDQSIEHDIHDVVVQQMVSDKELNRHRGVQGIHEVSIQLGGRSSGVDQAGSSSGIVLGQFVNEEGTSLNWLLGATGRFVLTSERPNKKRKLLGVDAGLEQLVLLPRVGAEASASCDVCCLGESSMESNRIVNCSNCKVSVHQKCYGLHAVPDGQWLCAWCTYLESTGWSLKEDAGNTQSMPCALCPKEKGALKPVKVESTRNEGIGHQKFVHLYCSLWAPEVFVEDMESMEPVLSLENVQENRMKLTCSICKIKHGACVRCSHGTCRTPFHPICARESKHQMEIWGKSRHPNVELRAFCSKHSAVEYASSVDTSNLASEQNPRKSGPYNTTLNSGKIPVIRFTRKNKDKFISCGTSASSSGNLIRVKTIEQDALANTVRNANSQPIRIWETGTGHPSVSGDHIRSSGDIAVVLRKLIDSGKVSVSDVASEVGISSESLEAALVGETTTFSHGLTLKIIKWLQNSVHMHDDDKGVLVDVPDFAVTEPARTRSKSNSKILKENNATCATGVTIVQNGEKNMVKEDSNPECAAKEFANESTQGFSPSSSKDVLKDEHGILILNDTSGNKESGTSTQIPNEKQG

SEQ ID NO: 184221 - protein, 610 aa, Zea Mays
MSGEMARAEALPEGEAPGFGVDLYAQATKAVSLRTPFEGDEAAPRVPTLPARLVSWAGPGDARKKHKKILPPPPDDAAPEPPPQSPVVTPAKVGLWDQFEAYFRPVTLADVEMLRPKLPFGYSKVDSCMLVPFLGSGNESTTQAETYDVAVAETTLYLGVGGEEVVTNRERGVQSVHLASQKERNDQSIEHDIHDVVVQQMVSDKELNRHRGVQGIHEVSIQLGGRSSGVDQAGSSSGIVLGQFVNEEGTSLNWLLGATGRFVLTSERPNKKRKLLGVDAGLEQLVLLPRVGAEASASCDVCCLGESSMESNRIVNCSNCKVSVHQKCYGLHAVPDGQWLCAWCTYLESTGWSLKEDAGNTQSMPCALCPKEKGALKPVKVESTRNEGIGHQKFVHLYCSLWAPEVFVEDMESMEPVLSLENVQENRMKLTCSICKIKHGACVRCSHGTCRTPFHPICARESKHQMEIWGKSRHPNVELRAFCSKHSAVEYASSVDTSNLASEQNPRKSGPYNTTLNSGKIPVIRFTRKNKDKFISCGTSASSSGNLIRVKTIEQDALANTVRNANSQPIRIWETGTGHPSVSGDHIRSSGDIAVVLRKVTVTQQYLDRE

SEQ ID NO: 184222 - protein, 1277 aa, Zea Mays
MSGEMARAEALPEGEAPGFGVDLYAQATKAVSLRTPFEGDEAAPRVPTLPARLVSWAGPGDARKKHKKILPPPPDDAAPEPPPQSPVVTPAKVGLWDQFEAYFRPVTLADVEMLRPKLPFGYSKVDSCMLVPFLGSGNESTTQAETYDVAVAETTLYLGVGGEEVVTNRERGVQSVHLASQKERNDQSIEHDIHDVVVQQMVSDKELNRHRGVQGIHEVSIQLGGRSSGVDQAGSSSGIVLGQFVNEEGTSLNWLLGATGRFVLTSERPNKKRKLLGVDAGLEQLVLLPRVGAEASASCDVCCLGESSMESNRIVNCSNCKVSVHQKCYGLHAVPDGQWLCAWCTYLESTGWSLKEDAGNTQSMPCALCPKEKGALKPVKVESTRNEGIGHQKFVHLYCSLWAPEVFVEDMESMEPVLSLENVQENRMKLTCSICKIKHGACVRCSHGTCRTPFHPICARESKHQMEIWGKSRHPNVELRAFCSKHSAVEYASSVDTSNLASEQNPRKSGPYNTTLNSGKIPVIRFTRKNKDKFISCGTSASSSGNLIRVKTIEQDALANTVRNANSQPIRIWETGTGHPSVSGDHIRSSGDIAVVLRKLIDSGKVSVSDVASEVGISSESLEAALVGETTTFSHGLTLKIIKWLQNSVHMHDDDKGVLVDVPDFAVTEPARTRSKSNSKILKENNATCATGVTIVQNGEKNMVKEDSNPECAAKEFANESTQGFSPSSSKDVLKDEHGILILNDTSGNKESGTSTQIPNEKQGALLGRKNNDLTEVELGPCLEKGVPSHGHCFVQGDNGVDGVGSVENSFNTSNCSHGQPFFNFDDSHSYIHPFIKKKVSHHWDITFNQNKETLNHYIQESSYPSHEKIPTDSLVEVESTADTTVTDQVLKARSSKILEHSPDDEVEGEMVYLQSRLLDNAVVLKHRYEKLIAKVVQNLCRELDAFSKRKWDLIFVNQFLRDVREAKKRGRKEKRHKEAQAVLAAAAAAIASSSRNSTVRKDAKENAPESSPKLVAGSSRVGQRTFSLPRINDSSKSSNNKVSSDNKFGSFHMPISSKENGLYCDVCMRTETLLNRIFVCSRCKAAVHIDCYRNLENSIGPWNCELCEDEDISSEATSTTVSDKSHCNGKLPFAQCGMCHGTSGAFRKTVDGKWVHAFCAEWLLDTKYVRGQDSPVEGMENLVEGKDTCCLCLCNVGMCLRCSSGDCNITFHPTCARSSGLYMNTKGFGTTSQHKAYCDKHSVEQKEADAQQYGPEELRSMKRMRYMFIWMLLNTE

SEQ ID NO: 184223 - protein, 1181 aa, Zea Mays
MSGEMARAEALPEGEAPGFGVDLYAQATKAVSLRTPFEGDEAAPRVPTLPARLVSWAGPGDARKKHKKILPPPPDDAAPEPPPQSPVVTPAKVGLWDQFEAYFRPVTLADVEMLRPKLPFGYSKVDSCMLVPFLGSGNESTTQAETYDVAVAETTLYLGVGGEEVVTNRERGVQSVHLASQKERNDQSIEHDIHDVVVQQMVSDKELNRHRGVQGIHEVSIQLGGRSSGVDQAGSSSGIVLGQFVNEEGTSLNWLLGATGRFVLTSERPNKKRKLLGVDAGLEQLVLLPRVGAEASASCDVCCLGESSMESNRIVNCSNCKVSVHQKCYGLHAVPDGQWLCAWCTYLESTGWSLKEDAGNTQSMPCALCPKEKGALKPVKVESTRNEGIGHQKFVHLYCSLWAPEVFVEDMESMEPVLSLENVQENRMKLTCSICKIKHGACVRCSHGTCRTPFHPICARESKHQMEIWGKSRHPNVELRAFCSKHSAVEYASSVDTSNLASEQNPRKSGPYNTTLNSGKIPVIRFTRKNKDKFISCGTSASSSGNLIRVKTIEQDALANTVRNANSQPIRIWETGTGHPSVSGDHIRSSGDIAVVLRKLIDSGKVSVSDVASEVGISSESLEAALVGETTTFSHGLTLKIIKWLQNSVHMHGAQGNVCKGSSGVVQDNKSDGLDTTDTVDVKNALVLDDDKGVLVDVPDFAVTEPARTRSKSNSKILKENNATCATGVTIVQNGEKNMVKEDSNPECAAKEFANESTQGFSPSSSKDVLKDEHGILILNDTSGNKESGTSTQIPNEKQGALLGRKNNDLTEVELGPCLEKGVPSHGHCFVQGDNGVDGVGSVENSFNTSNCSHGQPFFNFDDSHSYIHPFIKKKVSHHWDITFNQNKETLNHYIQESSYPSHEKIPTDSLVEVESTADTTVTDQVLKARSSKILEHSPDDEVEGEMVYLQSRLLDNAVVLKHRYEKLIAKVVQNLCRELDAFSKRKWDLIFVNQFLRDVREAKKRGRKEKRHKEAQAVLAAAAAAIASSSRNSTVRKDAKENAPESSPKLVAGSSRVGQRTFSLPRINDSSKSSNNKVSSDNKFGSFHMPISSKENGLYCDVCMRTETLLNRIFVCSRCKIATEIWKILLGPGTANFVKMKTFHQKLQVQPLVINHIVMASYPLHSVACAMAHQVLLERL

SEQ ID NO: 184224 - protein, 1278 aa, Zea Mays
MSGEMARAEALPEGEAPGFGVDLYAQATKAVSLRTPFEGDEAAPRVPTLPARLVSWAGPGDARKKHKKILPPPPDDAAPEPPPQSPVVTPAKVGLWDQFEAYFRPVTLADVEMLRPKLPFGYSKVDSCMLVPFLGSGNESTTQAETYDVAVAETTLYLGVGGEEVVTNRERGVQSVHLASQKERNDQSIEHDIHDVVVQQMVSDKELNRHRGVQGIHEVSIQLGGRSSGVDQAGSSSGIVLGQFVNEEGTSLNWLLGATGRFVLTSERPNKKRKLLGVDAGLEQLVLLPRVGAEASASCDVCCLGESSMESNRIVNCSNCKVSVHQKCYGLHAVPDGQWLCAWCTYLESTGWSLKEDAGNTQSMPCALCPKEKGALKPVKVESTRNEGIGHQKFVHLYCSLWAPEVFVEDMESMEPVLSLENVQENRMKLTCSICKIKHGACVRCSHGTCRTPFHPICARESKHQMEIWGKSRHPNVELRAFCSKHSAVEYASSVDTSNLASEQNPRKSGPYNTTLNSGKIPVIRFTRKNKDKFISCGTSASSSGNLIRVKTIEQDALANTVRNANSQPIRIWETGTGHPSVSGDHIRSSGDIAVVLRKLIDSGKVSVSDVASEVGISSESLEAALVGETTTFSHGLTLKIIKWLQNSVHMHDDDKGVLVDVPDFAVTEPARTRSKSNSKILKENNATCATGVTIVQNGEKNMVKEDSNPECAAKEFANESTQGFSPSSSKDVLKDEHGILILNDTSGNKESGTSTQIPNEKQGALLGRKNNDLTEVELGPCLEKGVPSHGHCFVQGDNGVDGVGSVENSFNTSNCSHGQPFFNFDDSHSYIHPFIKKKVSHHWDITFNQNKETLNHYIQESSYPSHEKIPTDSLVEVESTADTTVTDQVLKARSSKILEHSPDDEVEGEMVYLQSRLLDNAVVLKHRYEKLIAKVVQNLCRELDAFSKRKWDLIFVNQFLRDVREAKKRGRKEKRHKEAQAVLAAAAAAIASSSRNSTVRKDAKENAPESSPKLVAGSSRVGQRTFSLPRINDSSKSSNNKVSSDNKFGSFHMPISSKENGLYCDVCMRTETLLNRIFVCSRCKAAVHIDCYRNLENSIGPWNCELCEDEDISSEATSTTVSDKSHCNGKLPFAQCGMCHGTSGAFRKTVDGKWVHAFCAEWLLDTKYVRGQDSPVEGMENLVEGKDTCCLCLCNVGMCLRCSSGDCNITFHPTCARSSGLYMNTKGFGTTSQHKAYCDKHSVEQKEADAQQYGPEELRSMKRMRYQMQELITHCHL

SEQ ID NO: 184225 - protein, 1432 aa, Zea Mays
MSGEMARAEALPEGEAPGFGVDLYAQATKAVSLRTPFEGDEAAPRVPTLPARLVSWAGPGDARKKHKKILPPPPDDAAPEPPPQSPVVTPAKVGLWDQFEAYFRPVTLADVEMLRPKLPFGYSKVDSCMLVPFLGSGNESTTQAETYDVAVAETTLYLGVGGEEVVTNRERGVQSVHLASQKERNDQSIEHDIHDVVVQQMVSDKELNRHRGVQGIHEVSIQLGGRSSGVDQAGSSSGIVLGQFVNEEGTSLNWLLGATGRFVLTSERPNKKRKLLGVDAGLEQLVLLPRVGAEASASCDVCCLGESSMESNRIVNCSNCKVSVHQKCYGLHAVPDGQWLCAWCTYLESTGWSLKEDAGNTQSMPCALCPKEKGALKPVKVESTRNEGIGHQKFVHLYCSLWAPEVFVEDMESMEPVLSLENVQENRMKLTCSICKIKHGACVRCSHGTCRTPFHPICARESKHQMEIWGKSRHPNVELRAFCSKHSAVEYASSVDTSNLASEQNPRKSGPYNTTLNSGKIPVIRFTRKNKDKFISCGTSASSSGNLIRVKTIEQDALANTVRNANSQPIRIWETGTGHPSVSGDHIRSSGDIAVVLRKLIDSGKVSVSDVASEVGISSESLEAALVGETTTFSHGLTLKIIKWLQNSVHMHDDDKGVLVDVPDFAVTEPARTRSKSNSKILKENNATCATGVTIVQNGEKNMVKEDSNPECAAKEFANESTQGFSPSSSKDVLKDEHGILILNDTSGNKESGTSTQIPNEKQGALLGRKNNDLTEVELGPCLEKGVPSHGHCFVQGDNGVDGVGSVENSFNTSNCSHGQPFFNFDDSHSYIHPFIKKKVSHHWDITFNQNKETLNHYIQESSYPSHEKIPTDSLVEVESTADTTVTDQVLKARSSKILEHSPDDEVEGEMVYLQSRLLDNAVVLKHRYEKLIAKVVQNLCRELDAFSKRKWDLIFVNQFLRDVREAKKRGRKEKRHKEAQAVLAAAAAAIASSSRNSTVRKDAKENAPESSPKLVAGSSRVGQRTFSLPRINDSSKSSNNKVSSDNKFGSFHMPISSKENGLYCDVCMRTETLLNRIFVCSRCKAAVHIDCYRNLENSIGPWNCELCEDEDISSEATSTTVSDKSHCNGKLPFAQCGMCHGTSGAFRKTVDGKWVHAFCAEWLLDTKYVRGQDSPVEGMENLVEGKDTCCLCLCNVGMCLRCSSGDCNITFHPTCARSSGLYMNTKGFGTTSQHKAYCDKHSVEQKEADAQQYGPEELRSMKRMRVELEKLRLLCERIIKREKVKRETVMCDHDILAKTKDTVIFSYLACGASSESATTSVNNRDVDRNTADSSRTLISFKRKLSERGPRAGKQLPQRPTIAAEKLEDEDKKTTDKKREMFQKELVMTLDQASTQNQRLPKGYAYVPRDSLSKEKLWNRNTQPLNPQEPGG

SEQ ID NO: 184226 - protein, 1329 aa, Zea Mays
MSGEMARAEALPEGEAPGFGVDLYAQATKAVSLRTPFEGDEAAPRVPTLPARLVSWAGPGDARKKHKKILPPPPDDAAPEPPPQSPVVTPAKVGLWDQFEAYFRPVTLADVEMLRPKLPFGYSKVDSCMLVPFLGSGNESTTQAETYDVAVAETTLYLGVGGEEVVTNRERGVQSVHLASQKERNDQSIEHDIHDVVVQQMVSDKELNRHRGVQGIHEVSIQLGGRSSGVDQAGSSSGIVLGQFVNEEGTSLNWLLGATGRFVLTSERPNKKRKLLGVDAGLEQLVLLPRVGAEASASCDVCCLGESSMESNRIVNCSNCKVSVHQKCYGLHAVPDGQWLCAWCTYLESTGWSLKEDAGNTQSMPCALCPKEKGALKPVKVESTRNEGIGHQKFVHLYCSLWAPEVFVEDMESMEPVLSLENVQENRMKLTCSICKIKHGACVRCSHGTCRTPFHPICARESKHQMEIWGKSRHPNVELRAFCSKHSAVEYASSVDTSNLASEQNPRKSGPYNTTLNSGKIPVIRFTRKNKDKFISCGTSASSSGNLIRVKTIEQDALANTVRNANSQPIRIWETGTGHPSVSGDHIRSSGDIAVVLRKLIDSGKVSVSDVASEVGISSESLEAALVGETTTFSHGLTLKIIKWLQNSVHMHGAQGNVCKGSSGVVQDNKSDGLDTTDTVDVKNALVLDDDKGVLVDVPDFAVTEPARTRSKSNSKILKENNATCATGVTIVQNGEKNMVKEDSNPECAAKEFANESTQGFSPSSSKDVLKDEHGILILNDTSGNKESGTSTQIPNEKQGALLGRKNNDLTEVELGPCLEKGVPSHGHCFVQGDNGVDGVGSVENSFNTSNCSHGQPFFNFDDSHSYIHPFIKKKVSHHWDITFNQNKETLNHYIQESSYPSHEKIPTDSLVEVESTADTTVTDQVLKARSSKILEHSPDDEVEGEMVYLQSRLLDNAVVLKHRYEKLIAKVVQNLCRELDAFSKRKWDLIFVNQFLRDVREAKKRGRKEKRHKEAQAVLAAAAAAIASSSRNSTVRKDAKENAPESSPKLVAGSSRVGQRTFSLPRINDSSKSSNNKVSSDNKFGSFHMPISSKENGLYCDVCMRTETLLNRIFVCSRCKAAVHIDCYRNLENSIGPWNCELCEDEDISSEATSTTVSDKSHCNGKLPFAQCGMCHGTSGAFRKTVDGKWVHAFCAEWLLDTKYVRGQDSPVEGMENLVEGKDTCCLCLCNVGMCLRCSSGDCNITFHPTCARSSGLYMNTKGFGTTSQHKAYCDKHSVEQKEADAQQYGPEELRSMKRMRVELEKLRLLCERIIKREKVKLIPLMVL

SEQ ID NO: 184227 - protein, 1126 aa, Zea Mays
MSGEMARAEALPEGEAPGFGVDLYAQATKAVSLRTPFEGDEAAPRVPTLPARLVSWAGPGDARKKHKKILPPPPDDAAPEPPPQSPVVTPAKVGLWDQFEAYFRPVTLADVEMLRPKLPFGYSKVDSCMLVPFLGSGNESTTQAETYDVAVAETTLYLGVGGEEVVTNRERGVQSVHLASQKERNDQSIEHDIHDVVVQQMVSDKELNRHRGVQGIHEVSIQLGGRSSGVDQAGSSSGIVLGQFVNEEGTSLNWLLGATGRFVLTSERPNKKRKLLGVDAGLEQLVLLPRVGAEASASCDVCCLGESSMESNRIVNCSNCKVSVHQKCYGLHAVPDGQWLCAWCTYLESTGWSLKEDAGNTQSMPCALCPKEKGALKPVKVESTRNEGIGHQKFVHLYCSLWAPEVFVEDMESMEPVLSLENVQENRMKLTCSICKIKHGACVRCSHGTCRTPFHPICARESKHQMEIWGKSRHPNVELRAFCSKHSAVEYASSVDTSNLASEQNPRKSGPYNTTLNSGKIPVIRFTRKNKDKFISCGTSASSSGNLIRVKTIEQDALANTVRNANSQPIRIWETGTGHPSVSGDHIRSSGDIAVVLRKLIDSGKVSVSDVASEVGISSESLEAALVGETTTFSHGLTLKIIKWLQNSVHMHGAQGNVCKGSSGVVQDNKSDGLDTTDTVDVKNALVLDDDKGVLVDVPDFAVTEPARTRSKSNSKILKENNATCATGVTIVQNGEKNMVKEDSNPECAAKEFANESTQGFSPSSSKDVLKDEHGILILNDTSGNKESGTSTQIPNEKQGALLGRKNNDLTEVELGPCLEKGVPSHGHCFVQGDNGVDGVGSVENSFNTSNCSHGQPFFNFDDSHSYIHPFIKKKVSHHWDITFNQNKETLNHYIQESSYPSHEKIPTDSLVEVESTADTTVTDQVLKARSSKILEHSPDDEVEGEMVYLQSRLLDNAVVLKHRYEKLIAKVVQNLCRELDAFSKRKWDLIFVNQFLRDVREAKKRGRKEKRHKEAQAVLAAAAAAIASSSRNSTVRKDAKENAPESSPKLVAGSSRVGQRTFSLPRINDSSKSSNNKVSSDNKFGSFHMPISSKENGLYCDVCMRTETLLNRIFVCSRCKVIWIC

SEQ ID NO: 184228 - protein, 259 aa, Zea Mays
MATRSKLSCLSWNKYSKNIIASSDYEGIVTVWDVQTRQSVMEYEEHEKRAWSVDFSRTDSSMLVSGSDDCKVKVWCTNQEASVINIDMKANICSVKYNPGSSFYVAVGSADHHIHYFDLRNPSSPVHIFGGHKKAVSYVKFLSNNELASASTDSTLRLWDVKDNCPVRTFRGHKNEKNFVGLSVNNEYIACGSETNEVFVYHKAISKPAASHRFVSSDLDDADDDPGSYFISAVCWKSDSPTMLTANSQGTIKVLVLAP

SEQ ID NO: 184229 - protein, 345 aa, Zea Mays
MNREGYHAGLQDFQSVLTTFTRYSRLRVIAELRHGDLFHSANIVSSIEFDRDDELFATAGVSKRIKVFEFSTVVNEPSDVHCPVVEMATRSKLSCLSWNKYSKNIIASSDYEGIVTVWDVQTRQSVMEYEEHEKRAWSVDFSRTDSSMLVSGSDDCKVKVWCTNQEASVINIDMKANICSVKYNPGSSFYVAVGSADHHIHYFDLRNPSSPVHIFGGHKKAVSYVKFLSNNELASASTDSTLRLWDVKDNCPVRTFRGHKNEKNFVGLSVNNEYIACGSETNEVFVYHKAISKPAASHRFVSSDLDDADDDPGSYFISAVCWKSDSPTMLTANSQGTIKVLVLAP

SEQ ID NO: 184230 - protein, 633 aa, Zea Mays
MGDSSVAGALVPSVPKPEPAPSGDTSAAAAATTAALAMPEEAGMRAASASPQGPAEEGEGPADRDLLCPICMAVIKDAFLTACGHSFCYMCIVTHLSNKSDCPCCGHYLTKAQLYPNFLLDKVLKKISAQQIAKTASPIDQFRCALQQGNEMGVKELDSLMTLIAEKKRQMEQQESETNMQILLVFLHCLRKQKLEELNEIQTDLQYIKEDISSVERHRAELYRTKERYSMKLRMLLDEPTAQKMWPSPIDKASCRFLPNSRTPLSGSCPGTLQNKKLDLKAQVSHQGFQRRDALTSSDPPNSPIQSGNVIARKRRVQAQFNELQEYYLQRRRTGAQARRQEERDIVAMNREGYHAGLQDFQSVLTTFTRYSRLRVIAELRHGDLFHSANIVSSIEFDRDDELFATAGVSKRIKVFEFSTVVNEPSDVHCPVVEMATRSKLSCLSWNKYSKNIIASSDYEGIVTVWDVQTRQSVMEYEEHEKRAWSVDFSRTDSSMLVSGSDDCKVKVWCTNQEASVINIDMKANICSVKYNPGSSFYVAVRTFRGHKNEKNFVGLSVNNEYIACGSETNEVFVYHKAISKPAASHRFVSSDLDDADDDPGSYFISAVCWKSDSPTMLTANSQGTIKVLVLAP

SEQ ID NO: 184231 - protein, 353 aa, Zea Mays
MGDSSVAGALVPSVPKPEPAPSGDTSAAAAATTAALAMPEEAGMRAASASPQGPAEEGEGPADRDLLCPICMAVIKDAFLTACGHSFCYMCIVTHLSNKSDCPCCGHYLTKAQLYPNFLLDKVLKKISAQQIAKTASPIDQFRCALQQGNEMGVKELDSLMTLIAEKKRQMEQQESETNMQILLVFLHCLRKQKLEELNEIQTDLQYIKEDISSVERHRAELYRTKERYSMKLRMLLDEPTAQKMWPSPIDKASCRFLPNSRTPLSGSCPGTLQNKKLDLKAQVSHQGFQRRDALTSSDPPNSPIQSGNVIARKRRVQAQVCFSLHALLHFLRHSFLPHYTQKVGLLCVAYMF

SEQ ID NO: 184232 - protein, 571 aa, Zea Mays
MGDSSVAGALVPSVPKPEPAPSGDTSAAAAATTAALAMPEEAGMRAASASPQGPAEEGEGPADRDLLCPICMAVIKDAFLTACGHSFCYMCIVTHLSNKSDCPCCGHYLTKAQLYPNFLLDKVLKKISAQQIAKTASPIDQFRCALQQGNEMGVKELDSLMTLIAEKKRQMEQQESETNMQILLVFLHCLRKQKLEELNEIQTDLQYIKEDISSVERHRAELYRTKERYSMKLRMLLDEPTAQKMWPSPIDKASCRFLPNSRTPLSGSCPGTLQNKKLDLKAQVSHQGFQRRDALTSSDPPNSPIQSGNVIARKRRVQAQFNELQEYYLQRRRTGAQARRQEERDIVAMNREGYHAGLQDFQSVLTTFTRYSRLRVIAELRHGDLFHSANIVSSIEFDRDDELFATAGVSKRIKVFEFSTVVNEPSDVHCPVVEMATRSKLSCLSWNKYSKNIIASSDYEGIVTVWDVQTRQSVMEYEEHEKRAWSVDFSRTDSSMLVSGSDDCKVKVWCTNQEASVINIDMKANICSVKYNPGSSFYVAIAHYAYGMSRITARYGHSEDTKMKRTLLACL

SEQ ID NO: 184233 - protein, 74 aa, Zea Mays
MHTTGSSTRTRVVLLVKCLPFGEQLKPWKWRICAELLWNVSDLKARLFFFDSVNKHCLKLHYWTSLLMGKSKKK

SEQ ID NO: 184234 - protein, 146 aa, Zea Mays
MTNKPSHLAPAATTTRHGPRYLLLRRLLGVASAGLLGLGLGAAVPHSRRRWSCRRLPGDARCAVLAVGGVQWLPARRHRSSERPSQQAAADGGGDDDASLSASGDRLRGPSVPSCGKCLLVCYCVTYILYKWQWYAYRPPATSSSC

SEQ ID NO: 184235 - protein, 377 aa, Zea Mays
MAGVTATGMAGVPATFSSATAQIGGFLSKKPYAPPLWATHLSPMPCHTFSLGHFPTPIHKWNLPNLPEGTEVWIKRDDLSGMQLSGNKVRKLEFLMADAVAQGADCVITVGGIQSNHCRATAVAAKYLNLDCYLILRTSKLLVDKDPGLVGNLLVERLVGAHVDLVSKEEYGKIGSVALADLLKKRLLEEGRKPYVIPVGGSNSLGTWGYIEAIREIEQQIQQSSDVQFDDIVVACGSGGTIAGLALGSRLSSLNTKVHAFSVCDDPEYFYDYVQGLIDGLNSGFDSHDIVSMENAKGLGYAMNTAEELKFVKDIAASTGIVLDPVYSGKAVYGLLKDMAGNPAKWKEWILKILFHAKMALVHLHELRERNQSCRLQ

SEQ ID NO: 184236 - protein, 372 aa, Zea Mays
MAGVTATGMAGVPATFSSATAQIGGFLSKKPYAPPLWATHLSPMPCHTFSLGHFPTPIHKWNLPNLPEGTEVWIKRDDLSGMQLSGNKVRKLEFLMADAVAQGADCVITVGGIQSNHCRATAVAAKYLNLDCYLILRTSKDPGLVGNLLVERLVGAHVDLVSKEEYGKIGSVALADLLKKRLLEEGRKPYVIPVGGSNSLGTWGYIEAIREIEQQIQQSSDVQFDDIVVACGSGGTIAGLALGSRLSSLNTKVHAFSVCDDPEYFYDYVQGLIDGLNSGFDSHDIVSMENAKGLGYAMNTAEELKFVKDIAASTGIVLDPVYSGKAVYGLLKDMAGNPAKWKEWILKILFHAKMALVHLHELRERNQSCRLQ

SEQ ID NO: 184237 - protein, 367 aa, Zea Mays
MAGVTATGMAGVPATFSSATAQIGGFLSKKPYAPPLWATHLSPMPCHTFSLGHFPTPIHKWNLPNLPEGTEVWIKRDDLSGMQLSGNKVRKLEFLMADAVAQGADCVITVGGIQSNHCRATAVAAKYLNLDCYLILRTSKDPGLVGNLLVERLVGAHVDLVSKEEYGKIGSVALADLLKKRLLEEGRKPYVIPVGGSNSLGTWGYIEAIREIEQQIQQSSDVQFDDIVVACGSGGTIAGLALGSRLSSLNTKVHAFSVCDDPEYFYDYVQGLIDGLNSGFDSHDIVSMENAKGLGYAMNTAEELKFVKDIAASTGIVLDPVYSGKAVYGLLKDMAGNPAKWKEWILKILFHAKMALLAGSPVSPYQG

SEQ ID NO: 184238 - protein, 433 aa, Zea Mays
MTVTSTLPLLCRFRRHLSLVAAAGMAGVTATGMAGVPATFSSATAQIGGFLSKKPYAPPLWATHLSPMPCHTFSLGHFPTPIHKWNLPNLPEGTEVWIKRDDLSGMQLSGNKVRKLEFLMADAVAQGADCVITVGGIQSNHCRATAVAAKYLNLDCYLILRTSKLLVDKDPGLVGNLLVERLVGAHVDLVSKEEYGKIGSVALADLLKKRLLEEGRKPYVIPVGGSNSLGTWGYIEAIREIEQQIQQSSDVQFDDIVVACGSGGTIAGLALGSRLSSLNTKVHAFSVCDDPEYFYDYVQGLIDGLNSGFDSHDIVSMENAKGLGYAMNTAEELKFVKDIAASTGIVLDPVYSGKAVYGLLKDMAGNPAKWKGRKVLFIHTGGLLGLYDKADQLSSLAGSWRRMDLEDSVPRKDGTARRISSVSLSGLSPYLAC

SEQ ID NO: 184239 - protein, 361 aa, Zea Mays
MAGVTATGMAGVPATFSSATAQIGGFLSKKPYAPPLWATHLSPMPCHTFSLGHFPTPIHKWNLPNLPEGTEVWIKRDDLSGMQLSGNKVRKLEFLMADAVAQGADCVITVGGIQSNHCRATAVAAKYLNLDCYLILRTSKALADLLKKRLLEEGRKPYVIPVGGSNSLGTWGYIEAIREIEQQIQQSSDVQFDDIVVACGSGGTIAGLALGSRLSSLNTKVHAFSVCDDPEYFYDYVQGLIDGLNSGFDSHDIVSMENAKGLGYAMNTAEELKFVKDIAASTGIVLDPVYSGKAVYGLLKDMAGNPAKWKEWILKILFHAKMALVRCSDQYGPCDSMMAHSCKHCIHYRVITLKFVQENAE

SEQ ID NO: 184240 - protein, 228 aa, Zea Mays
MTTSGAPKRPSFKRSSPGKKSRLRTRRVAAGGREGEAEAEAAGTSALARALLPASVGLDAVPPVGRALPRDFFEVDALDLAPRLLGKLLRRDEVVLRITEVLKLFSGAGVNKPRNRSYLRDQERLDKLWAYPLTGRTILSTRLVGWRYWTGQSRRAFWLVPALASSTRLPSMSRRRGGSRLPARRGSAPPKTRYGHATDRCLNRNRSSPVPTRIAMCLYLLDTSECCL

SEQ ID NO: 184241 - protein, 252 aa, Zea Mays
MTTSGAPKRPSFKRSSPGKKSRLRTRRVAAGGREGEAEAEAAGTSALARALLPASVGLDAVPPVGRALPRDFFEVDALDLAPRLLGKLLRRDEVVLRITEVEAYRPNDSACHGRFGITARTAPVVLKLFSGAGVNKPRNRSYLRDQERLDKLWAYPLTGRTILSTRLVGWRYWTGQSRRAFWLVPALASSTRLPSMSRRRGGSRLPARRGSAPPKTRYGHATDRCLNRNRSSPVPTRIAMCLYLLDTSECCL

SEQ ID NO: 184242 - protein, 167 aa, Zea Mays
MTTSGAPKRPSFKRSSPGKKSRLRTRRVAAGGREGEAEAEAAGTSALARALLPASVGLDAVPPVGRALPRDFFEVDALDLAPRLLGKLLRRDEVVLRITEVEAYRPNDSACHGRFGITARTAPVFGPGGHAYVYLCYGLHMMLNVVADIEGVGAAVLIRSCSPVSGS

SEQ ID NO: 184243 - protein, 260 aa, Zea Mays
MAGTAAAALMDIDAAAPPPPPPGAAAKGKAPLSAGGRAAPWVEKYRPQSLADVAAHRDIVDTIDRLTNENRLPHLLLYGPPGTGKTSTILAVARKLYGSQYSNMILELNASDERGIDVVRQQIQDFAGARSLSFGARPSVKLVLLDEADAMTKDAQFALRRVIEKYTRSTRFALICNHVNKIIPALQSRCTRFRFAPLDGSHVRERLQHIIKSEGLSVDDGGLTALVRLSNGDMRKALNILQKKLSIFAQETPCQKISSR

SEQ ID NO: 184244 - protein, 232 aa, Zea Mays
MELHAEVTHLKEQLSQALEAKDLVSNSMIHNNRVNHEVEHLVDQDVPREISSEPQQKQQSVEINELKQKVSELMEIKAQLEDRNQKLLEESTYAKGLASAAGVELKALSEEVTKLMNQNEKLATELSSLRSPTPAPRRFNNGPRGTRRESMSRREPASRRDTNASHEREKALEALLMEKEQKEAELQRKVEESKQKEAFLESELANMWVLVAKLKKSQGYDHEDLEAKHDGS

SEQ ID NO: 184245 - protein, 472 aa, Zea Mays
MIDNESNELLLPVEGFGVSLEDSSKEEKKNRKGLLNWFKLRKRDGASILTSSEGDKSSLTKSTAPSTPIGESVNFPAEPRISNSLAGENVSSDLFSIGHGEFPSGSIHGEETLSASGKTMDHVDLLREQLKILSGEVAFNTSALKRLTEEAGRSPKNEKIQMEMKKKTDEIKGKQQQIASLEREIAHATLGTQGKVDTLEHSPSYHELLEQLNEKSLELEVKAADNRVIQDQLNEKITECMELHAEVTHLKEQLSQALEAKDLVSNSMIHNNRVNHEVEHLVDQDVPREISSEPQQKQQSVEINELKQKVSELMEIKAQLEDRNQKLLEESTYAKGLASAAGVELKALSEEVTKLMNQNEKLATELSSLRSPTPAPRRFNNGPRGTRRESMSRREPASRRDTNASHEREKALEALLMEKEQKEAELQRKVEESKQKEAFLESELANMWVLVAKLKKSQGYDHEDLEAKHDGS

SEQ ID NO: 184246 - protein, 455 aa, Zea Mays
MIDNESNELLLPVEGFGVSLEDSSKEEKKNRKGLLNWFKLRKRDGASILTSSEGDKSSLTKSTAPSTPIGESVNFPAEPRISNSLAGENVSSDLFSIGHGEFPSGSIHGEETLSASGKTMDHVDLLREQLKILSGEVAFNTSALKRLTEEAGRSPKNEKIQMEMKKKTDEIKGKQQQIASLEREIAHATLGTQGKVDTLEHSPVKAADNRVIQDQLNEKITECMELHAEVTHLKEQLSQALEAKDLVSNSMIHNNRVNHEVEHLVDQDVPREISSEPQQKQQSVEINELKQKVSELMEIKAQLEDRNQKLLEESTYAKGLASAAGVELKALSEEVTKLMNQNEKLATELSSLRSPTPAPRRFNNGPRGTRRESMSRREPASRRDTNASHEREKALEALLMEKEQKEAELQRKVEESKQKEAFLESELANMWVLVAKLKKSQGYDHEDLEAKHDGS

SEQ ID NO: 184247 - protein, 977 aa, Zea Mays
MASRPTSRQRKAGHASAAAGPKGLHHHQQLPPQSGSPTSTATTSSSRLTPELSLDGPASPLFAGLDEDPAPKENVTVTVRFRPLSPREIRQGEEVAWYADGDTVVRSEQNPSVAYAYDRVFAPTTTTRHVYDVAAQHVVSGAMEGVNGTIFAYGVTSSGKTHTMHGDQRSPGIIPLSVKDAFSIIQETPNREFLLRVSYLEIYNEVVNDLLNPAGQNLRIREDPQGTFVEGIKEEVVLSPAHALSLIAAGEEHRHVGSTNFNLLSSRSHTIFTLTIESSPCGESNEGEAVTFSQLNLIDLAGSESSRAETTGVRRKEGSYINKSLLTLGTVISKLTDGKATHIPYRDSKLTRLLQSSLSGQGRVSLICTLTPASSNSEETHNTLKFAHRAKCIEIQASQNKIIDEKSLIKKYQTEIRRLKEELEQLKMGIITGTPLKDTEEDNIILWKQKLEDGNVKLQSRLEQEEEAKAALLARIQRLTKLILVSTKATPASRFSPHPGPRRRHSFGEEELAYLPYRRRDIMIDNESNELLLPVEGFGVSLEDSSKEEKKNRKGLLNWFKLRKRDGASILTSSEGDKSSLTKSTAPSTPIGESVNFPAEPRISNSLAGENVSSDLFSIGHGEFPSGSIHGEETLSASGKTMDHVDLLREQLKILSGEVAFNTSALKRLTEEAGRSPKNEKIQMEMKKKTDEIKGKQQQIASLEREIAHATLGTQGKVDTLEHSPVKAADNRVIQDQLNEKITECMELHAEVTHLKEQLSQALEAKDLVSNSMIHNNRVNHEVEHLVDQDVPREISSEPQQKQQSVEINELKQKVSELMEIKAQLEDRNQKLLEESTYAKGLASAAGVELKALSEEVTKLMNQNEKLATELSSLRSPTPAPRRFNNGPRGTRRESMSRREPASRRDTNASHEREKALEALLMEKEQKEAELQRKVEESKQKEAFLESELANMWVLVAKLKKSQGYDHEDLEAKHDGS

SEQ ID NO: 184248 - protein, 915 aa, Zea Mays
MASRPTSRQRKAGHASAAAGPKGLHHHQQLPPQSGSPTSTATTSSSRLTPELSLDGPASPLFAGLDEDPAPKENVTVTVRFRPLSPREIRQGEEVAWYADGDTVVRSEQNPSVAYAYDRVFAPTTTTRHVYDVAAQHVVSGAMEGVNGTIFAYGVTSSGKTHTMHGDQRSPGIIPLSVKDAFSIIQETPNREFLLRVSYLEIYNEVVNDLLNPAGQNLRIREDPQGTFVEGIKEEVVLSPAHALSLIAAGEEHRHVGSTNFNLLSSRSHTIFTLTIESSPCGESNEGEAVTFSQLNLIDLAGSESSRAETTGVRRKEGSYINKSLLTLGTVISKLTDGKATHIPYRDSKLTRLLQSSLSGQGRVSLICTLTPASSNSEETHNTLKFAHRAKCIEIQASQNKIIDEKSLIKKYQTEIRRLKEELEQLKMGIITGTPLKDTEEDNIILWKQKLEDGNVKLQSRLEQEEEAKAALLARIQRLTKLILVSTKATPASRFSPHPGPRRRHSFGEEELAYLPYRRRDIMIDNESNELLLPVEGFGVSLEDSSKEEKKNRKGLLNWFKLRKRDGASILTSSEGDKSSLTKSTAPSTPIGESVNFPAEPRISNSLAGENVSSDLFSIGHGEFPSGSIHGEETLSASGKTMDHVDLLREQLKILSGEVAFNTSALKRLTEEAGRSPKNEKIQMEMKKKTDEIKGKQQQIASLEREIAHATLGTQGKVDTLEHSPSYHELLEQLNEKSLELESVEINELKQKVSELMEIKAQLEDRNQKLLEESTYAKGLASAAGVELKALSEEVTKLMNQNEKLATELSSLRSPTPAPRRFNNGPRGTRRESMSRREPASRRDTNASHEREKALEALLMEKEQKEAELQRKVEESKQKEAFLESELANMWVLVAKLKKSQGYDHEDLEAKHDGS

SEQ ID NO: 184249 - protein, 766 aa, Zea Mays
MASRPTSRQRKAGHASAAAGPKGLHHHQQLPPQSGSPTSTATTSSSRLTPELSLDGPASPLFAGLDEDPAPKENVTVTVRFRPLSPREIRQGEEVAWYADGDTVVRSEQNPSVAYAYDRVFAPTTTTRHVYDVAAQHVVSGAMEGVNGTIFAYGVTSSGKTHTMHGDQRSPGIIPLSVKDAFSIIQETPNREFLLRVSYLEIYNEVVNDLLNPAGQNLRIREDPQGTFVEGIKEEVVLSPAHALSLIAAGEEHRHVGSTNFNLLSSRSHTIFTLTIESSPCGESNEGEAVTFSQLNLIDLAGSESSRAETTGVRRKEGSYINKSLLTLGTVISKLTDGKATHIPYRDSKLTRLLQSSLSGQGRVSLICTLTPASSNSEETHNTLKFAHRAKCIEIQASQNKIIDEKSLIKKYQTEIRRLKEELEQLKMGIITGTPLKDTEEDNIILWKQKLEDGNVKLQSRLEQEEEAKAALLARIQRLTKLILVSTKATPASRFSPHPGPRRRHSFGEEELAYLPYRRRDIMIDNESNELLLPVEGFGVSLEDSSKEEKKNRKGLLNWFKLRKRDGASILTSSEGDKSSLTKSTAPSTPIGESVNFPAEPRISNSLAGENVSSDLFSIGHGEFPSGSIHGEETLSASGKTMDHVDLLREQLKILSGEVAFNTSALKRLTEEAGRSPKNEKIQMEMKKKTDEIKGKQQQIASLEREIAHATLGTQGKVDTLEHSPSYHELLEQLNEKSLELEIGEGLEREFDGWGCWWRWCDTVHT

SEQ ID NO: 184250 - protein, 400 aa, Zea Mays
MQLYLVARGGELLSEPSRVSSPLPSPPPCCSAPRSAGSTLHGPRPGLLLRALRPQSRRPSRPLKTAYYTETYTTKLASLSPHKLRRATRRSRIIPGAARQLAPSSQPAMAKPQEVRSVDSFSQLPFIRPAPAPRDATIRLFGREFPSDHNQQQQDAASDSPDAANNGSTVTCESNGAAKSGAAAERKFECHYCCRNFPTSQALGGHQNAHKRERQHAKRAHLQASLAMHRYVPGHMYGLFNYYPHPHPIGGGARFDHPAPPPPPLQHYPMWTTSASPAGPYGGGPGSMSQPINGSPVPAGLWRVPPPPAATAMENFGVSARHGASGGTAFPVGPPGGEAAACKDDKAAVMMSLLSPSPSLSSCSSTSPETKLAEEELLYAVEIYTLVLLLGGIMFDLKRK

SEQ ID NO: 184251 - protein, 81 aa, Zea Mays
MQHGGLWRELVQAASRLARWLPGCEVARRRATPPTRAGTMAWLWSSMPPQCSNFAPTTGYGTAACYRAIPIATVTSDEKDG

SEQ ID NO: 184252 - protein, 86 aa, Zea Mays
MKTGLVTLQLLTITMFLVLSSHAARWPGLGQTTSRTPARRGYLRGHGASLASAPRTAPGNSGAAWAAVTARGVCASTPALRSRHWQ

SEQ ID NO: 184253 - protein, 280 aa, Zea Mays
MLLPSSSSSSASASKGNSFGKTVNDHLRSTLSFDNKQPPFASQNFDYGQTIVRLLACISYPYNRSRSGDVWAAYESRTSTATVLHLKQFRSQIAGGGSSTRIPLPLELAENEPIYVNPKQYHGILRRRQLRAKLEAQNKLVRARKPYLHESRHLHAMKRARGSGGRFLNTKQLQQSHTALTRSTTTSGTSSSGSTHLRLGGGAAAAGDRSVLAPKTMASQDSSKKAVSSALAFTATPMLRRDDGFLQHPSHLFSFSGHFGQASAQAGVHNGSQHRVPVMR

SEQ ID NO: 184254 - protein, 242 aa, Zea Mays
MQPRGPDQRKGRRGGGKAQRAGSLGGRTEGGVWEPCFFPLRLRLPLPLPKFRSQIAGGGSSTRIPLPLELAENEPIYVNPKQYHGILRRRQLRAKLEAQNKLVRARKPYLHESRHLHAMKRARGSGGRFLNTKQLQQSHTALTRSTTTSGTSSSGSTHLRLGGGAAAAGDRSVLAPKTMASQDSSKKAVSSALAFTATPMLRRDDGFLQHPSHLFSFSGHFGQASAQAGVHNGSQHRVPVMR

SEQ ID NO: 184255 - protein, 94 aa, Zea Mays
MEKSGMELLTPETDGSVDVSHTDLEQASALYFSAQQESFNTVDFVVSVEALSCRVTFAPCSLSWHPIFVCVLPQSPIWKIHLHNQASSVTCSHC

SEQ ID NO: 184256 - protein, 64 aa, Zea Mays
MATDVCPYLSITIFSGRPELHMFQRVENIVMDNVVTPTSNNIYSYIPHRPEAYTYICITRITKN

SEQ ID NO: 184257 - protein, 162 aa, Zea Mays
MHHVHERLRRSNAPTLERLQRHSNATSASAAPPNNSNATPALAAVELYCSQVHLILVSAAQDPLPLGPGHLHRRQDLRAGHRRRALRAGRRQGHADRRPEQEASYHRHPQEEDQAPARLGRSLHQKKIGEVCRLISQLIASINQCQFIYCSTSVLANVKTWR

SEQ ID NO: 184258 - protein, 129 aa, Zea Mays
MHHVHERLRRSNAPTLERLQRHSNATSASAAPPNNSNATPALAAVELYCSQVHLILVSAAQDPLPLGPGHLHRRQDLRAGHRRRALRAGRRQGHADRRPEQEASYHRHPQEEDQAPASSSIAQPQYWPT

SEQ ID NO: 184259 - protein, 317 aa, Zea Mays
MERISGPRLAVLLALAVFTAVAAAATDEVRAQSTYIIHLAPGHPALSAARVNGGDEAALRRLLPRRLRAPRPRVLYSYQHAATGIAARLTPQQAAHAAAGEGVLAVYPDQARQLHTTHTPAFLRLTEAAGLLPAATGGASSSAVVGVLDTGLYPIGRSSFAAADGLGPAPASFSGGCVSAGSFNASAYCNSKLIGAKFFYQGYEAALGHPIDETKESKSPLDTEGHGTHTASTAAGSPVAGAGFFDYAEGQAVGMDPGARIAAYKICWTSGCYDSDILAAMDEAVADGVDVISLSVGANGAGNMDRTFCQHENGLKT

SEQ ID NO: 184260 - protein, 501 aa, Zea Mays
MGSARRPRPSLGYEAALGHPIDETKESKSPLDTEGHGTHTASTAAGSPVAGAGFFDYAEGQAVGMDPGARIAAYKICWTSGCYDSDILAAMDEAVADGVDVISLSVGANGYAPSFFTDSIAIGAFHAVSKGIVVSCSAGNSGPGEYTAVNIAPWILTVGASTIDREFPADVVLGDGRVFGGVSLYAGDPLDSTQLPLVFAGDCGSPLCLMGELDSKKVAGKMVLCLRGNNARVEKGAAVKLAGGVGMILANTEESGEELIADSHLVPATMVGQKFGDKIRYYVQTDPSPTATIVFRGTVIGKSRSAPRVAAFSSRGPNYRAPEILKPDVIAPGVNILAAWTGAASPTDLDIDSRRVEFNIISGTSMSCPHVSGLAALLRQAHPEWSPAAIKSALMTTAYNLDNSGETIKDLATGVESTPFVRGAGHVDPNAALDPGLVTHRSPTARRNSLAPATLTTLPSPPSSPPTKTRSPTAGWCATSAATPARCTSRRSPARTAWMSR

SEQ ID NO: 184261 - protein, 219 aa, Zea Mays
MGIDRQDVRIVCHFNLPKSMESFYQESGRAGRDQRPSRSVLYYGLDDRRRMEFILRNPKTKKSQPSSSSNELSEKALADFSQIIDYCEISSCRRKKIIESFGEKVQPTLCQRSCDACKHPNLVLSRLEELRRVPNCRFNKISPVFQSSVKEAHLDTEFWNREDEASLSAEDISDSDDGNEVVSNIAISKVPAKAGLDAKFKALERAENAYYQGKGWRPC

SEQ ID NO: 184262 - protein, 335 aa, Zea Mays
MYISASIWPLAIGLWILLHRMGIDRQDVRIVCHFNLPKSMESFYQESGRAGRDQRPSRSVLYYGLDDRRRMEFILRNPKTKKSQPSSSSNELSEKALADFSQIIDYCEISSCRRKKIIESFGEKVQPTLCQRSCDACKHPNLVLSRLEELRRVPNCRFNKISPVFQSSVKEAHLDTEFWNREDEASLSAEDISDSDDGNEVVSNIAISKVPAKAGLDAKFKALERAENAYYQGKGQAKQQGGGLADKKSISETLRDACRKRLLDALGQAKLRLGNIPCGDEASATHLETECFKKYVKAGKTFYNSQIAATVRWLSSATLSQMRDRLDTLYRPNQR

SEQ ID NO: 184263 - protein, 237 aa, Zea Mays
MKCRPSYRKLSSLRKQFPDIPLLALTATAVPKVQKDVVSSLCLQNPVILRASFNRPNIFYEGQKLPQPWKRLWKSWAPPKCKFFLWLAIRNKCWTSDRLEMRGLDHPVSCLFCDQEQETIQHILCSCVFARQFWHSILFGLNVGNLSPSRDEISFADWWRKTSKKIHKSKRKGMNSIIILGAWCLWIHRNKAVFDGETPSLSSIRCVFLDEIGCWITAGAKHLQSFGLVLARNLHRV

SEQ ID NO: 184264 - protein, 171 aa, Zea Mays
MKDMKPLNDHVLIKQRPARRHDVVVVAGDGGREQQEEVQGRAQAQVGQVGVGDPAAQQPRAHLAGLLRRPRQGRARLRRRLRVPPRAGRRRRGPQLPGLAAAGPGRGTQQRPAGGAGGRALPRQPRRRHGPAGGRGAHHGRRRRRRLLGAAVGRLLLLRGARRGRRRPWWY

SEQ ID NO: 184265 - protein, 81 aa, Zea Mays
MAQKIHVMQDLTPNQLQQALSKTFSAKKRKSKLQKAWDGTKVVYNIASWSATAIGIYQNPAIVQAATAAFWTSCRVISKFL

SEQ ID NO: 184266 - protein, 111 aa, Zea Mays
MEPASSSALPSPPPAEARRTPPEELKLRRRTLETVLEQCQRALEMMHEDGLGTAAEGASFKEVEVEEEEEEEEGSGDSGGVERAPPPPPSEADYEADEICGSHVCYILMIA

SEQ ID NO: 184267 - protein, 121 aa, Zea Mays
MEHHHKPGLRVRLRITAARRRAWLSACLRPPCRKPPRRDHSDSVHKVARREIGGGHRRPPRPAAPSSSSFSCPEKFRNFQLQTVVCQESGRLLDVSLTATCRLSSWPRGKNHQRGHLERTR

SEQ ID NO: 184268 - protein, 103 aa, Zea Mays
MEHHHKPGLRVRLRITAARRRAWLSACLRPPCRKPPRRDHSDSVHKVARREIGGGHRRPPRPAAPSSSSFSCPEKFRNFQLQESGRLLDVSLTATCRLSSWPR

SEQ ID NO: 184269 - protein, 320 aa, Zea Mays
MRPKYLTGKWPSWPCFWRLPAARGEWRQGEKEAAAAAAAAPSARFLPPPPASPLRVRAPPGVASLHLWAAGTYVRGEPHASLSPLGMDAGGEKCGDAAAEGGDLYAVLGLKKECSEAELKVAYRKLAKKWHPDKCSSSSSVKHMEEAKEKFQEIQGAYSVLSDANKRLLYDVGVYDDEDDEESMQGMGDFIGEMAQMMSQAQPTRTAKAHQFQGPAKSRTCSTSPSSSPSPPPTTAKDAEVPSCNGFNKRGSSALDSGKPPKPVEGGAGQNQAGFCFGVSDTKETPKLPGQNASRRRNGRKQKLSSKHDVSSEDETAAGS

SEQ ID NO: 184270 - protein, 420 aa, Zea Mays
MAPEPEDDIMNEKNPRPLDEDDIALLKTYGLGPYSTSIKKVEKEIKEMAKKINDLCGIKESDTGLAPPSQWDLVSDKQMMQEEQPLQVARCTKIISPNTDDAKYVINVKQIAKFVVGLGDKVSPTDIEEGMRVGVDRNKYQIQIPLPPKIDPSVTMMTVEEKPDVTYNDVGGCKEQIEKMREVVELPMLHPEKFVKLGIDPPKGVLCYGPPGTGKTLLARAVANRTDACFIRVIGSELVQKYVGEGARMVRELFQACIVFFDEVDAIGGARFDDGVGGDNEVQRTMLEIVNQLDGFDARGNIKVLMATNRPDTLDPALLRPGRLDRKVEFGLPDLEGRTQIFKIHTRTMNCERDIRFELLARLCPNSTGADIRSVCTEAGMYAIRARRKTVTEKDFLDAVNKVIKGYQKFSATPKYMVYN

SEQ ID NO: 184271 - protein, 317 aa, Zea Mays
MAPEPEDDIMNEKNPRPLDEDDIALLKTYGLGPYSTSIKKVEKEIKEMAKKINDLCGIKESDTGLAPPSQWDLVSDKQMMQEEQPLQVARCTKIISPNTDDAKYVINVKQIAKFVVGLGDKVSPTDIEEGMRVGVDRNKYQIQIPLPPKIDPSVTMMTVEEKPDVTYNDVGGCKEQIEKMREVVELPMLHPEKFVKLGIDPPKGVLCYGPPGTGKTLLARAVANRTDACFIRVIGSELVQKYVGEGARMVRELFQMARSKKACIVFFDEVDAIGGARFDDGVGGDNEVQRTMLEIVNQLDGFDARGNIKVLMATNRS

SEQ ID NO: 184272 - protein, 260 aa, Zea Mays
MAPEPEDDIMNEKNPRPLDEDDIALLKTYGLGPYSTSIKKVEKEIKEMAKKINDLCGIKESDTGLAPPSQWDLVSDKQMMQEEQPLQVARCTKIISPNTDDAKYVINVKQIAKFVVGLGDKVSPTDIEEGMRVGVDRNKYQIQIPLPPKIDPSVTMMTVEEKPDVTYNDVGGCKEQIEKMREVVELPMLHPEKFVKLGIDPPKGVLCYGPPGTGKTLLARAVANRTDACFIRVIGSELVQKYVGEGARMVRELFQVYLGL

SEQ ID NO: 184273 - protein, 123 aa, Zea Mays
MFLTKQAPKDFLQIIDFDKDTIMKVLNRAIEVKALIKSGDKSFQPFKGKTMVMIFAKPSMRTRVSFETGFFLLGGHAIYLGPDDIQMGKRGLFDKAAKLQRPRRLKGENAQYSIYLSCKKQLQ

SEQ ID NO: 184274 - protein, 192 aa, Zea Mays
MQVAQDKPLTRRADRTSPQRPASAYPDGVLELGKARTWRSADYGAALYFPVRSLKQQQRDRVDAEQQKTRATPPPQKCHRRRRLSPTPCRKGRGMRRHRSRSVGAMAEAGMKRSLIGVPCSMCNHLIARGTCIHIASPLWELVIEASSTAIITASSSIVAECCCRLSTSFSPPFHPFNVHVLPSHHINWVVS

SEQ ID NO: 184275 - protein, 470 aa, Zea Mays
MASRLLTRSAASRLVSHLHRKTPGITPCLLTRGPALASLLGPTDGLPHAADSTLLRVPMRWLSSPSSEAVAEAPMTADGLTVDSIADKGWTILPEAESDWRSHAAAVAQSVKVIKKRLKWGWILERTKQLAVVLEKPDLWEDPVFAGRVSREQGELMGKIKSVNQFEQELIEHIEMLRLAREENDNELEMESMKALADMRRSAKEKELNALLSGDNDSCSCFIEVQAGAGGTESMDWAAMVMNMYRSWAQRRGYKITVVEEMSGEVAGIKRATIKVDGEYAFGYAKAEVGVHRLVRISPFDSGKRRHTSFAAVAVIPILGDTTSRYQIKDSDLRIERFRSGGPGGQHANTTESAIRIVHIPTGISATSQNERSQHMNKASAMAVLQSRLDQLEIARQAQMNAEHTQSLNEISWGNQIRSYVLHPYRMVKDLRTNYEVSDPDSVLEGDLDDFILNYLSSSLDEADITAAAL

SEQ ID NO: 184276 - protein, 280 aa, Zea Mays
MNLRCMKALADMRRSAKEKELNALLSGDNDSCSCFIEVQAGAGGTESMDWAAMVMNMYRSWAQRRGYKITVVEEMSGEVAGIKRATIKVDGEYAFGYAKAEVGVHRLVRISPFDSGKRRHTSFAAVAVIPILGDTTSRYQIKDSDLRIERFRSGGPGGQHANTTESAIRIVHIPTGISATSQNERSQHMNKASAMAVLQSRLDQLEIARQAQMNAEHTQSLNEISWGNQIRSYVLHPYRMVKDLRTNYEVSDPDSVLEGDLDDFILNYLSSSLDEADVST

SEQ ID NO: 184277 - protein, 260 aa, Zea Mays
MHHDINGWQTVIQMPEGEIEELPYALKKVEPVDRLEISQENGTELSEKASFYKGVFYNYLSIGMDAQVAYGFHHLRDEKPYLAQGPVANKLIYAGYSCTQGWFCTPCTASPQLRGLKNILRLSIKKANCSEWEQVKMPSSVRSLVVLNLYNYGSGRHPWGDLRPEYLEKKGFVEAHSDDGLLEIFGLKEGWHASFVMAELIKAKHIAQAAAIKFEMRGGEWNRAYVQMDGEPWKQPLLQEHSTIVEINKVPYHSLMINGE

SEQ ID NO: 184278 - protein, 273 aa, Zea Mays
MAVKRYLSKASRSPICRLDSWQTVIQMPEGEIEELPYALKKVEPVDRLEISQENGTELSEKASFYKGVFYNYLSIGMDAQVAYGFHHLRDEKPYLAQGPVANKLIYAGYSCTQGWFCTPCTASPQLRGLKNILRLSIKKANCSEWEQVKMPSSVRSLVVLNLYNYGSGRHPWGDLRPEYLEKKGFVEAHSDDGLLEIFGLKEGWHASFVMAELIKAKHIAQAAAIKFEMRGGEWNRAYVQMDGEPWKQPLLQEHSTIVEINKVPYHSLMINGE

SEQ ID NO: 184279 - protein, 308 aa, Zea Mays
MKREPVPPTGIIPLGTGNDLARSFGWGGSFPFGWRSAVKRYLSKASRSPICRLDSWQTVIQMPEGEIEELPYALKKVEPVDRLEISQENGTELSEKASFYKGVFYNYLSIGMDAQVAYGFHHLRDEKPYLAQGPVANKLIYAGYSCTQGWFCTPCTASPQLRGLKNILRLSIKKANCSEWEQVKMPSSVRSLVVLNLYNYGSGRHPWGDLRPEYLEKKGFVEAHSDDGLLEIFGLKEGWHASFVMAELIKAKHIAQAAAIKFEMRGGEWNRAYVQMDGEPWKQPLLQEHSTIVEINKVPYHSLMINGE

SEQ ID NO: 184280 - protein, 329 aa, Zea Mays
MRIVVAGGDGTVGWVLGCLSDLYKMKREPVPPTGIIPLGTGNDLARSFGWGGSFPFGWRSAVKRYLSKASRSPICRLDSWQTVIQMPEGEIEELPYALKKVEPVDRLEISQENGTELSEKASFYKGVFYNYLSIGMDAQVAYGFHHLRDEKPYLAQGPVANKLIYAGYSCTQGWFCTPCTASPQLRGLKNILRLSIKKANCSEWEQVKMPSSVRSLVVLNLYNYGSGRHPWGDLRPEYLEKKGFVEAHSDDGLLEIFGLKEGWHASFVMAELIKAKHIAQAAAIKFEMRGGEWNRAYVQMDGEPWKQPLLQEHSTIVEINKAPCPCWHI

SEQ ID NO: 184281 - protein, 246 aa, Zea Mays
MAAAAATATTTSPARASWRPTVPATSASAAGVCFRVGAKRFPGLRTASTCRHRHRGRTRLTTAHVKSGEAEGRPSTEESATGIGGPDEDSLRRELETAIEEEDYARAAALRDELRVLQEDCRAAVLAANARFYAAFKDGDLAAMRRAWARGDHVYVVHPSAGRISGYEMVMQSWEMVCDAGYEFPLQVDLQDVEVRVRGGVGYVTCLEMVRTKGSSSWGKQLATNVFEEVDGEWLMCVHHASHFDE

SEQ ID NO: 184282 - protein, 948 aa, Zea Mays
MRAYAATPAAVATLPSAAPPLTPDAAAVLSRAAADASRRRHAHTTPLHAAAALLSGPAPLLRDACVAGLASPHPLRCRALDLCFSVALDRLPTSTELQHHEGGAFHHASAAPPLSNALAAALKRAYAHHRRIGSGGVETDDHRVGVPHLVLAILDDPSVARVMREASFSSTAVKAAMLRSLSDPAAPDAAAYVSARVMHRQASHREEEVAKVVEVLKRAKKRNPVLVGDTVDVDAVVQEVVTLIQRQRLGNARVISFPKEFGDLVDMDRARLTAKVKELGEAVRSASASAGVVVNLGNLQWLVEERCAAPRGEQQQEKRRDVVLDTARAAVAEMARVLNLSGEGEHRVWVIGTATCATYLKCQVYHPALESEWDLQAVPITPRPPPPPPPPLGLSPRGILSSSVEVLSTAMTSPMQRAPSLCSACAEGYERERAEMASSERAPCPAEQPMSQWLQIGTPSSGRPADRAQEKAREADELRRRWRDRCAQLHSHGRPPLVTCSEWNGASILASMQAAPPVVPVRPLVQRRVAVDTDLALGLAAARPACETDDKLLVRRLTEAVRWQPEAAAAVASTIAKARSSESRRRRTTAGVDAWIVFAGPDVAGKRSMAEALSKSVFGTGAVTLRLGWPQAGDDGGESVVSCRGQTALDRMAEAIRANPFRVVVLDGVDHADSVVHASILRAVESGRLSDSHGRDVALGNNIFVVISQWSPPLPEPEHLRKSQEAEPFLPDSQWNLEHGMTAGGKKRRPEQQLEGDRRTKARKHSAREPLPLDLNLSMSDDHTDAVDDSGGEGSRNSSSDLTVEHEQEYVQPAHSGRCSAAPLTVSELIKAVDGVVVFKPPVSLEPLKRSVSDLVVPAAKLGEITVGGWPVHVDDGLLGRLAARAAGAAAAGTPMEAWTTGEVLCPSSMRQFKRSLSSNDVDGATVEGSRRRKDGEMFPMPVTVDGN

SEQ ID NO: 184283 - protein, 204 aa, Zea Mays
MPFAIGIYGFCYSGHSVFPNIYQSMSDRSKFPKALFICFAICTAMYGSFAVIGFLMFGENTLSQITLNLPKHSIASKVALWTTVINPFTKYALLLNPLARSLEELRPEGFLNETSCSIILRTALVASTVCIAFLLPFFGLVMALIGSLLSILVAVIMPALCFLKIAQNKATCPQVIASVGIVILGVVSAALGTYSSVKKIAENY

SEQ ID NO: 184284 - protein, 90 aa, Zea Mays
MDELHVYLVSSNSDLQLFLHFLSDSRSKMSSVFCFVRLYSQPQSKNGINSFGGLEATLVDLLDIMYIMGLKDGFQKARAILGNDGCANSF

SEQ ID NO: 184285 - protein, 364 aa, Zea Mays
MSGANSSLPMPPPPPPPAPAASALDNVEAKISPSIVFVVAILAIVFFVCGLLHLLVRHLLRLRRRRRRAREDADSVTAFQGQLQQLFHLHDAGVDQAFIDALPVFLYRNVVGAAPGGKDPFDCAVCLCEFAPDDQLRLLPKCSHAFHLECIDTWLLSHSTCPLCRRSLLADLSPTCSPVVMVLESESARDMAASAARATDAEPSAGPGATLPRDQGADEVVEVKLGKFMCVEGSTANANAKAADGAGTSGDGDVDVDASAKEGLGLGQRRCHSMGSYEYVMDDHASLRVAIKPPKKKPGAAAACRRWRRRGRPSRGGPCSGSSEAGSRAESGAVRDQQRTVARRLKKRKQRNSFVLFRQIGSSE

SEQ ID NO: 184286 - protein, 318 aa, Zea Mays
MLFGTNLLAIVGTGEQPAMSPRRLCLFNTKTGASKRDLNFKTSILAVRLSRKRLVVVLQDRTFVYDLNSTTILDEIETVPNTKGLCAFAPNSEECYLALPASTSKGSALVYKASKPELICQIDAHLAPLAAMVFSLNGMYLATASEKGTMIRVHLVAQATKSHSFRRGTYPSTIYSLAFSPSVDLPDVLVATSSSGSLHMFFLDASRNARRQANTLFSSVIPGSVTDALDPANHHVIHNVVTADIKSCLAVHSVENSQNSSKFPSLKTVIYIVTHNGYFREYLIGTTKSNESSWLLEREFNLLDAYSGSPKQNELHID

SEQ ID NO: 184287 - protein, 206 aa, Zea Mays
MASSSSPSQVICASFNQDNSMFSVGTKDGFKIFDARNGRLCYEKSLGGFNIVEMLFGTNLLAIVGTGEQPAMSPRRLCLFNTKTGASKRDLNFKTSILAVRLSRKRLATTSIYLGNISGAYEPLVHILSTTINLRSNVFPHLLCCPIYFAKNILHHFPSTPCTKGYVWEDVGSKMDGHDLICASGASKSHVHLICQFLLWLILMFC

SEQ ID NO: 184288 - protein, 273 aa, Zea Mays
MCRLVVVLQDRTFVYDLNSTTILDEIETVPNTKGLCAFAPNSEECYLALPASTSKGSALVYKASKPELICQIDAHLAPLAAMVFSLNGMYLATASEKGTMIRVHLVAQATKSHSFRRGTYPSTIYSLAFSPSVDLPDVLVATSSSGSLHMFFLDASRNARRQANTLFSSVIPGSVTDALDPANHHVIHNVVTADIKRSIHYCCLAVHSVENSQNSSKFPSLKTVIYIVTHNGYFREYLIGTTKSNESSWLLEREFNLLDAYSGSPKQNELHID

SEQ ID NO: 184289 - protein, 217 aa, Zea Mays
MCRLVVVLQDRTFVYDLNSTTILDEIETVPNTKGLCAFAPNSEECYLALPASTSKGSALVYKASKPELICQIDAHLAPLAAMVFSLNGMYLATASEKGTMIRVHLVAQATKSHSFRRGTYPSTIYSLAFSPSVDLPDVLVATSSSGSLHMFFLDASRNARRQANTLFSSVIPGSVTDALDPANHHVIHNVVTADIKSCLAVHSVENSQNSSKFPSLK

SEQ ID NO: 184290 - protein, 268 aa, Zea Mays
MCRLVVVLQDRTFVYDLNSTTILDEIETVPNTKGLCAFAPNSEECYLALPASTSKGSALVYKASKPELICQIDAHLAPLAAMVFSLNGMYLATASEKGTMIRVHLVAQATKSHSFRRGTYPSTIYSLAFSPSVDLPDVLVATSSSGSLHMFFLDASRNARRQANTLFSSVIPGSVTDALDPANHHVIHNVVTADIKSCLAVHSVENSQNSSKFPSLKTVIYIVTHNGYFREYLIGTTKSNESSWLLEREFNLLDAYSGSPKQNELHID

SEQ ID NO: 184291 - protein, 187 aa, Zea Mays
MVFSLNGMYLATASEKGTMIRVHLVAQATKSHSFRRGTYPSTIYSLAFSPSVDLPDVLVATSSSGSLHMFFLDASRNARRQANTLFSSVIPGSVTDALDPANHHVIHNVVTADIKSCLAVHSVENSQNSSKFPSLKTVIYIVTHNGYFREYLIGTTKSNESSWLLEREFNLLDAYSGSPKQNELHID

SEQ ID NO: 184292 - protein, 411 aa, Zea Mays
MWAASCLASCCAACACEACRTAVGSIGRRSARIAYCGLFALSLFASWALREVAAPLLQSIPWINHFHKTPDREWFETDAVLRVSLGNFLFFTILAVIMAGIKDQKDPRDKIHHGGWMAKIFCWVIIVFLMFFVPNGVVSFYESISKFGSGLFLLVQVVLLLDFVHGWNENWVAKDEQYMALLVVSVVCYIATFCFSGLLFHWFTPSGHDCGLNLFFIVFTLILVFAFAIVALHPKINGSLLPASVIGMYCTYLCYSGLSSEPRDYECNGLHNHSKAVSTGSLTLGLLTTVLSVVYSAVRAGSSATVLSPPDSPRGTDKPLLPFSKADEQEDKKDVPRPVTYSYSFFHLIFSLASMYSAMLLTGWSTSVGESGKLVDVGWPSVWVRIATQWATAGLFIWSLVAPVLFPDREF

SEQ ID NO: 184293 - protein, 930 aa, Zea Mays
MDMPNPFRKSDIISVVPIYKHVACSSADGRTLLESSKTFLDKGKLEDAVSYGTKALAKLVAVCGPYHRMTAGAYSLLAVVLYHTGDFNQATIYQQKALDINERELGLDHPDTMKSYGDLAVFYYRLQHTELALKYVNRALYLLHLTCGPSHPNTAATYINVAMMEEGLGNVHVALRYLHEALKCNQRLLGADHIQTAASYHAIAIALSLMEAYSLSVQHEKTTLRILQAKLGSEDLRTQDASAWLEYFESKALEQQEAARNGTPKPDASIASRGHLSVSDLLDYINPDDELKAKEMQRKQVRAKIKGRTGQNQSELVDDEDQRSPAPNNDKNLLTENGNSGVKENGTFVEHVKDEISSDTAIHIPQDGFTEECTSDEGWQAAVPKGRSTGSRRTGAGTRRPNLAKINTSSLNSENGRYKGRGISNFSSPRVSPSEAAVSIGSRPLAKKLAKSSSFNSKAVSTAVSSNTGENSFNLNSKPASPAIATAAAKVIPSTTPSASQTVRKSLSYKEVAIAAPGTLAKASSDVHTEEKDTGDQGASPESSNSKSPKEINGHPSGEKDGAIEVSPQDDTSQVSKSPDGGKPEQTDVLIGSNQPDTVHKKSSDPAETSVAKDIDLPAPVISSGTQTEADTPNDEAPTAIEANDSSSNDDERDSGADTPEQLSSGGENEKSSLSESEKNDTPREGAKETTSKLSAAAAPFNPSSVPAFGSMAVPGFREHGGLLPSPANVPPMLSIPLRKHPHQSATARVPYGPRLAGGYNRSGHRGLRKKPVLTSGEAPTETNTSGPRIMNPNAPEFVPGQSRSPNGHPASPNGPLASPGGIPSSPQDLLSSPDSTLESPVTASPQVSECSQISPEGDVEGVGVKQNMDDTNHPESKDGEVEPEQTKAPEGTEEGAAVKDAAEELIAAEQPKSWADYSDGEVEVVEVAS

SEQ ID NO: 184294 - protein, 1604 aa, Zea Mays
MYPPPKLEQFYDFFTFSHLTPPLHYIRRSSRPFVDDKREDDFFQIDVRVCNGKPVTIVASQEGFYPAGKRALISRSLVGLLQQTSRAFDGAYKALMKAFVEHNKFGNLPYGFRSNTWVAPPVVADSPSVFPPLPTEDETWGGSGGGQGRDGKHDHRPWVKEFAILAAMPCKTAEERQIRDRKAFLLHSLFVDVAVLKAVASIQQLISNHTSLHETENGTIGSVLHTEQVGDMKIMITKDKTDASSKLDVKLDGSQAPGMSSDELAQRNLLKGITADESATVHDTATLGVVIVKHCGYTAVVQVPVDTELPAASVAQQEIHIEDQPEGGSNALNVNSLRMLLHKSCAQAPGVQRLQTSDPQDNEATQTFVRKILTDSLQKLENEVPIVTRPIRWELGACWVQHLQNPTSEKTETKKSDETKDVPTVKGLGKQFGQLKEIKKKTDDKGGKGTYVKGNNSPNTDNGHTDNTASVKDDKDIILQRLLPEAAFQRLKESETGLHVKSLDELIEMSHKYYDDTALPKLVADFGSLELSPVDGRTLTDFMHTRGLQMRSLGRVVELSDKLPHIQSLCIHEMVVRAFKHIVRAVIAAVDDINDMADSVASCLNILLGPFLEENNDKDCGEDHNLRKRWLEVFLIKRFGWKWKDEYCLDLRKYAILRGLCHKVGLELITKDYDMDMPNPFRKSDIISVVPIYKHVACSSADGRTLLESSKTFLDKGKLEDAVSYGTKALAKLVAVCGPYHRMTAGAYSLLAVVLYHTGDFNQATIYQQKALDINERELGLDHPDTMKSYGDLAVFYYRLQHTELALKYVNRALYLLHLTCGPSHPNTAATYINVAMMEEGLGNVHVALRYLHEALKCNQRLLGADHIQTAASYHAIAIALSLMEAYSLSVQHEKTTLRILQAKLGSEDLRTQDASAWLEYFESKALEQQEAARNGTPKPDASIASRGHLSVSDLLDYINPDDELKAKEMQRKQVRAKIKGRTGQNQSELVDDEDQRSPAPNNDKNLLTENGNSGVKENGTFVEHVKDEISSDTAIHIPQDGFTEECTSDEGWQAAVPKGRSTGSRRTGAGTRRPNLAKINTSSLNSENGRYKGRGISNFSSPRVSPSEAAVSIGSRPLAKKLAKSSSFNSKAVSTAVSSNTGENSFNLNSKPASPAIATAAAKVIPSTTPSASQTVRKSLSYKEVAIAAPGTLAKASSDVHTEEKDTGDQGASPESSNSKSPKEINGHPSGEKDGAIEVSPQDDTSQVSKSPDGGKPEQTDVLIGSNQPDTVHKKSSDPAETSVAKDIDLPAPVISSGTQTEADTPNDEAPTAIEANDSSSNDDERDSGADTPEQLSSGGENEKSSLSESEKNDTPREGAKETTSKLSAAAAPFNPSSVPAFGSMAVPGFREHGGLLPSPANVPPMLSIPLRKHPHQSATARVPYGPRLAGGYNRSGHRGLRKKPVLTSGEAPTETNTSGPRIMNPNAPEFVPGQSRSPNGHPASPNGPLASPGGIPSSPQDLLSSPDSTLESPVTASPQVSECSQISPEGDVEGVGVKQNMDDTNHPESKDGEVEPEQTKAPEGTEEGAAVKDAAEELIAAEQPKSWADYSDGEVEVVEVAS

SEQ ID NO: 184295 - protein, 903 aa, Zea Mays
MAPKAGKAKPKARGDRKKKEEKVLPTVLDVTVETPDYTLLTLKGISTDRILDIRKLLAVHVDTCHLTSFSLSHEVRGGQLKDTVEIAALKPCHLTIVEEDYTEELAVAHVRRLLDIVACTTVFGAKKPEPKPDAADAAAESAKAGSPSPGKTAPGGGEEPMYPPPKLEQFYDFFTFSHLTPPLHYIRRSSRPFVDDKREDDFFQIDVRVCNGKPVTIVASQEGFYPAGKRALISRSLVGLLQQTSRAFDGAYKALMKAFVEHNKFGNLPYGFRSNTWVAPPVVADSPSVFPPLPTEDETWGGSGGGQGRDGKHDHRPWVKEFAILAAMPCKTAEERQIRDRKAFLLHSLFVDVAVLKAVASIQQLISNHTSLHETENGTIGSVLHTEQVGDMKIMITKDKTDASSKLDVKLDGSQAPGMSSDELAQRNLLKGITADESATVHDTATLGVVIVKHCGYTAVVQVPVDTELPAASVAQQEIHIEDQPEGGSNALNVNSLRMLLHKSCAQAPGVQRLQTSDPQDNEATQTFVRKILTDSLQKLENEVPIVTRPIRWELGACWVQHLQNPTSEKTETKKSDETKDVPTVKGLGKQFGQLKEIKKKTDDKGGKGTYVKGNNSPNTDNGHTDNTASVKDDKDIILQRLLPEAAFQRLKESETGLHVKSLDELIEMSHKYYDDTALPKLVADFGSLELSPVDGRTLTDFMHTRGLQMRSLGRVVELSDKLPHIQSLCIHEMVVRAFKHIVRAVIAAVDDINDMADSVASCLNILLGPFLEENNDKDCGEDHNLRKRWLEVFLIKRFGWKWKDEYCLDLRKYAILRGLCHKVGLELITKDYDMDMPNPFRKSDIISVVPIYKHVACSSADGRTLLESSKTFLDKGKLEDAVSYGTKVRFVILLLHPYVKNS

SEQ ID NO: 184296 - protein, 721 aa, Zea Mays
MEAYSLSVQHEKTTLRILQAKLGSEDLRTQDASAWLEYFESKALEQQEAARNGTPKPDASIASRGHLSVSDLLDYINPDDELKAKEMQRKQVRAKIKGRTGQNQSELVDDEDQRSPAPNNDKNLLTENGNSGVKENGTFVEHVKDEISSDTAIHIPQDGFTEECTSDEGWQAAVPKGRSTGSRRTGAGTRRPNLAKINTSSLNSENGRYKGRGISNFSSPRVSPSEAAVSIGSRPLAKKLAKSSSFNSKAVSTAVSSNTGENSFNLNSKPASPAIATAAAKVIPSTTPSASQTVRKSLSYKEVAIAAPGTLAKASSDVHTEEKDTGDQGASPESSNSKSPKEINGHPSGEKDGAIEVSPQDDTSQVSKSPDGGKPEQTDVLIGSNQPDTVHKKSSDPAETSVAKDIDLPAPVISSGTQTEADTPNDEAPTAIEANDSSSNDDERDSGADTPEQLSSGGENEKSSLSESEKNDTPREGAKETTSKLSAAAAPFNPSSVPAFGSMAVPGFREHGGLLPSPANVPPMLSIPLRKHPHQSATARVPYGPRLAGGYNRSGHRGLRKKPVLTSGEAPTETNTSGPRIMNPNAPEFVPGQSRSPNGHPASPNGPLASPGGIPSSPQDLLSSPDSTLESPVTASPQVSECSQISPEGDVEGVGVKQNMDDTNHPESKDGEVEPEQTKAPEGTEEGAAVKDAAEELIAAEQPKSWADYSDGEVEVVEVAS

SEQ ID NO: 184297 - protein, 865 aa, Zea Mays
MAPKAGKAKPKARGDRKKKEEKVLPTVLDVTVETPDYTLLTLKGISTDRILDIRKLLAVHVDTCHLTSFSLSHEVRGGQLKDTVEIAALKPCHLTIVEEDYTEELAVAHVRRLLDIVACTTVFGAKKPEPKPDAADAAAESAKAGSPSPGKTAPGGGEEPMYPPPKLEQFYDFFTFSHLTPPLHYIRRSSRPFVDDKREDDFFQIDVRVCNGKPVTIVASQEGFYPAGKRALISRSLVGLLQQTSRAFDGAYKALMKAFVEHNKFGNLPYGFRSNTWVAPPVVADSPSVFPPLPTEDETWGGSGGGQGRDGKHDHRPWVKEFAILAAMPCKTAEERQIRDRKAFLLHSLFVDVAVLKAVASIQQLISNHTSLHETENGTIGSVLHTEQVGDMKIMITKDKTDASSKLDVKLDGSQAPGMSSDELAQRNLLKGITADESATVHDTATLGVVIVKHCGYTAVVQVPVDTELPAASVAQQEIHIEDQPEGGSNALNVNSLRMLLHKSCAQAPGVQRLQTSDPQDNEATQTFVRKILTDSLQKLENEVPIVTRPIRWELGACWVQHLQNPTSEKTETKKSDETKDVPTVKGLGKQFGQLKEIKKKTDDKGGKGTYVKGNNSPNTDNGHTDNTASVKDDKDIILQRLLPEAAFQRLKESETGLHVKSLDELIEMSHKYYDDTALPKLVADFGSLELSPVDGRTLTDFMHTRGLQMRSLGRVVELSDKLPHIQSLCIHEMVVRAFKHIVRAVIAAVDDINDMADSVASCLNILLGPFLEENNDKDCGEDHNLRKRWLEVFLIKRFGWKWKDEYCLDLRKYAILRGLCHKVGLELITKDYDMDMPNPFRKSDIISVVPIYKVIFSFLKEIAE

SEQ ID NO: 184298 - protein, 818 aa, Zea Mays
MKSYGDLAVFYYRLQHTELALKYVNRALYLLHLTCGPSHPNTAATYINVAMMEEGLGNVHVALRYLHEALKCNQRLLGADHIQTAASYHAIAIALSLMEAYSLSVQHEKTTLRILQAKLGSEDLRTQDASAWLEYFESKALEQQEAARNGTPKPDASIASRGHLSVSDLLDYINPDDELKAKEMQRKQVRAKIKGRTGQNQSELVDDEDQRSPAPNNDKNLLTENGNSGVKENGTFVEHVKDEISSDTAIHIPQDGFTEECTSDEGWQAAVPKGRSTGSRRTGAGTRRPNLAKINTSSLNSENGRYKGRGISNFSSPRVSPSEAAVSIGSRPLAKKLAKSSSFNSKAVSTAVSSNTGENSFNLNSKPASPAIATAAAKVIPSTTPSASQTVRKSLSYKEVAIAAPGTLAKASSDVHTEEKDTGDQGASPESSNSKSPKEINGHPSGEKDGAIEVSPQDDTSQVSKSPDGGKPEQTDVLIGSNQPDTVHKKSSDPAETSVAKDIDLPAPVISSGTQTEADTPNDEAPTAIEANDSSSNDDERDSGADTPEQLSSGGENEKSSLSESEKNDTPREGAKETTSKLSAAAAPFNPSSVPAFGSMAVPGFREHGGLLPSPANVPPMLSIPLRKHPHQSATARVPYGPRLAGGYNRSGHRGLRKKPVLTSGEAPTETNTSGPRIMNPNAPEFVPGQSRSPNGHPASPNGPLASPGGIPSSPQDLLSSPDSTLESPVTASPQVSECSQISPEGDVEGVGVKQNMDDTNHPESKDGEVEPEQTKAPEGTEEGAAVKDAAEELIAAEQPKSWADYSDGEVEVVEVAS

SEQ ID NO: 184299 - protein, 209 aa, Zea Mays
MEEPVPADPPRIFWKSRSSANGRSLQQEPDKDATEETNEQAQEEPMKTDDATDTAAAAAATAEPYPKANLSEKRKALFEPLEPINGKRGAAETLLPPPDFEPASYPKGWLVGKKRKLVNVDVVESMRRIAIQEMNRKDREINGLNEQLEEDSRVLELLQKQLADERRKRTEIEKENSMLHEQVTMLMNMLDENEGFDEDGEAPPPDSFD

SEQ ID NO: 184300 - protein, 154 aa, Zea Mays
MEEPVPADPPRIFWKSRSSANGRSLQQEPDKDATEETNEQAQEEPMKTDDATDTAAAAAATAEPYPKANLSEKRKALFEPLEPINGKRGAAETLLPPPDFEPASYPKGWLVGKKRKLVNVDVVESMRRIAIQEMNRKVDTFEKNISSNVVGFCF

SEQ ID NO: 184301 - protein, 144 aa, Zea Mays
MEEPVPADPPRIFWKSRSSANGRSLQQEPDKDATEETNEQAQEEPMKTDDATDTAAAAAATAEPYPKANLSEKRKALFEPLEPINGKRGAAETLLPPPDFEPASYPKGWLVGKKRKLVNVDVVESMRRIAIQEMNRKAVLLLNM

SEQ ID NO: 184302 - protein, 418 aa, Zea Mays
MATAAASTTTSAAVLAFRLLRRLPRRLSVSRAPPAALASSSSSSSRRLPSLARHPLGHRTRMGHTAAAAAAAAEPALGLTKPNAVEPPQVTFSAKDIEFSEWKGDILAVAVTEKDLSKDADSKFENAVLKKLDGQLGGLLSEAAAEEDFTGKTGQSVVLRLAGQGFKRVGLIGLGQSAPSTAAASRGLGESVASVAKAAQASSAAIVLASPSGIQEEFKLTAAAAVASGTVLGLYEDSRYKSESKKVHLKQVDIIGLGSGAEVDQKLKYANDLSSGVIFGRELVNSPANVLTPAVLAEEASKIASTYSDVFTATVLDVEKCKELKMGSYLGVAAASANPPHFIHLCYKPTDGNVKRKLAIVGKGLTFDSGGYNIKTGPGCSIELMKFDMGGSAAVFGAAKALGQIKPPGVGSLYSRCL

SEQ ID NO: 184303 - protein, 167 aa, Zea Mays
MQVLSDKLPEVLDFSRDLANLEPASKIQLKELAEEMQAITKGLEKVEQELATAEKDPSETEIFYRKLNLFLDDAQAEGRSLASLYSSAGKSADSLAHYFGEDPVRCPFEQVVSTLLSFTKTFERAHAENVKQMELEKKRAQAEAEKEKAKLTAHKKRESLELGISGR

SEQ ID NO: 184304 - protein, 1078 aa, Zea Mays
MVFRIMFNTAFIRSNILMLNRDHIDMLWNAKDQFPKDFRFEVIFSDMDIVTSHVTTEPVIHQEKQGLGVEEFAKVLDIFNHLDWLDGKKDTVPHTTQLKISAITDEPETFFDTREELESESSSGEIYSSSVVLKVGNELDMLVSTKPRHIPQDSSSANVQSKSQTTVQSPSRMRRTALLSPSKVKVSKTSASPMELSSSTIMPQQSSSPVQPRRVMSDSAVKFLSEITESASGEMSCSQTPVEHEPSSLMENNPAPTASLLPLCTPPPLPPPPPTVSLLPVPTKLPINTSTSTINISLRATVRSSPPSEPSVPPKDLLRTEELGKSQEPSYETRGKLQTDSTTGSNDFILSPAASSSLDEELSNARASLPTDLPAVPQNPDTRPFAIQATRSETMPPPPPPPPPPPSKSGMTLFPLTHGEEVKITIEKVVPHQPPHPPAAAASFSSSNPDAVSVILAPQKRARSPPPPPLPPPPGLAKPPFSSLRSRSSPEVSLSQPQFLDNKDSATMEYPDTPSLTPTFSQSVTRVQTLHVPPPPPHSSQTPPTPPPPPPSSQSFPSLSRRNRVAAPHPPPPPAPLSSRVTSAPSVPPSPPLPPPKLAVANNTSQKSPTIRPPPPPPGPLHKLTKGSVANSNPPPHPAFSFGAKDRSTARSKSPRSLRANQASKRTPLKPLHWVKVSRATQGSLWAETQKSDEISRTPEIDISELESLFSVTMPNMEAKRQRQQQHPSVATKQEKVHLIELQRAKNCEIMLRNIKMPLPDLMGLVVALDDSVVDGDQVDYLIKFCPTKEEMELLKSYTGKKENLGNCEQFFMEMMKVPRVESKLRILSFKIKFVTQVADLKSNLNTINLVAEEVRSSVKLKRVMQTILSLGNALNQGTARGAAVGFRLDSLLKLSDIRARNNRMTLMHYLCKVLSDKLPEVLDFSRDLANLEPASKIQLKELAEEMQAITKGLEKVEQELATAEKDPSETEIFYRKLNLFLDDAQAEGRSLASLYSSAGKSADSLAHYFGEDPVRCPFEQVVSTLLSFTKTFERAHAENVKQMELEKKRAQAEAEKEKAKLTAHKKRESLELGISGR

SEQ ID NO: 184305 - protein, 1124 aa, Zea Mays
MVFRIMFNTAFIRSNILMLNRDHIDMLWNAKDQFPKDFRFEVIFSDMDIVTSHVTTEPVIHQEKQGLGVEEFAKVLDIFNHLDWLDGKKDTVPHTTQLKISAITDEPETFFDTREELESESSSGEIYSSSVVLKVGNELDMLVSTKPRHIPQDSSSANVQSKSQTTVQSPSRMRRTALLSPSKVKVSKTSASPMELSSSTIMPQQSSSPVQPRRVMSDSAVKFLSEITESASGEMSCSQTPVEHEPSSLMENNPAPTASLLPLCTPPPLPPPPPTVSLLPVPTKLPINTSTSTINISLRATVRSSPPSEPSVPPKDLLRTEELGKSQEPSYETRGKLQTDSTTGSNDFILSPAASSSLDEELSNARASLPTDLPAVPQNPDTRPFAIQATRSETMPPPPPPPPPPPSKSGMTLFPLTHGEEVKITIEKVVPHQPPHPPAAAASFSSSNPDAVSVILAPQKRARSPPPPPLPPPPGLAKPPFSSLRSRSSPEVSLSQPQFLDNKDSATMEYPDTPSLTPTFSQSVTRVQTLHVPPPPPPPSRTPPVPPPPPRTPPVPPPPPPSSRTPPVPSPPPGTPHVPPPPPHSSQTPPTPPPPPPSSQSFPSLSRRNRVAAPHPPPPPAPLSSRVTSAPSVPPSPPLPPPKLAVANNTSQKSPTIRPPPPPPGPLHKLTKGSVANSNPPPHPAFSFGAKDRSTARSKSPRSLRANQASKRTPLKPLHWVKVSRATQGSLWAETQKSDEISRTPEIDISELESLFSVTMPNMEAKRQRQQQHPSVATKQEKVHLIELQRAKNCEIMLRNIKMPLPDLMGLVVALDDSVVDGDQVDYLIKFCPTKEEMELLKSYTGKKENLGNCEQFFMEMMKVPRVESKLRILSFKIKFVTQVADLKSNLNTINLVAEEVRSSVKLKRVMQTILSLGNALNQGTARGAAVGFRLDSLLKLSDIRARNNRMTLMHYLCKVLSDKLPEVLDFSRDLANLEPASKIQLKELAEEMQAITKGLEKVEQELATAEKDPSETEIFYRKLNLFLDDAQAEGRSLASLYSSAGKSADSLAHYFGEDPVRCPFEQVVSTLLSFTKTFERAHAENVKQMELEKKRAQAEAEKEKAKLTAHKKRESLELGISGR

SEQ ID NO: 184306 - protein, 1249 aa, Zea Mays
MSLFRKFFYKKPPDGLLLITDNVYVFDHCFSLKEVEGDHFDAHIRGIAADLLENFRDHSFMISNFGTKEEESPIYHILSEYGMTVLDYPGHYEGCPLLTMEMIHCILKSSESWLSLGQHNLLLMHCQRGSWPILAFMLAALLIYLGHYSDEEKVLDMVYKQSSLELLEMISPLNPMPSQMRYLRYISTRNVMPEWPPADRALTLDCVILRMVPNFHGQGGFRPIFRIYGPDHLMPPDQTPKVLFSTPKKSNLVRFYSQADELVKIDLQCHVQGDIVLECIHLYEDLDREEMVFRIMFNTAFIRSNILMLNRDHIDMLWNAKDQFPKDFRFEVIFSDMDIVTSHVTTEPVIHQEKQGLGVEEFAKVLDIFNHLDWLDGKKDTVPHTTQLKISAITDEPETFFDTREELESESSSGEIYSSSVVLKVGNELDMLVSTKPRHIPQDSSSANVQSKSQTTVQSPSRMRRTALLSPSKVKVSKTSASPMELSSSTIMPQQSSSPVQPRRVMSDSAVKFLSEITESASGEMSCSQTPVEHEPSSLMENNPAPTASLLPLCTPPPLPPPPPTVSLLPVPTKLPINTSTSTINISLRATVRSSPPSEPSVPPKDLLRTEELGKSQEPSYETRGKLQTDSTTGSNDFILSPAASSSLDEELSNARASLPTDLPAVPQNPDTRPFAIQATRSETMPPPPPPPPPPPSKSGMTLFPLTHGEEVKITIEKVVPHQPPHPPAAAASFSSSNPDAVSVILAPQKRARSPPPPPLPPPPGLAKPPFSSLRSRSSPEVSLSQPQFLDNKDSATMEYPDTPSLTPTFSQSVTRVQTLHVPPPPPPPSRTPPVPPPPPRTPPVPPPPPPSSRTPPVPSPPPGTPHVPPPPPHSSQTPPTPPPPPPSSQSFPSLSRRNRVAAPHPPPPPAPLSSRVTSAPSVPPSPPLPPPKLAVANNTSQKSPTIRPPPPPPGPLHKLTKGSVANSNPPPHPAFSFGAKDRSTARSKSPRSLRANQASKRTPLKPLHWVKVSRATQGSLWAETQKSDEISRTPEIDISELESLFSVTMPNMEAKRQRQQQHPSVATKQEKVHLIELQRAKNCEIMLRNIKMPLPDLMGLVVALDDSVVDGDQVDYLIKFCPTKEEMELLKSYTGKKENLGNCEQFFMEMMKVPRVESKLRILSFKIKFVTQVADLKSNLNTINLVAEEVRSSVKLKRVMQTILSLGNALNQGTARGAAVGFRLDSLLKLSDIRARNNRMTLMHYLCK

SEQ ID NO: 184307 - protein, 1150 aa, Zea Mays
MSLFRKFFYKKPPDGLLLITDNVYVFDHCFSLKEVEGDHFDAHIRGIAADLLENFRDHSFMISNFGTKEEESPIYHILSEYGMTVLDYPGHYEGCPLLTMEMIHCILKSSESWLSLGQHNLLLMHCQRGSWPILAFMLAALLIYLGHYSDEEKVLDMVYKQSSLELLEMISPLNPMPSQMRYLRYISTRNVMPEWPPADRALTLDCVILRMVPNFHGQGGFRPIFRIYGPDHLMPPDQTPKVLFSTPKKSNLVRFYSQADELVKIDLQCHVQGDIVLECIHLYEDLDREEMVFRIMFNTAFIRSNILMLNRDHIDMLWNAKDQFPKDFRFEVIFSDMDIVTSHVTTEPVIHQEKQGLGVEEFAKVLDIFNHLDWLDGKKDTVPHTTQLKISAITDEPETFFDTREELESESSSGEIYSSSVVLKVGNELDMLVSTKPRHIPQDSSSANVQSKSQTTVQSPSRMRRTALLSPSKVKVSKTSASPMELSSSTIMPQQSSSPVQPRRVMSDSAVKFLSEITESASGEMSCSQTPVEHEPSSLMENNPAPTASLLPLCTPPPLPPPPPTVSLLPVPTKLPINTSTSTINISLRATVRSSPPSEPSVPPKDLLRTEELGKSQEPSYETRGKLQTDSTTGSNDFILSPAASSSLDEELSNARASLPTDLPAVPQNPDTRPFAIQATRSETMPPPPPPPPPPPSKSGMTLFPLTHGEEVKITIEKVVPHQPPHPPAAAASFSSSNPDAVSVILAPQKRARSPPPPPLPPPPGLAKPPFSSLRSRSSPEVSLSQPQFLDNKDSATMEYPDTPSLTPTFSQSVTRVQTLHVPPPPPPPSRTPPVPPPPPRTPPVPPPPPPSSRTPPVPSPPPGTPHVPPPPPHSSQTPPTPPPPPPSSQSFPSLSRRNRVAAPHPPPPPAPLSSRVTSAPSVPPSPPLPPPKLAVANNTSQKSPTIRPPPPPPGPLHKLTKGSVANSNPPPHPAFSFGAKDRSTARSKSPRSLRANQASKRTPLKPLHWVKVSRATQGSLWAETQKSDEISRTPEIDISELESLFSVTMPNMEAKRQRQQQHPSVATKQEKVHLIELQRAKNCEIMLRNIKMPLPDLMGLVVALDDSVVDGDQVDYLIKFCPTKEEMELLKSYTGKKENLGNCEQSTLV

SEQ ID NO: 184308 - protein, 432 aa, Zea Mays
MNQKQGESDEDAPRCPTPRGFVLGRCSLCGAMDEGAEGAAPAVAVGHETLRQGGDGGEDGVGDSDDYAASCPPHPRFVHGLCSRCGAEKEEEDGGVAPPPGVAVGHETMRQGGDRDGDYYAASCPPHPGFVHGVWEAAGGDALPGVAVGYDVTNQGRGDEDDNSDEDEDDDTDTVVEYIHGEGPVLPVPAIEEAMSIVSASDRATLMRERKLILILDLDHTLLNSTSLYDLSPVEQAKGFTPYTFGDTSIDLFRVDIDNLSMLVKLGAFARGFLKQANALFEMHVYTLGIRAYARAAVRLLDPNGIYFGGRIVSRNESTKENTKSLDVIQGADPAMVVILDDTDGVWPGYPDNLILMDRYRYFASTCRTFDYDIPSLAEQGLEEREHDGSLAVVLGALQRIHQGFFDGHRADVREVIAKVRSQMWTAAQHRV

SEQ ID NO: 184309 - protein, 382 aa, Zea Mays
MVAMARKDEEEGPADRVPHLPWMRYPVDIDTFSGRPVTQLPRLDPRLVEALQRMGIESFFPVQEAAWLETIGPGAFERDICINSPTGSGKTLAYALPIVQMLCTRKVRCLRALVVLPTRDLALQVKEVFDAIAPVVGLSVGSAVGQSSIADEVSSLVQKPRQEFYPTIDKEYVQMEPRTKIDILVATPGRLMDHINMTNGFSLEHLQYLVIDETDRMLREAYQSWLPTVIQLTHSIGQDHSCHDIDGKTLLHPLTTIRRSGVERGFKSKCYPRLAKIVLSATLTQDPSKLSQLELHHPLLLNSGKKRYRIPTKLESYKLICKSNLKPLSLIVLLQELQGNKCLVFTSSVESSHRLSTLLRFFENLPFKFSEYSRLQRESTRR

SEQ ID NO: 184310 - protein, 618 aa, Zea Mays
MLRQNRDLFDLVISDVHMPDMDGFKLLELVGLEMDLPVIMLSVNGETKTVMKGITHGACDYLLKPVRLEELRNIWQHVVRRKFSNCDRANNDGYEECNRPSNADFDLAHSQITAGPPDQSGRPSKKRKEYHSEEEDEGEESNGQDNDDPSAPKKPRVVWSVELHRKFVAAVNQLGIDKAVPKRILELMNVERLTRENVASHLQKYRLYLKRLSAVASQQASIVAALGGNDPFMRMSAFEGLHGYQSFVSSAALPSFSPQGLLNRNNPASFAIQGVSASRPIQIATGNTTMSHSIGDPNDKYHLSLPGTSCLQGNLAQGLPTPVGQVQLPQKWIHEETDDLSTILSASGRANSGVPGTLQSVTNSHLLQQGFVERRQDKVVIQPSSSASSDRPEGTVGVSSSLMDSCATQQRVVPLSAFSSSASPMNGSFCSNGVAELGATSSGGTSIFPSNDLRIERDSKVGASSFGSVILLSPDTVPNQKYLNFGGGSDLRSNMEGGNAGNLLNPKLLWSCLPASQPPNLIGSHHPMSQRLNLGGSMVRQTTASASAAAPQTRIDMFISGDAPKSASDLSFPKVHSELSSSSCSFDGLLNSIIKVEKDDASFSDDLGCDLYSLGACI

SEQ ID NO: 184311 - protein, 228 aa, Zea Mays
MGNVTSSVAARLAFFPPEPATYGVEPADQDGAGAGSLLRMTGVSPDAGVEVRALPTRAGTRVVSAFWRHPAARLTLLYSHGNAADLGQMLGLLLELRTHLRVNIMSYDYSGYGASTGKPSEYNTYNDIEAVYDCLKKEYGIEEEDLILYGQSVGSGPTLHLASRLENIRGVVLHSGILSGIRVLYPVKVTLWFDIFKNIDKIKQVDCPVLVIHPMRSWTSRMASGCGS

SEQ ID NO: 184312 - protein, 1205 aa, Zea Mays
MILHMIQLDPKKRVPCRSYLQKYESVVFPFYFSKFLHKFFSDIVPLDSDARVEKTQENFGKIQEIMMGSSTIEQIERSTSCEHSEPSGRKGMEGEILNSPGNYRNSTSVFKKNTPVDHQHIIGDINFLLKEVEGRSNNTSTKVTKDTYHFVAPSITCANGVQSSHLVNPAGRQIGTGLMGHKHVVSHVKISKSNIRSLVATYDDQSDTYSFDIFQQTDSKVSCEGMVLLASLLCSCIRSVKKPELRRASLILLKFSSTYIDDDSRLQLVVPYVIAMLSDPSAIVRCAALETLCDVLCLVQDFPISDAVIFPEYILPMLSLLPDDTEESVRVCYASNIHKLALTAYRFLLRSRSIADIRPLDESVVAHRSQSADSPAKRQDNFFRQLAELRKSIYEIVQDLVMGQKQTPNTRRALLQDIGYLCYFFGHKQSNDFLLPILPAFLNDHDEQLRAVFFGQIVYVCYFIGARSVEEYLLPYLEQALSDDMEAVLVNALDCLTMMCRSGYLRKRVIVGLLVKILPLLRYPINWVKQSAVRFVAACSESLGSVDTYVYLSPHLRQFLHMEPPSLASETALLSCLKPPLPKSIFYEGLEHAQDIGDILLKSSGKKEQIVHGGRYPGTAQSGSLANLEDILRPKGPNISSSMSLYVKNSVSFEKSLYSGFALHASAANSSFYDGLSKGIPSYSFCTDNKRGLGETHMVPDSSVYKASIRLPWLEPNRPAMQTRDDHFSSTRQDFSINDSMKSNSSLQGDIIPNSDTGGLPFSRSAVNLETGWKPRGILVAHLQEHRSSVNDIAVSNDNTFFVTASDDSSIKIWDTRKLEKDIAFRSRLTYSMGNSRALCTTMVHGTSQVIVGASDGTLHLFSVDCARSVGTVVERYAGIVDVKRNEIKEDAILSVVNCSTDSFSPTVLFSTEHCGIHKWDTRTNSESWSFKSSPEEGYISALVVGPCGNWFISGSSRGVLTLWDNRFLVPVKSWNYSTLSPIEKLCLLIPPPSSISSAGRPLVFVAAGCNEVSLWNAENGNCHQMFRTASTDNEAVMSKAPSRPVNKPVIKDIRRAGNYKYRIDELNDPPVRHPGIRSLLPLPGGDLLTGGTDLKIRYWDQARPEQSFCIAGPSAKEVRSAKGDILEKAVGNDESYDIRSSFGIQEMYKQSSSVSGLTPKTQLAVAAADSAGCHRDAILALASFNLSSQRLVSGSRDGAVKVWK

SEQ ID NO: 184313 - protein, 1208 aa, Zea Mays
MILHMIQLDPKKRVPCRSYLQKYESVVFPFYFSKFLHKFFSDIVPLDSDARVEKTQENFGKIQEIMMGSSTIEQIERSTSCEHSEPSGRKGMEGEILNSPGNYRNSTSVFKKNTPVDHQHIIGDINFLLKEVEGRSNNTSTKVTKDTYHFVAPSITCANGVQSSHLVNPAGRQIGTGLMGHKHVVSHVKISKSNIRSLVATYDDQSDTYSFDIFQQTDSKVSCEGMVLLASLLCSCIRSVKKPELRRASLILLKFSSTYIDDDSRLQLVVPYVIAMLSDPSAIVRCAALETLCDVLCLVQDFPISDAVIFPEYILPMLSLLPDDTEESVRVCYASNIHKLALTAYRFLLRSRSIADIRPLDESVVAHRSQSADSPAKRQDNFFRQLAELRKSIYEIVQDLVMGQKQTPNTRRALLQDIGYLCYFFGHKQSNDFLLPILPAFLNDHDEQLRAVFFGQIVYVCYFIGARSVEEYLLPYLEQALSDDMEAVLVNALDCLTMMCRSGYLRKRVIVGLLVKILPLLRYPINWVKQSAVRFVAACSESLGSVDTYVYLSPHLRQFLHMEPPSLASETALLSCLKPPLPKSIFYEGLEHAQDIGDILLKSSGKKEQIVHGGRYPGTAQSGSLANLEDILRPKGPNISSSMSLYVKNSVSFEKSLYSGFALHASAANSSFYDGLSKGIPSYSFCTDNKRGLGETHMVPDSSVYKASIRLPWLEPNRPAMQTRDDHFSSTRQDFSINDSMKSNSSLQGDIIPNSDTGGLPFSRSAVNLETGWKPRGILVAHLQEHRSSVNDIAVSNDNTFFVTASDDSSIKIWDTRKLEKDIAFRSRLTYSMGNSRALCTTMVHGTSQVIVGASDGTLHLFSVDCARSVGTVVERYAGIVDVKRNEIKEDAILSVVNCSTDSFSPTVLFSTEHCGIHKWDTRTNSESWSFKSSPEEGYISALVVGPCGNWFISGSSRGVLTLWDNRFLVPVKSWNYSTLSPIEKLCLLIPPPSSISSAGRPLVFVAAGCNEVSLWNAENGNCHQMFRTASTDNEAVMSKAPSRPVNKPVIKDIRRAGNYKYRIDELNDPPVRHPGIRSLLPLPGGDLLTGGTDLKIRYWDQARPEQSFCIAGPSAKEVRSAKGDILEKAVGNDESYDIRSSFGIQVVQEMYKQSSSVSGLTPKTQLAVAAADSAGCHRDAILALASFNLSSQRLVSGSRDGAVKVWK

SEQ ID NO: 184314 - protein, 724 aa, Zea Mays
MEAVLVNALDCLTMMCRSGYLRKRVIVGLLVKILPLLRYPINWVKQSAVRFVAACSESLGSVDTYVYLSPHLRQFLHMEPPSLASETALLSCLKPPLPKSIFYEGLEHAQDIGDILLKSSGKKEQIVHGGRYPGTAQSGSLANLEDILRPKGPNISSSMSLYVKNSVSFEKSLYSGFALHASAANSSFYDGLSKGIPSYSFCTDNKRGLGETHMVPDSSVYKASIRLPWLEPNRPAMQTRDDHFSSTRQDFSINDSMKSNSSLQGDIIPNSDTGGLPFSRSAVNLETGWKPRGILVAHLQEHRSSVNDIAVSNDNTFFVTASDDSSIKIWDTRKLEKDIAFRSRLTYSMGNSRALCTTMVHGTSQVIVGASDGTLHLFSVDCARSVGTVVERYAGIVDVKRNEIKEDAILSVVNCSTDSFSPTVLFSTEHCGIHKWDTRTNSESWSFKSSPEEGYISALVVGPCGNWFISGSSRGVLTLWDNRFLVPVKSWNYSTLSPIEKLCLLIPPPSSISSAGRPLVFVAAGCNEVSLWNAENGNCHQMFRTASTDNEAVMSKAPSRPVNKPVIKDIRRAGNYKYRIDELNDPPVRHPGIRSLLPLPGGDLLTGGTDLKIRYWDQARPEQSFCIAGPSAKEVRSAKGDILEKAVGNDESYDIRSSFGIQVVQEMYKQSSSVSGLTPKTQLAVAAADSAGCHRDAILALASFNLSSQRLVSGSRDGAVKVWK

SEQ ID NO: 184315 - protein, 674 aa, Zea Mays
MSGWDEGAVFYSDQAQFPRGGPGGDPAADLTRHSALRKFKEFLRGFTGPTGDFPYRESLVHNRDHVTVAIEDLDAFDAELSDKIRKSPADYLPLFETAAAEVLASLRSKVAGETGEMEEPVTGDVQIFLSSKENCLSMRSVGADYMSKLVKIAGIAIAASRVKAKATHVTLICKNCRSVRTVPCRPGLGGAIVPRSCDHVPQPGEEPCPLDPWIAVPDKSKYVDLQTLKLQENPEDVPTGELPRNVLLSVDRHLVQTIVPGTRLTVVGIYSVYQASTTQKGAVGVKQPYIRVVGLEQSRDNNSNGPSNFTLDEEMEFKEFAQRPDAYAKLCSMIGPSIYGHSDVKKAIACLLFGGSKKRLPDGVRLRGDIHVLLLGDPSTAKSQTAPIAVYTSGKGSSAAGLTASVTRDSSSREFYLEGGAMVLADGGVVCIDEFDKMRPEDRVAIHEAMEQQTISIAKAGITTVLNSRTSVLAAANPIAGRYDDLKTAQDNIDLQTTILSRFDLIFIVKDIRMYDQDKRIASHIIKVHASGAAASSTNTEGSEGENWLKRYIEYCRATCKPRLSEKAAEMLQNKYIEIRQKMRQQAHETGRAAAIPITVRQLEAIIRLSESLAKMRLTSVATPEHVEEAFRLFNVSTVDAARSGINEHLNLSPEIANEIKVSICIPGYTKFSY

SEQ ID NO: 184316 - protein, 51 aa, Zea Mays
MTSNSFLCQFPGYRRQKICFSLPEESQAGIRSQIDSAMHGSFSGQQHRRSE

SEQ ID NO: 184317 - protein, 482 aa, Zea Mays
MGAGSSRADAPSRRRARLSLGGCFGAGSSSSAHDGGSFAAAGPSSSRAIEVQSRQSGRQVSALNFQASLAAKDLQVSSESNPRLHSSSSTISHHLRFNHLNYHENKEDGLGSENAETSGLQSSSRKPVMVRGSLINEAVNGDISGEGISSIGSELENVPSTVSTNEIGGSTSESGLGPSSMTSERIMSDSEVEISPQGTSSTTVMTSERSDASQSSLTSVFSNSSTASSVIVEPMPDPIPTTADVPIFSGPHGEAGGSILHDDMMSIFSNDGVGRSIDSSSSETRRSHRRILWDAFSRRGSRGYPESDADEMGFFSTWLDLGDDIFEELGESRYFHRRRHGSIRVSQYSRSRIREHRRAVFDSESSARASISRIVMLTEALFEVLDEIHRQPASLSLSMVSVQAPESVVDSLPCKSYKKLETPQCSDDMEQCHICLTEYEDGDQIRTLPCKHEFHLQCVDKWLKEIHRVCPLCRGDVCEVAS

SEQ ID NO: 184318 - protein, 474 aa, Zea Mays
MGAGSSRADAPSRRRARLSLGGCFGAGSSSSAHDGGSFAAAGPSSSRAIEVQSRQSGRQVSALNFQASLAAKDLQVSSESNPRLHSSSSTISHHLRFNHLNYHENKEDGLGSENAETSGLQSSSRKPVMVRGSLINEAVNGDISGEGISSIGSELENVPSTVSTNEIGGSTSESGLGPSSMTSERIMSDSEVEISPQGTSSTTVMTSERSDASQSSLTSVFSNSSTASSVIVEPMPDPIPTTADVPIFSGPHGEAGGSILHDDMMSIFSNDGVGRSIDSSSSETRRSHRRILWDAFSRRGSRGYPESDADEMGFFSTWLDLGDDIFEELGESRYFHRRRHGSIRIREHRRAVFDSESSARASISRIVMLTEALFEVLDEIHRQPASLSLSMVSVQAPESVVDSLPCKSYKKLETPQCSDDMEQCHICLTEYEDGDQIRTLPCKHEFHLQCVDKWLKEIHRVCPLCRGDVCEVAS

SEQ ID NO: 184319 - protein, 418 aa, Zea Mays
MGAGSSRADAPSRRRARLSLGGCFGAGSSSSAHDGGSFAAAGPSSSRAIEVQSRQSGRQVSALNFQASLAAKDLQVSSESNPRLHSSSSTISHHLRFNHLNYHENKEDGLGSENAETSGLQSSSRKPVMVRGSLINEAVNGDISGEGISSIGSELENVPSTVSTNEIGGSTSESGLGPSSMTSERIMSDSEVEISPQGTSSTTVMTSERSDASQSSLTSVFSNSSTASSVIVEPMPDPIPTTADVPIFSGPHGEAGGSILHDDMMSIFSNDGVGRSIDSSSSETRRSHRRILWDAFSRRGSRGYPESDADEMGFFSTWLDLGDDIFEELGESRYFHRRRHGSIRVSQYSRSRIREHRRAVFDSESSARASISRIVMLTEALFEVLDEIHRQPASLSLSMVSVQAPESVVDSLPCAISA

SEQ ID NO: 184320 - protein, 66 aa, Zea Mays
MTRDAGAEGRAHHVSAAAAAVSVLFCSSCRSVRRLFFIPSLAADPNSRSSVRLRFVMPIKKLHLAA

SEQ ID NO: 184321 - protein, 75 aa, Zea Mays
MTSALSCRVCCGLKCAPTSSLYTFQKDTDICKRNISGASLSPFFFFFASVNLLRCITKSYLSPQDKVSLGVFSPI

SEQ ID NO: 184322 - protein, 89 aa, Zea Mays
MLEVVELTFTFCSSVYPTEIRFHTERYGIVALIQTCLVRAFMLDGVYIFYDSGLEGISSAPFLERLKLLDRKRITGAGVSFVAPRLSSL

SEQ ID NO: 184323 - protein, 65 aa, Zea Mays
MSNIGLFRRINPARSRRKGHQTKQMNENLRTTERYQKILGDRSPARRRRRRNGLGSVLNKRLCCV

SEQ ID NO: 184324 - protein, 52 aa, Zea Mays
MIRSRKSIIIRPEEYDQVYAAWHFFFSNAKWNRSSSVKDFDWATQSHPCSSI

SEQ ID NO: 184325 - protein, 135 aa, Zea Mays
MQVRTVDGTSDLRIPPGIQPGDVIVLAKQGVPSLNKPSIRGDHLFTVKVAIPKRISGRERELLEELASLSNGRFARTDTKPKPAQPKAIHQEKEVGASQEDTSKSKEAEGDWLKKLTDFAGSIVNGAAKWLNDNL

SEQ ID NO: 184326 - protein, 128 aa, Zea Mays
MQVRTVDGTSDLRIPPGIQPGDVIVLAKQGVPSLNKPSIRGDHLFTVKVAIPKRISGRERELLEELASLSNGRFARTDTKPKPAQPKAIHQEKEVGASQEDTSKSKEAEGDWLKKLTDFAGCITSVEI

SEQ ID NO: 184327 - protein, 261 aa, Zea Mays
MRICSTCGGRGQVMRTEQTPFGLFSQVSICPTCAGEGEVISEYCRKCSGEGRIRVRKEIKVKIPPGVSKGSTLRVRGEGDAGPKGGPPGDLFVCLDIEEPSDIKRDGINLYSTVSISYLEAILGTVMQVRTVDGTSDLRIPPGIQPGDVIVLAKQGVPSLNKPSIRGDHLFTVKVAIPKRISGRERELLEELASLSNGRFARTDTKPKPAQPKAIHQEKEVGASQEDTSKSKEAEGDWLKKLTDFAGSIVNGAAKWLNDNL

SEQ ID NO: 184328 - protein, 309 aa, Zea Mays
MTHGHFDQYDVILGFTEAIFGTEKDIILSHLETCDTCGGSGSKAGSKMRICSTCGGRGQVMRTEQTPFGLFSQVSICPTCAGEGEVISEYCRKCSGEGRIRVRKEIKVKIPPGVSKGSTLRVRGEGDAGPKGGPPGDLFVCLDIEEPSDIKRDGINLYSTVSISYLEAILGTVMQQVRTVDGTSDLRIPPGIQPGDVIVLAKQGVPSLNKPSIRGDHLFTVKVAIPKRISGRERELLEELASLSNGRFARTDTKPKPAQPKAIHQEKEVGASQEDTSKSKEAEGDWLKKLTDFAGSIVNGAAKWLNDNL

SEQ ID NO: 184329 - protein, 264 aa, Zea Mays
MMLPQFPSSKDDKSIKVFLRVREKKKRIKVSICPTCAGEGEVISEYCRKCSGEGRIRVRKEIKVKIPPGVSKGSTLRVRGEGDAGPKGGPPGDLFVCLDIEEPSDIKRDGINLYSTVSISYLEAILGTVMQVRTVDGTSDLRIPPGIQPGDVIVLAKQGVPSLNKPSIRGDHLFTVKVAIPKRISGRERELLEELASLSNGRFARTDTKPKPAQPKAIHQEKEVGASQEDTSKSKEAEGDWLKKLTDFAGSIVNGAAKWLNDNL

SEQ ID NO: 184330 - protein, 396 aa, Zea Mays
MYHPDVNKEPGATEKFKEISAAYEVLSDEKKRALYDQYGEAGVKSAVGGSGGAYTTNPFDLFETFFGASMGGFSGMDQSAFRTSRRSTAIQGEDIRYDVILGFTEAIFGTEKDIILSHLETCDTCGGSGSKAGSKMRICSTCGGRGQVMRTEQTPFGLFSQVSICPTCAGEGEVISEYCRKCSGEGRIRVRKEIKVKIPPGVSKGSTLRVRGEGDAGPKGGPPGDLFVCLDIEEPSDIKRDGINLYSTVSISYLEAILGTVMQVRTVDGTSDLRIPPGIQPGDVIVLAKQGVPSLNKPSIRGDHLFTVKVAIPKRISGRERELLEELASLSNGRFARTDTKPKPAQPKAIHQEKEVGASQEDTSKSKEAEGDWLKKLTDFAGSIVNGAAKWLNDNL

SEQ ID NO: 184331 - protein, 286 aa, Zea Mays
MASLSCASTLPWTPASSPRPSADRRLTASRRAPSLVIVAQGKVILTDDIEEVGKKGDTMKVRAGFYRNSLLPKGKAALLTPAVHKQNTIVASENENPPLMPAIMTPGGALDLATVLLGNRIIFIGQYINSQVAQRVISQLVTLAAIDEEADILIYLNCPGGSLYSILAIYDCMSWIKPKVGTVCFGVVASQAAIILAGGEKGMRYAMPNARVMIHQPQGGSEGNVEEVRRQVGETIYARDKVDKMFAAFTGQPLDMVQQWTERDRFMSSSEAMDFGLLDALLETRY

SEQ ID NO: 184332 - protein, 961 aa, Zea Mays
MATLVRPPALHVRAVSGGGNKDRVAPQRPWWGGNKPISPRQSGGSGARGGAGGGGVALDQVLGVLRRDGEFVQAAVGAPLRDVFWLRFLEKKQRKQQQPRPKHKPFRQQQEEEEVVVVDESPPAFPPPSYPSGLSCVELMAADFQALKVYAGSARHSLARRFLGSNSKGKSEQQPKPKPQEQQKEQQHILQAPAFPPPSYPPVGLSCMELMMADLEALKLYINYYSAILTTPLPQHYDPDLLAQYFASRPHILASRVIQILFTFLSAVVKMRISKRAQLTTDATYSSGNSGNGFDDTQYMVGQLLKETFLNLGPTFIKVGQSLSTRPDIIGSEICEALAELHERVPTFPREDAMKIIEGEFGCPVSHMFSYVSDEPVASASFGQVYQGRTVDGSLVAIKVQRPDLLPSVLRDIYILRLGLAFIRKIAKRRSNISLYGDELGRGFVGELDYNIEAANATKFMEVHSRYPFMLVPKVLKQLTRKRVLTMEWVAGENPKDLLSLSKGVSEKFTQASDNQKLEAKSRLLDLVNKGVEASLVQLLETGLLHADPHPGNLRYTPEGRVGFLDFGLLCMMERKHQRAMLASIVHIVNGDWASVVYDLTEMDVVPPKTNLRRVTMDLEDALGEVTFEDGIPEIKFSKVLGKIWSVAFKYHFRMPPYYTLVLRSLASLEGLAVAADGTFKTFQAAYPYVVRKLLSENSLETRRLLNQAIFNKRKEFQWQKIDAFLKLASARTNFKYNSEVLPEPDMKSMNVASLVEISDAYSLDRAIATPERALHTANLCVRLLLSKESIVIRRLIMTANAKSLARDLISRDALMFRVLLSKVIADVVYQWMLSATGLKRVMETKIQTPMTTGKNEGHLVLAEEPSTLMVLQAAVKDRRIQLMFTKFVRELREEPVLMIRVSWNVFLISVSSAAVGLHRFLVFFLKEDGARFLDDKVKKMKIWLMEFSKRTANLEIQGIL

SEQ ID NO: 184333 - protein, 936 aa, Zea Mays
MATLVRPPALHVRAVSGGGNKDRVAPQRPWWGGNKPISPRQSGGSGARGGAGGGGVALDQVLGVLRRDGEFVQAAVGAPLRDVFWLRFLEKKQRKQQQPRPKHKPFRQQQEEEEVVVVDESPPAFPPPSYPSGLSCVELMAADFQALKVYAGSARHSLARRFLGSNSKGKSEQQPKPKPQEQQKEQQHILQAPAFPPPSYPPGLSCMELMMADLEALKLYINYYSAILTTPLPQHYDPDLLAQYFASRPHILASRVIQILFTFLSAVVKMRISKRAQLTTDATYSSGNSGNGFDDTQYMVGQLLKETFLNLGPTFIKVGQSLSTRPDIIGSEICEALAELHERVPTFPREDAMKIIEGEFGCPVSHMFSYVSDEPVASASFGQVYQGRTVDGSLVAIKVQRPDLLPSVLRDIYILRLGLAFIRKIAKRRSNISLYGDELGRGFVGELDYNIEAANATKFMEVHSRYPFMLVPKVLKQLTRKRVLTMEWVAGENPKDLLSLSKGVSEKFTQASDNQKLEAKSRLLDLVNKGVEASLVQLLETGLLHADPHPGNLRYTPEGRVGFLDFGLLCMMERKHQRAMLASIVHIVNGDWASVVYDLTEMDVVPPKTNLRRVTMVLGKIWSVAFKYHFRMPPYYTLVLRSLASLEAVAADGTFKTFQAAYPYVVRKLLSENSLETRRLLNQAIFNKRKEFQWQKIDAFLKLASARTNFKYNSEVLPEPDMKSMNVASLVEISDAYSLDRAIATPERALHTANLCVRLLLSKESIVIRRLIMTANAKSLARDLISRDALMFRVLLSKVIADVVYQWMLSATGLKRVMETKIQTPMTTGKNEGHLVLAEEPSTLMVLQAAVKDRRIQLMFTKFVRELREEPVLMIRVSWNVFLISVSSAAVGLHRFLVFFLKEDGARFLDDKVKKMKIWLMEFSKRTANLEIQGIL

SEQ ID NO: 184334 - protein, 639 aa, Zea Mays
MATLVRPPALHVRAVSGGGNKDRVAPQRPWWGGNKPISPRQSGGSGARGGAGGGGVALDQVLGVLRRDGEFVQAAVGAPLRDVFWLRFLEKKQRKQQQPRPKHKPFRQQQEEEEVVVVDESPPAFPPPSYPSGLSCVELMAADFQALKVYAGSARHSLARRFLGSNSKGKSEQQPKPKPQEQQKEQQHILQAPAFPPPSYPPGLSCMELMMADLEALKLYINYYSAILTTPLPQHYDPDLLAQYFASRPHILASRVIQILFTFLSAVVKMRISKRAQLTTDATYSSGNSGNGFDDTQYMVGQLLKETFLNLGPTFIKVGQSLSTRPDIIGSEICEALAELHERVPTFPREDAMKIIEGEFGCPVSHMFSYVSDEPVASASFGQVYQGRTVDGSLVAIKVQRPDLLPSVLRDIYILRLGLAFIRKIAKRRSNISLYGDELGRGFVGELDYNIEAANATKFMEVHSRYPFMLVPKVLKQLTRKRVLTMEWVAGENPKDLLSLSKGVSEKFTQASDNQKLEAKSRLLDLVNKGVEASLVQLLETGLLHADPHPGNLRYTPEGRVGFLDFGLLCMMERKHQRAMLASIVHIVNGDWASVVYDLTEMDVVPPKTNLRRVTMDLEDALGEVTFEDGIPEIKFSKD

SEQ ID NO: 184335 - protein, 586 aa, Zea Mays
MKIIEGEFGCPVSHMFSYVSDEPVASASFGQVYQGRTVDGSLVAIKVQRPDLLPSVLRDIYILRLGLAFIRKIAKRRSNISLYGDELGRGFVGELDYNIEAANATKFMEVHSRYPFMLVPKVLKQLTRKRVLTMEWVAGENPKDLLSLSKGVSEKFTQASDNQKLEAKSRLLDLVNKGVEASLVQLLETGLLHADPHPGNLRYTPEGRVGFLDFGLLCMMERKHQRAMLASIVHIVNGDWASVVYDLTEMDVVPPKTNLRRVTMVLGKIWSVAFKYHFRMPPYYTLVLRSLASLEGLAVAADGTFKTFQAAYPYVVRKLLSENSLETRRLLNQAIFNKRKEFQWQKIDAFLKLASARTNFKYNSEVLPEPDMKSMNVASLVEISDAYSLDRAIATPERALHTANLCVRLLLSKESIVIRRLIMTANAKSLARDLISRDALMFRVLLSKVIADVVYQWMLSATGLKRVMETKIQTPMTTGKNEGHLVLAEEPSTLMVLQAAVKDRRIQLMFTKFVRELREEPVLMIRVSWNVFLISVSSAAVGLHRFLVFFLKEDGARFLDDKVKKMKIWLMEFSKRTANLEIQGIL

SEQ ID NO: 184336 - protein, 608 aa, Zea Mays
MKIIEGEFGCPVSHMFSYVSDEPVASASFGQVYQGRTVDGSLVAIKVQRPDLLPSVLRDIYILRLGLAFIRKIAKRRSNISLYGDELGRGFVGELDYNIEAANATKFMEVHSRYPFMLVPKVLKQLTRKRVLTMEWVAGENPKDLLSLSKGVSEKFTQASDNQKLEAKSRLLDLVNKGVEASLVQLLETGLLHADPHPGNLRYTPEGRVGFLDFGLLCMMERKHQRAMLASIVHIVNGDWASVVYDLTEMDVVPPKTNLRRVTMDLEDALGEVTFEDGIPEIKFSKVLGKIWSVAFKYHFRMPPYYTLVLRSLASLEGLAVAADGTFKTFQAAYPYVVRKLLSENSLETRRLLNQAIFNKRKEFQWQKIDAFLKLASARTNFKYNSEVLPEPDMKSMNVASLVEISDAYSLDRAIATPERALHTANLCVRLLLSKESIVIRRLIMTANAKSLARDLISRDALMFRVLLSKVIADVVYQWMLSATGLKRVMETKIQTPMTTGKNEGHLVLAEEPSTLMVLQAAVKDRRIQLMFTKFVRELREEPVLMIRVSWNVFLISVSSAAVGLHRFLVFFLKEDGARFLDDKVKKMKIWLMEFSKRTANLEIQGIL

SEQ ID NO: 184337 - protein, 960 aa, Zea Mays
MATLVRPPALHVRAVSGGGNKDRVAPQRPWWGGNKPISPRQSGGSGARGGAGGGGVALDQVLGVLRRDGEFVQAAVGAPLRDVFWLRFLEKKQRKQQQPRPKHKPFRQQQEEEEVVVVDESPPAFPPPSYPSGLSCVELMAADFQALKVYAGSARHSLARRFLGSNSKGKSEQQPKPKPQEQQKEQQHILQAPAFPPPSYPPGLSCMELMMADLEALKLYINYYSAILTTPLPQHYDPDLLAQYFASRPHILASRVIQILFTFLSAVVKMRISKRAQLTTDATYSSGNSGNGFDDTQYMVGQLLKETFLNLGPTFIKVGQSLSTRPDIIGSEICEALAELHERVPTFPREDAMKIIEGEFGCPVSHMFSYVSDEPVASASFGQVYQGRTVDGSLVAIKVQRPDLLPSVLRDIYILRLGLAFIRKIAKRRSNISLYGDELGRGFVGELDYNIEAANATKFMEVHSRYPFMLVPKVLKQLTRKRVLTMEWVAGENPKDLLSLSKGVSEKFTQASDNQKLEAKSRLLDLVNKGVEASLVQLLETGLLHADPHPGNLRYTPEGRVGFLDFGLLCMMERKHQRAMLASIVHIVNGDWASVVYDLTEMDVVPPKTNLRRVTMDLEDALGEVTFEDGIPEIKFSKVLGKIWSVAFKYHFRMPPYYTLVLRSLASLEGLAVAADGTFKTFQAAYPYVVRKLLSENSLETRRLLNQAIFNKRKEFQWQKIDAFLKLASARTNFKYNSEVLPEPDMKSMNVASLVEISDAYSLDRAIATPERALHTANLCVRLLLSKESIVIRRLIMTANAKSLARDLISRDALMFRVLLSKVIADVVYQWMLSATGLKRVMETKIQTPMTTGKNEGHLVLAEEPSTLMVLQAAVKDRRIQLMFTKFVRELREEPVLMIRVSWNVFLISVSSAAVGLHRFLVFFLKEDGARFLDDKVKKMKIWLMEFSKRTANLEIQGIL

SEQ ID NO: 184338 - protein, 83 aa, Zea Mays
MMNQPGTAMKKKPAGRPAGYYQKMGRLEEAKGKTEKRGQKQAHMMRFLLLPAISQIFFLVHRIHAFTNTHPCGLQAKMASFCT

SEQ ID NO: 184339 - protein, 641 aa, Zea Mays
MTKKTCAICLTTMKPGQGHALFTAECSHTFHFHCISANVKHGSSSCPVCRIKWKELPFRGPLPAELPQGNARINPVHGYQNGGHMTIPRPLPLPRARSFGRLHHLATLLPDADPGTFNDDEPLDLSCEEANGTQQGCLRTVEIKAYPEFTQVPENTSERNFTVLVHLKAPPAQHLLQSSSDLGDGNGVSTTRAPVDLITVLDVSGSMAGTKLALLKRAMGFVIQNLGSSDRLSVIAFSSSARRLFPLRRMTESGRQQSLLAVNSLTANGGTNIAEGLRKGSKVIEERQSKNPVCSIILLSDGQDTYTVSPTAGVHKGATEYCALLPSTTTNGSQQVPVHVFGFGADHDSVSLHSISQTSGGTFSFIETEATIQDAFAQCIGGLLSVVAQGLHVKVESLHPDVHFGSIRSGSYSSRVSDDSRNGSVDVGDLYAEEERDFLVSVNVPPGCGETALLKVGCVYKDPLMKETVNMSGVQVKISRPAFVSAQSVSVEVDRQKNRLHAAEVMAEARLSAERGDLANAVSLLEDCRRMITGSASGQSGDRLCQALDAELKEMQDRMASRQRYEASGRAYVLSGLSSHSWQRATARGDSTDSASLVQAYQTSSMVDMLLRSQTMSRPSTPRPAPQIRHAKSFPARPQPR

SEQ ID NO: 184340 - protein, 465 aa, Zea Mays
MKPGQGHALFTAECSHTFHFHCISANVKHGSSSCPVCRIKWKELPFRGPLPAELPQGNARINPVHGYQNGGHMTIPRPLPLPRARSFGRLHHLATLLPDADPGTFNDDEPLDLSCEEANGTQQGCLRTVEIKAYPEFTQVPENTSERNFTVLVHLKAPPAQHLLQSSSDLGDGNGVSTTRAPVDLITVLDVSGSMAGTKLALLKRAMGFVIQNLGSSDRLSVIAFSSSARRLFPLRRMTESGRQQSLLAVNSLTANGGTNIAEGLRKGSKVIEERQSKNPVCSIILLSDGQDTYTVSPTAGVHKGATEYCALLPSTTTNGSQQVPVHVFGFGADHDSVSLHSISQTSGGTFSFIETEATIQDAFAQCIGGLLSVVAQGLHVKVESLHPDVHFGSIRLWRDGAPQGWLRLQGPADEGDGEHVRRAGEDLQASVRLGAERVGRGGPPEEPSPRRRGDGRGEVVRGAR

SEQ ID NO: 184341 - protein, 81 aa, Zea Mays
MELNSICHMHCIAGDVVTFVLLLNWVGIYLYLVIANKILTNFKSNDQLQPSSLVSLTLHVSSHLWRVHAHYSHNLLSYERM

SEQ ID NO: 184342 - protein, 285 aa, Zea Mays
MRLRLLACCYNDPEMRIDPDTVYPIRPDCRDDAPKTRFKPRGVHPTIKGEVWEFLLGCYDPKSTTEQCNQLRQQRRLEYEQLKAKCREMDTAVGSGRVITMPVVTEDGQPIENPNGGASGSEQKNSGAPLPKEVIDWKLTLHQIGLDVNRTDRLLVYYERQENLARLWDILAVYSWIDKDIGYCQGMSDLCSPISIILENEADAFWCFERLMRRVRGNFKSTSTSIGVRAQLTTLSTIMKSVDPKLHEHLENLDGGEYLFAFRMLMVLFRREFSFVDTMYLWECS

SEQ ID NO: 184343 - protein, 413 aa, Zea Mays
MRLRLLACCYNDPEMRIDPDTVYPIRPDCRDDAPKTRFKPRPGLTLSPKRWKLLHNEEGCVDIAGMIKRVQRGGVHPTIKGEVWEFLLGCYDPKSTTEQCNQLRQQRRLEYEQLKAKCREMDTAVGSGRVITMPVVTEDGQPIENPNGGASGSEQKNSGAPLPKEVIDWKLTLHQIGLDVNRTDRLLVYYERQENLARLWDILAVYSWIDKDIGYCQGMSDLCSPISIILENEADAFWCFERLMRRVRGNFKSTSTSIGVRAQLTTLSTIMKSVDPKLHEHLENLDGGEYLFAFRMLMVLFRREFSFVDTMYLWESDTGTSSASTKDESVLGQCGKFERKKLQAAKKDDQIPLSVFVVASVLEARNKKLLGEAKGLDDVVKILNEITGSLDAKKACREALQIHEKYLKTVKAS

SEQ ID NO: 184344 - protein, 381 aa, Zea Mays
MRLRLLACCYNDPEMRIDPDTVYPIRPDCRDDAPKTRFKPRGVHPTIKGEVWEFLLGCYDPKSTTEQCNQLRQQRRLEYEQLKAKCREMDTAVGSGRVITMPVVTEDGQPIENPNGGASGSEQKNSGAPLPKEVIDWKLTLHQIGLDVNRTDRLLVYYERQENLARLWDILAVYSWIDKDIGYCQGMSDLCSPISIILENEADAFWCFERLMRRVRGNFKSTSTSIGVRAQLTTLSTIMKSVDPKLHEHLENLDGGEYLFAFRMLMVLFRREFSFVDTMYLWESDTGTSSASTKDESVLGQCGKFERKKLQAAKKDDQIPLSVFVVASVLEARNKKLLGEAKGLDDVVKILNEITGSLDAKKACREALQIHEKYLKTVKAS

SEQ ID NO: 184345 - protein, 317 aa, Zea Mays
MRLRLLACCYNDPEMRIDPDTVYPIRPDCRDDAPKTRFKPRPGLTLSPKRWKLLHNEEGCVDIAGMIKRVQRGGVHPTIKGEVWEFLLGCYDPKSTTEQCNQLRQQRRLEYEQLKAKCREMDTAVGSGRVITMPVVTEDGQPIENPNGGASGSEQKNSGAPLPKEVIDWKLTLHQIGLDVNRTDRLLVYYERQENLARLWDILAVYSWIDKDIGYCQGMSDLCSPISIILENEADAFWCFERLMRRVRGNFKSTSTSIGVRAQLTTLSTIMKSVDPKLHEHLENLDGGEYLFAFRMLMVLFRREFSFVDTMYLWECS

SEQ ID NO: 184346 - protein, 211 aa, Zea Mays
MSDLCSPISIILENEADAFWCFERLMRRVRGNFKSTSTSIGVRAQLTTLSTIMKSVDPKLHEHLENLDGGEYLFAFRMLMVLFRREFSFVDTMYLWELMWSMEYNPNLFSMLESDTGTSSASTKDESVLGQCGKFERKKLQAAKKDDQIPLSVFVVASVLEARNKKLLGEAKGLDDVVKILNEITGSLDAKKACREALQIHEKYLKTVKAS

SEQ ID NO: 184347 - protein, 412 aa, Zea Mays
MRLRLLACCYNDPEMRIDPDTVYPIRPDCRDDAPKTRFKPRPGLTLSPKRWKLLHNEEGCVDIAGMIKRVQRGGVHPTIKGEVWEFLLGCYDPKSTTEQCNQLRQQRRLEYEQLKAKCREMDTAVGSGRVITMPVVTEDGQPIENPNGGASGSEQKNSGAPLPKEVIDWKLTLHQIENLARLWDILAVYSWIDKDIGYCQGMSDLCSPISIILENEADAFWCFERLMRRVRGNFKSTSTSIGVRAQLTTLSTIMKSVDPKLHEHLENLDGGEYLFAFRMLMVLFRREFSFVDTMYLWELMWSMEYNPNLFSMLESDTGTSSASTKDESVLGQCGKFERKKLQAAKKDDQIPLSVFVVASVLEARNKKLLGEAKGLDDVVKILNEITGSLDAKKACREALQIHEKYLKTVKAS

SEQ ID NO: 184348 - protein, 397 aa, Zea Mays
MRLRLLACCYNDPEMRIDPDTVYPIRPDCRDDAPKTRFKPRGVHPTIKGEVWEFLLGCYDPKSTTEQCNQLRQQRRLEYEQLKAKCREMDTAVGSGRVITMPVVTEDGQPIENPNGGASGSEQKNSGAPLPKEVIDWKLTLHQIGLDVNRTDRLLVYYERQENLARLWDILAVYSWIDKDIGYCQGMSDLCSPISIILENEADAFWCFERLMRRVRGNFKSTSTSIGVRAQLTTLSTIMKSVDPKLHEHLENLDGGEYLFAFRMLMVLFRREFSFVDTMYLWELMWSMEYNPNLFSMLESDTGTSSASTKDESVLGQCGKFERKKLQAAKKDDQIPLSVFVVASVLEARNKKLLGEAKGLDDVVKILNEITGSLDAKKACREALQIHEKYLKTVKAS

SEQ ID NO: 184349 - protein, 337 aa, Zea Mays
MTLKALPNSATNCDSSEEYEQLKAKCREMDTAVGSGRVITMPVVTEDGQPIENPNGGASGSEQKNSGAPLPKEVIDWKLTLHQIGLDVNRTDRLLVYYERQENLARLWDILAVYSWIDKDIGYCQGMSDLCSPISIILENEADAFWCFERLMRRVRGNFKSTSTSIGVRAQLTTLSTIMKSVDPKLHEHLENLDGGEYLFAFRMLMVLFRREFSFVDTMYLWELMWSMEYNPNLFSMLESDTGTSSASTKDESVLGQCGKFERKKLQAAKKDDQIPLSVFVVASVLEARNKKLLGEAKGLDDVVKILNEITGSLDAKKACREALQIHEKYLKTVKAS

SEQ ID NO: 184350 - protein, 632 aa, Zea Mays
MHGLASFPEAHSRIHKGLRYSVTAGDEVEDMFALLSEVKRRIPSISAVSSGAIASDYQRLRVESVCSRLGLVSLAYLWKQDQTLLLEEMIRRGIVAIIVKVAALGLKPSSHLGKELAELKCHLLQMNENYGINVCGEGGEYETLTLDCPLFRKPDSSDRIGDGSAVQESSSCVYEVDEVTTHDDVGEKQALSPAVDAYTNVDLCISKTGNNLRSMSCWIQDPSRASEGLKADLIAVLSRIENQLKEEGLGWVNVLYVHLYISSMKEFGLANEVYVSFITEKKCYLGVPSRSTIELPLVQAGLGKAYVEVLVSNEVVKRVLHVQSISCWAPSCIGPYSQLGLDPPTMKLCLGGPRAELELALQNSEAVANAFSCSIYISAIHFLVYCSAQLTSSEKEEIEQTLKSSYITRLDRSKGGSYPTVLYVFASDLPKGARVEVKPILYVPSTDDWVAAEETETGVPLPAPSKTWTDCTAPYSALRDSCCQVHTTGGRICSAVVSITDDIASKICSAAGQLHHGEENLKIMARFCAFQIAKTLADNRFSWDSVTMLRLYYSVDLAVAADAVSGAFSEALAELAQDNPSMRTDVPFYNVVPVAGAGRSACANDIMACELLASNVSSAKSIPAEPFAVTPA

SEQ ID NO: 184351 - protein, 646 aa, Zea Mays
MGLPLFRRRIRGSTRDQGLRYSVTAGDEVEDMFALLSEVKRRIPSISAVSSGAIASDYQRLRVESVCSRLGLVSLAYLWKQDQTLLLEEMIRRGIVAIIVKVAALGLKPSSHLGKELAELKCHLLQMNENYGINVCGEGGEYETLTLDCPLFRKPDSSDRIGDGSAVQESSSCVYEVDEVTTHDDVGEKQALSPAVDAYTNVDLCISKTGNNLRSMSCWIQDPSRASEGLKADLIAVLSRIENQLKEEGLGWVNVLYVHLYISSMKEFGLANEVYVSFITEKKCYLGVPSRSTIELPLVQAGLGKAYVEVLVSNEVVKRVLHVQSISCWAPSCIGPYSQATLYEDILYMAGQLGLDPPTMKLCLGGPRAELELALQNSEAVANAFSCSIYISAIHFLVYCSAQLTSSEKEEIEQTLKSSYITRLDRSKGGSYPTVLYVFASDLPKGARVEVKPILYVPSTDDWVAAEETETGVPLPAPSKTWTDCTAPYSALRDSCCQVHTTGGRICSAVVSITDDIASKICSAAGQLHHGEENLKIMARFCAFQIAKTLADNRFSWDSVTMLRLYYSVDLAVAADAVSGAFSEALAELAQDNPSMRTDVPFYNVVPVAGAGRSACANDIMACELLASNVSSAKSIPAEPFAVTPA

SEQ ID NO: 184352 - protein, 708 aa, Zea Mays
MEVVALVSGGKDSCFAMMRCMDYGHKVVALANLIPLDDTVDELDSYMYQTVGHQIVVSYAKCMGLPLFRRRIRGSTRDQGLRYSVTAGDEVEDMFALLSEVKRRIPSISAVSSGAIASDYQRLRVESVCSRLGLVSLAYLWKQDQTLLLEEMIRRGIVAIIVKVAALGLKPSSHLGKELAELKCHLLQMNENYGINVCGEGGEYETLTLDCPLFRKPDSSDRIGDGSAVQESSSCVYEVDEVTTHDDVGEKQALSPAVDAYTNVDLCISKTGNNLRSMSCWIQDPSRASEGLKADLIAVLSRIENQLKEEGLGWVNVLYVHLYISSMKEFGLANEVYVSFITEKKCYLGVPSRSTIELPLVQAGLGKAYVEVLVSNEVVKRVLHVQSISCWAPSCIGPYSQATLYEDILYMAGQLGLDPPTMKLCLGGPRAELELALQNSEAVANAFSCSIYISAIHFLVYCSAQLTSSEKEEIEQTLKSSYITRLDRSKGGSYPTVLYVFASDLPKGARVEVKPILYVPSTDDWVAAEETETGVPLPAPSKTWTDCTAPYSALRDSCCQVHTTGGRICSAVVSITDDIASKICSAAGQLHHGEENLKIMARFCAFQIAKTLADNRFSWDSVTMLRLYYSVDLAVAADAVSGAFSEALAELAQDNPSMRTDVPFYNVVPVAGAGRSACANDIMACELLASNVSSAKSIPAEPFAVTPA

SEQ ID NO: 184353 - protein, 680 aa, Zea Mays
MGLPLFRRRIRGSTRDQGLRYSVTAGDEVEDMFALLSEVKRRIPSISAVSSGAIASDYQRLRVESVCSRLGLVSLAYLWKQDQTLLLEEMIRRGIVAIIVKVAALGLKPSSHLGKELAELKCHLLQMNENYGINVCGEGGEYETLTLDCPLFRNARIILDDSEVILHSADSIASVGILHPRAFHLEQKPDSSDRIGDGSAVQESSSCVYEVDEVTTHDDVGEKQALSPAVDAYTNVDLCISKTGNNLRSMSCWIQDPSRASEGLKADLIAVLSRIENQLKEEGLGWVNVLYVHLYISSMKEFGLANEVYVSFITEKKCYLGVPSRSTIELPLVQAGLGKAYVEVLVSNEVVKRVLHVQSISCWAPSCIGPYSQATLYEDILYMAGQLGLDPPTMKLCLGGPRAELELALQNSEAVANAFSCSIYISAIHFLVYCSAQLTSSEKEEIEQTLKSSYITRLDRSKGGSYPTVLYVFASDLPKGARVEVKPILYVPSTDDWVAAEETETGVPLPAPSKTWTDCTAPYSALRDSCCQVHTTGGRICSAVVSITDDIASKICSAAGQLHHGEENLKIMARFCAFQIAKTLADNRFSWDSVTMLRLYYSVDLAVAADAVSGAFSEALAELAQDNPSMRTDVPFYNVVPVAGAGRSACANDIMACELLASNVSSAKSIPAEPFAVTPA

SEQ ID NO: 184354 - protein, 901 aa, Zea Mays
MAPPPTPRSTPAQVPPGAAATPLRTPASKHRLHFPAATPRNAHHANHGGGGATEHPVEVIGRIRNLASGSASALEIMGSGTAVRVRGDAVGCRDFTLDGVSVSEEEDLEGFYRRFVRSRIQGVRVGAKCTVMVYGPTGSGKSHTMFGCTKQPGIVYRALRDILEGGEGDSAEDDAGFDAGLFVQVAVLEIYNEEIYDLLVGSGATAKGNTPKFCIYAQAKLEVMGKKAKNASYISGNEAGRISREVFKVEKRRTVKSTLCNERSSRSHCMIILDVPSVGGRLMLVDMAGSENIEAAGQTGFEAKMQTAKINQGNTALKRVVESIANGDSHVPFRDSKLTMLLQDSFEDDKSKILMILCASPDPKELHKTVSTLEYGAKAKCIVRAAHATTPRDKMSSEESSVMLNSRIVAMNQFIHKLQKENKLREKERNEAQNVLRLKEEELAQLRAKLKLIEGQGKATENEINSKVMEKTQLLRSELMKMEEAMLKQQQELTSLRQRLQEVEHEKADGCQPLQQDIIGGRLLARLSEMPAGLDQSVAMDMSMDLDMGDQPVMQDVKVIKEDTRQQGHIWNHTATAASACTGSVVQEDDVKLSGYPEKTVLSTVFEEGDEEDAEKCGLQEEVRKEVVEENFNVDITQHTLSEPDDPATRKHRIENIFRLCGNHREIAKKPKVQSPAKEMFCSENKSPAKQVFGDQNKSSSNQIFGDENKEPSAWGAIETPMCDVRVTDSPVSSQLSPIVCQVVAAPLSEELNTCSAVEGSDPSKEKNSLAGQKDGGGLLEVYIKWESGNLIKGLKLLRNSCLSDLRKLIEAHFEEVGSKQQQQQFIFLLLGDPSGAPVSRDKEASVQISRLPHWNNQADGYLACLRADKKPAADHTPFSPLDSKLNTVVKDAHLAGAMFA

SEQ ID NO: 184355 - protein, 736 aa, Zea Mays
MTPGLTPASSCRSRCWRSITRRSTICSWEAGPLLKETPPRCIVEASQFCIYAQAKLEVMGKKAKNASYISGNEAGRISREVFKVEKRRTVKSTLCNERSSRSHCMIILDVPSVGGRLMLVDMAGSENIEAAGQTGFEAKMQTAKINQGNTALKRVVESIANGDSHVPFRDSKLTMLLQDSFEDDKSKILMILCASPDPKELHKTVSTLEYGAKAKCIVRAAHATTPRDKMSSEESSVMLNSRIVAMNQFIHKLQKENKLREKERNEAQNVLRLKEEELAQLRAKLKLIEGQGKATENEINSKVMEKTQLLRSELMKMEEAMLKQQQELTSLRQRLQEVEHEKADGCQPLQQDIIGGRLLARLSEMPAGLDQSVAMDMSMDLDMGDQPVMQDVKVIKEDTRQQGHIWNHTATAASACTGSVVQEDDVKLSGYPEKTVLSTVFEEGDEEDAEKCGLQEEVRKEVVEENFNVDITQHTLSEPDDPATRKHRIENIFRLCGNHREIAKKPKVQSPAKEMFCSENKSPAKQVFGDQNKSSSNQIFGDENKEPSAWGAIETPMCDVRVTDSPVSSQLSPIVCQVVAAPLSEELNTCSAVEGSDPSKEKNSLAGQKDGGGLLEVYIKWESGNLIKGLKLLRNSCLSDLRKLIEAHFEEVGSKQQQQQFIFLLLGDPSGAPVSRDKEASVQISRLPHWNNQADGYLACLRADKKPAADHTPFSPLDSKLNTVVKDAHLAGAMFA

SEQ ID NO: 184356 - protein, 206 aa, Zea Mays
MAETFRTHAYGSCTSSSQYKNLAYVLSFPAILLASDAECLRRYLEEGHDMNQLANAGKYVSAMVAAAVRFKYAATPTPFWMWMVIASSTGATIYQLYWDFVMDWGFLNPKSKNFWLRDQLILKNKSIYYASMMLNLVLRLAWAESVMKLRLGMVESRLLDFSLASLEIIRRGHWNFYRLENEHLNNAGKFRAVKTVPLPFRELETD

SEQ ID NO: 184357 - protein, 548 aa, Zea Mays
MNIHDTILQGIDQLRPNLGAQMQKPFLSTQSQFQLMSPQQQQQYLAQAQAQGNLGNSTNYGDIDPRRLTALTRGSLNGKDSQPAGTDGCISSPMQSSSPKVRPDQEYLMKTSSQQPQEQLQQQQQNQQQQQSQQQMQQNNRKRKQPTSSGPANSTGTGNTVGPANSPPSTPSTHTPGDGLGMGGNMRHVPKNLMIYGADGTGLASSSNQMDDLEQFGDVGSLDDNVESFLSNDDGDPRDIFAALKRSPAEPSPAVSKGFTFSEVNCWRTSNSKIVCCHFSSDGKILASAGHEKKAVLWNMENFQTQYTPEEHALIITDVRFRPNSSQLATSSFDRTIKLWNAADPGFSLHTFTGHNGQVTSLDFHPKKTDLLCSCDGSGEIRYWNVTQFACLRAIKGGSAQVRFQPHVGQFLAAAAENVVSIFDIETHGKKYTLQGHNTDVQSVCWDNNGEYIASVSQDLVKVWSMSTGDCIYELSSNGNKFHSCVFHPSYSNLLVIGGYQSLEVWNMVKNQSLTVQAHEGLIAALAQSPVTGMIASASHDNSVKVWK

SEQ ID NO: 184358 - protein, 792 aa, Zea Mays
MAQSNWEADKMLDVYIYDYLLKRNLQTTAKAFMTEGKVAADPVAIDAPGGFLFEWWSVFWDIFIARTNEKHSEVAAAYLEAQQIKAREHQQQMQMQQLQLMHQRHAQLQRTNANHPSLNGPINALNSEGILGPSTASVLAAKMYEERLKHPHSMESEGSQLIEASRMALLKSATNHAGQLVPGTPGNVSTTLQQIQDIKSEGNMGVPQRSLPMDPSSLYGQGLIQPKPGLSGAGLNQGVSGLPLKGWPLTGIDQLRPNLGAQMQKPFLSTQSQFQLMSPQQQQQYLAQAQAQGNLGNSTNYGDIDPRRLTALTRGSLNGKDSQPAGTDGCISSPMQSSSPKVRPDQEYLMKMQQTSSQQPQEQLQQQQQNQQQQQSQQQMQQNNRKRKQPTSSGPANSTGTGNTVGPANSPPSTPSTHTPGDGLGMGGNMRHVPKNLMIYGADGTGLASSSNQMDDLEQFGDVGSLDDNVESFLSNDDGDPRDIFAALKRSPAEPSPAVSKGFTFSEVNCWRTSNSKIVCCHFSSDGKILASAGHEKKAVLWNMENFQTQYTPEEHALIITDVRFRPNSSQLATSSFDRTIKLWNAADPGFSLHTFTGHNGQVTSLDFHPKKTDLLCSCDGSGEIRYWNVTQFACLRAIKGGSAQVRFQPHVGQFLAAAAENVVSIFDIETHGKKYTLQGHNTDVQSVCWDNNGEYIASVSQDLVKVWSMSTGDCIYELSSNGNKFHSCVFHPSYSNLLVIGGYQSLEVWNMVKNQSLTVQAHEGLIAALAQSPVTGMIASASHDNSVKVWK

SEQ ID NO: 184359 - protein, 293 aa, Zea Mays
MCPLQHQKDYHPTTQELGLLGERGSWPLPSPTTPSLPQPFLYYQGDPVLNPLTPWERPPIKNVFCIYGIDSKTEVGYYFAPSGKPYPDNWIITDIIYELEGSLLSRSGNSVSGKPNNSSGDGTVSYNSLSWCKNWLGPKVNITRAPQAEHDGSDLQTAMNIDHHHGDDILPNMTRVPHVKYITYYEDAESLPGWRTAVWELDKANHRNIVRTPVLMRELWLEMWHDLHPDSKSKFVTKAFRGPLRNEDCRWDYGKARCGFPEHCEYRYTFGDVHLGMSCRLRNTSANLLQQYL

SEQ ID NO: 184360 - protein, 452 aa, Zea Mays
MPSRRRRRGDLAVAVAVLATVALAAGADGGAEFDYRKLSGIIIPGFASTQLRAWSVLDCPYSPFDFNPLDSVWLDTAKLFSAVNCWLKCMLLEPYNQTDHPECKSRPDSGLSAITELDPGYITGPLSSVWKEWVKWCVEFGIEANAIIAVPYDWRLPPSMLEERDLYFHKLKLTFEIALKLRGGPSLVFAHSMGNNVFRYFLEWLKLEIAPKHYIQWLDEHIHAYFAVGAPLLGSTEAVRGALSGTTFGLPVSEGTARLMFNAFGSSLWLMPFSKHCKADNIYWKHFFEGKGGCPHKQQCDEDEYISDYGGWPTDLVNIEVPSARDMGAYPSITDITENITSIMECGKPTLLSFSAREVSDGTLFKTIEDYDPQSKALVYQLEKYYQGDPVLNPLTPWERPPIKNVFCIYGIDSKTEVGYYFAPSGKPYPDNWIITDIIYELEGSLLSRQIR

SEQ ID NO: 184361 - protein, 174 aa, Zea Mays
MGAYPSITDITENITSIMECGKPTLLSFSAREVSDGTLFKTIEDYDPQSKALVYQLEKYYQGDPVLNPLTPWERPPIKNVFCIYGIDSKTEVGYYFAPSGKPYPDNWIITDIIYELEGSLLSRSGNSVSGKPNNSSGDGTVSYNSLSWCKNWLGPKVNITRAPQNMMDLICKQP

SEQ ID NO: 184362 - protein, 290 aa, Zea Mays
MLEERDLYFHKLKLTFEIALKLRGGPSLVFAHSMGNNVFRYFLEWLKLEIAPKHYIQWLDEHIHAYFAVGAPLLGSTEAVRGALSGTTFGLPVSEGTARLMFNAFGSSLWLMPFSKHCKADNIYWKHFFEGKGGCPHKQQCDEDEYISDYGGWPTDLVNIEVPSARDMGAYPSITDITENITSIMECGKPTLLSFSAREVSDGTLFKTIEDYDPQSKALVYQLEKYYQGDPVLNPLTPWERPPIKNVFCIYGIDSKTEVGYYFAPSGKPYPDNWIITDIIYELEGSLLSR

SEQ ID NO: 184363 - protein, 499 aa, Zea Mays
MPSRRRRRGDLAVAVAVLATVALAAGADGGAEFDYRKLSGIIIPGFASTQLRAWSVLDCPYSPFDFNPLDSVWLDTAKLFSAVNCWLKCMLLEPYNQTDHPECKSRPDSGLSAITELDPGYITGPLSSVWKEWVKWCVEFGIEANAIIAVPYDWRLPPSMLEERDLYFHKLKLTFEIALKLRGGPSLVFAHSMGNNVFRYFLEWLKLEIAPKHYIQWLDEHIHAYFAVGAPLLGSTEAVRGALSGTTFGLPVSEGTARLMFNAFGSSLWLMPFSKHCKADNIYWKHFFEGKGGCPHKQQCDEDEYISDYGGWPTDLVNIEVPSARDMGAYPSITDITENITSIMECGKPTLLSFSAREVSDGTLFKTIEDYDPQSKALVYQLEKYYQGDPVLNPLTPWERPPIKNVFCIYGIDSKTEVGYYFAPSGKPYPDNWIITDIIYELEGSLLSRSGNSVSGKPNNSSGDGTVSYNSLSWCKNWLGPKVNITRAPQYIATLSRPL

SEQ ID NO: 184364 - protein, 444 aa, Zea Mays
MGNNVFRYFLEWLKLEIAPKHYIQWLDEHIHAYFAVGAPLLGSTEAVRGALSGTTFGLPVSEGTARLMFNAFGSSLWLMPFSKHCKADNIYWKHFFEGKGGCPHKQQCDEDEYISDYGGWPTDLVNIEVPSARDMGAYPSITDITENITSIMECGKPTLLSFSAREVSDGTLFKTIEDYDPQSKALVYQLEKYYQGDPVLNPLTPWERPPIKNVFCIYGIDSKTEVGYYFAPSGKPYPDNWIITDIIYELEGSLLSRSGNSVSGKPNNSSGDGTVSYNSLSWCKNWLGPKVNITRAPQAEHDGSDLQTAMNIDHHHGDDILPNMTRVPHVKYITYYEDAESLPGWRTAVWELDKANHRNIVRTPVLMRELWLEMWHDLHPDSKSKFVTKAFRGPLRNEDCRWDYGKARCGFPEHCEYRYTFGDVHLGMSCRLRNTSANLLQQYL

SEQ ID NO: 184365 - protein, 449 aa, Zea Mays
MPSRRRRRGDLAVAVAVLATVALAAGADGGAEFDYRKLSGIIIPGFASTQLRAWSVLDCPYSPFDFNPLDSVWLDTAKLFSAVNCWLKCMLLEPYNQTDHPECKSRPDSGLSAITELDPGYITGPLSSVWKEWVKWCVEFGIEANAIIAVPYDWRLPPSMLEERDLYFHKLKLTFEIALKLRGGPSLVFAHSMGNNVFRYFLEWLKLEIAPKHYIQWLDEHIHAYFAVGAPLLGSTEAVRGALSGTTFGLPVSEGTARLMFNAFGSSLWLMPFSKHCKADNIYWKHFFEGKGGCPHKQQCDEDEYISDYGGWPTDLVNIEVPSARDMGAYPSITDITENITSIMECGKPTLLSFSAREVSDGTLFKTIEDYDPQSKALVYQLEKYYQGDPVLNPLTPWERPPIKNVFCIYGIDSKTEVGYYFAPSGKPYPDNWIITDIIYELEGSLLSR

SEQ ID NO: 184366 - protein, 416 aa, Zea Mays
MGITCSHTSTMNRLHSGRVPPCLSSAITPVPAFSEASFPSFTEQRSSFAERKLPVSSVASIGTSMAAYDTMSTHMLASNFTNESPNRQLCSGSYVTEPSDPDTPLLATHSSLMADSTPLFVDFSEVSEHICLNQGQLLGLFDYPASVDFYKSKNMTIFGQQIQDTITVDPNTHLTPQNELFSGSSMQLQKTVGSAESVLKTVDARSATPQSYLYCHTESERSVPEPFNCDKLGADSLPFSNTAPKPRMRWTPELHECFVDAVNKLGGSEKATPKAVQKVMKVDGLTIYHVKSHLQKHRIVQHRSETSGGVPGRRGSHTEVDDDSIPQSKGEGGVEGGLVSQIGLQKQLHEQLEIQRRLQLQVEEHNKYLETVIAKQNESLKKLRALRGFRDRVRRVLQDSEAPGVRAHCAQAQQRS

SEQ ID NO: 184367 - protein, 415 aa, Zea Mays
MGITCSHTSTMNRLHSGRVPPCLSSAITPVPAFSEASFPSFTEQRSSFAERKLPVSSVASIGTSMAAYDTMSTHMLASNFTNESPNRQLCSGSYVTEPSDPDTPLLATHSSLMADSTPLFVDFSEVSEHICLNQGQLLGLFDYPASVDFYKSKNMTIFGQQIQDTITVDPNTHLTPQNELFSGSSMQLQKTVGSAESVLKTVDARSATPQSYLYCHTESERSVPEPFNCDKLGADSLPFSNTAPKPRMRWTPELHECFVDAVNKLGGSEKATPKAVQKVMKVDGLTIYHVKSHLQKHRIVQHRSETSGAGVPGRRGSHTEVDDDSIPQSKGEGGVEGGLVSQIGLQKQLHEQLEIQRRLQLQVEEHNKYLETVIAKQNESLKKLRALRGFRDRVRRVLQDSEAPGVRAHCAQAQQ

SEQ ID NO: 184368 - protein, 56 aa, Zea Mays
MQDSHYRVNHPYYGFYIKLLCVNVYDEIDQHRNCEITERIQCLRRIPYSENSSNGS

SEQ ID NO: 184369 - protein, 110 aa, Zea Mays
MARMASADIMCVDSKAIREKFTGMIRQQDVRATEIDKVDMYQSYRPGDIVKAMVLSLGDARAYYLSTAKNELGVVSAQSIAGGTLVPISWTEMQCDLTGQIEQRKVAKVE

SEQ ID NO: 184370 - protein, 527 aa, Zea Mays
MGGVGAGSLALLRLLLLLLLRAEASALHATILPSPAPSPSKAPEARSFGPRISPSHPPSALPPGSPGVDARHHSHKHPHHRESNQGPSPSSAPTPEGCSSYICTEPLTATPIGSPCGCVEPISVIVDLDLAPYLLFMSIAELEVEVAAGTFLKQSQVKIMAAVASIQDDQKTRVTIYLVPLREQFDTYTASLISDRFMEKKVQINSSIFGDYKVINISYHGLQSPPSSLPGGSDPSGTEEYPITAEVPDQKKKHNKSDILVIVVVLGSSLGLLMTCAVLLILLVRWKKLGRLHEAMTPATIPAVNRRYGTRPTLSTSMVSSASASVFSTVATCTTSVKTFSLAQLQKATDGFDSRRVLGQGGFGRVYHGTIEDGNEIAVKLLTREDRSGDREFIAEVEMLSRLHHRNLVKLIGICIERSKRCLVYELIRNGSVESHLHGADKAKGKLNWDVRMKIALGAARGLAYLHEDSNPHVIHRDFKASNILLEEDFTPKVTDFGLAREASNATQPISTRLCCSRICNDGPSSC

SEQ ID NO: 184371 - protein, 459 aa, Zea Mays
MGGVGAGSLALLRLLLLLLLRAEASALHGCSSYICTEPLTATPIGSPCGCVEPISVIVDLDLAPYLLFMSIAELEVEVAAGTFLKQSQVKIMAAVASIQDDQKTRVTIYLVPLREQFDTYTASLISDRFMEKKVQINSSIFGDYKVINISYHGLQSPPSSLPGGSDPSGTEEYPITAEVPDQKKKHNKSDILVIVVVLGSSLGLLMTCAVLLILLVRWKKLGRLHEAMTPATIPAVNRRYGTRPTLSTSMVSSASASVFSTVATCTTSVKTFSLAQLQKATDGFDSRRVLGQGGFGRVYHGTIEDGNEIAVKLLTREDRSGDREFIAEVEMLSRLHHRNLVKLIGICIERSKRCLVYELIRNGSVESHLHGADKAKGKLNWDVRMKIALGAARGLAYLHEDSNPHVIHRDFKASNILLEEDFTPKVTDFGLAREASNATQPISTRLCCSRICNDGPSSC

SEQ ID NO: 184372 - protein, 673 aa, Zea Mays
MGGVGAGSLALLRLLLLLLLRAEASALHGCSSYICTEPLTATPIGSPCGCVEPISVIVDLDLAPYLLFMSIAELEVEVAAGTFLKQSQVKIMAAVASIQDDQKTRVTIYLVPLREQFDTYTASLISDRFMEKKVQINSSIFGDYKVINISYHGLQSPPSSLPGGSDPSGTEEYPITAEVPDQKKKHNKSDILVIVVVLGSSLGLLMTCAVLLILLVRWKKLGRLHEAMTPATIPAVNRRYGTRPTLSTSMVSSASASVFSTVATCTTSVKTFSLAQLQKATDGFDSRRVLGQGGFGRVYHGTIEDGNEIAVKLLTREDRSGDREFIAEVEMLSRLHHRNLVKLIGICIERSKRCLVYELIRNGSVESHLHGADKAKGKLNWDVRMKIALGAARGLAYLHEDSNPHVIHRDFKASNILLEEDFTPKVTDFGLAREASNATQPISTRVMGTFGYVAPEYAMTGHLLVKSDVYSYGVVLLELISGRKPVNISESKDPENLVTWARPLLSHKEGLEKLIDPSLDGNFNFDNVAKVASIASMCVHTDPSQRPFMGEVVQALKLIYNDPDEACDDSYSPRNSSDQDGDYEGDLVFESGSWGFGASGCLDYRNSLPFVTMDYSSGRIEGPHDPRAALSAGSHAQSPVLQNRSGPLRMKKKLASFYRSRGSISEHGHLPRH

SEQ ID NO: 184373 - protein, 544 aa, Zea Mays
MEKKVQINSSIFGDYKVINISYHGLQSPPSSLPGGSDPSGTEEYPITAEVPDQKKKHNKSDILVIVVVLGSSLGLLMTCAVLLILLVRWKKLGRLHEAMTPATIPAVNRRYGTRPTLSTSMVSSASASVFSTVATCTTSVKTFSLAQLQKATDGFDSRRVLGQGGFGRVYHGTIEDGNEIAVKLLTREDRSGDREFIAEVEMLSRLHHRNLVKLIGICIERSKRCLVYELIRNGSVESHLHGADKAKGKLNWDVRMKIALGAARGLAYLHEDSNPHVIHRDFKASNILLEEDFTPKVTDFGLAREASNATQPISTRVMGTFGYVAPEYAMTGHLLVKSDVYSYGVVLLELISGRKPVNISESKDPENLVTWARPLLSHKEGLEKLIDPSLDGNFNFDNVAKVASIASMCVHTDPSQRPFMGEVVQALKLIYNDPDEACDDSYSPRNSSDQDGDYEGDLVFESGSWGFGASGCLDYRNSLPFVTMDYSSGRIEGPHDPRAALSAGSHAQSPVLQNRSGPLRMKKKLASFYRSRGSISEHGHLPRH

SEQ ID NO: 184374 - protein, 75 aa, Zea Mays
MPALWLHQQMRAEPSTATVHYLQGTVFGCMQQFNYKKLNAVLHRLLLDGKGKAKGRYHGETVSNGGACKQTSSHC

SEQ ID NO: 184375 - protein, 149 aa, Zea Mays
MVYVIDEVESSPVAQNLTLRDLPLRDVLFVSERTLVGVGFDCNPMIFAADDTGLWSFVRFLDEMKAAPSASKASQLSEALGKLYGQSKQGASSDTVEPSKARGGAHENCITCIVPLRKGSDGTIKRFSTSGLDGKVVVWDLENHVSIAK

SEQ ID NO: 184376 - protein, 346 aa, Zea Mays
MAAAAIHQFAECITCHAWSPDQSMIAFCPNNHEVHIYKFFTDKWEKLHVLSKHDQIVSGIDWSNSSNKIVTVSHDRNSYVWTQEGSDWIPTLVILKLNRAALCVQWSPKENKFAVGSGAKSVCICYYEQENNWWISKVIRKRHESSVTSLAWHPNNIYLATTSTDGKCRVFSTFIKGVDTRGSQSSTSTNSKFGEQIAQLDLSSTWVFGVRWSPSGKTLAYAGHNSMVYVIDEVESSPVAQNLTLRDLPLRDVLFVSERTLVGVGFDCNPMIFAADDTGLWSFVRFLDEMKAAPSASKASQVYTLSCITSIYVVNACPYYNLSLFCYYVRVLFTLCLSSVYFILNC

SEQ ID NO: 184377 - protein, 262 aa, Zea Mays
MIEIRKYMSKCKFLEDLSCFLLWQGIGGYIYIFSFDLRYVWTQEGSDWIPTLVILKLNRAALCVQWSPKENKFAVGSGAKSVCICYYEQENNWWISKVIRKRHESSVTSLAWHPNNIYLATTSTDGKCRVFSTFIKGVDTRGSQSSTSTNSKFGEQIAQLDLSSTWVFGVRWSPSGKTLAYAGHNSMVYVIDEVESSPVAQNLTLRDLPLRDVLFVSERTLVGVGFDCNPMIFAADDTGLWSFVRFLDEMKAAPSASKASQF

SEQ ID NO: 184378 - protein, 398 aa, Zea Mays
MIGLFGEASQRLCEKLDKAAVDGEDMEMESLFSRLTLDVIGKAVFNYDFDSLSYDNGIVEAVYVTLREAEMRSTSPIPTWEIPIWKDISPRQKKVNEALKLINSTLDELIAICKRLVEQEDLQFHEEYMNEQDPSILHFLLASGDDVSSKQLRDDLMTMLIAGHETSAAVLTWTFYLLSKYPKVMAKLQDEADSVLGDGLPTIEDVKKLKYTTRVINESLRLYPQPPVLIRRSLEDDILGGYPIGRGEDIFISVWNLHHCPKHWDDAEVFNPERWPLDGPNPNEINQNFSYLPFGGGPRKCVGDMFATFETVVATAMLVKRFDFQMAPGAPPVDMTTGATIHTTEGLKMTVTRRTRPPVIPNLEMKIITDSQESTLSAPSMVVSAASVASGEDQGGIS

SEQ ID NO: 184379 - protein, 225 aa, Zea Mays
MALLGGDVTTTDQAEVLPLLMRNVERNRSWISQSNPDSDILANTKTDSVGSITVAELDWGNKEHIKAVEPPFDYIVGTDVVYSEHLLQPLMETITALSGPKTKILLGYEIRSTTVHEKMMEMWKSNFIVKTVSRSKMDVKYQHPSIHLYMMDLKAPLIPEVEAADNGNYEEEVEVAVNQEEDEDPGVKSESCSGSSPEAKSGSLDDWEIRRCGAMAARLLKDVKL

SEQ ID NO: 184380 - protein, 212 aa, Zea Mays
MALLGGDVTTTDQAEVLPLLMRNVERNRSWISQSNPDSDSVGSITVAELDWGNKEHIKAVEPPFDYIVYSEHLLQPLMETITALSGPKTKILLGYEIRSTTVHEKMMEMWKSNFIVKTVSRSKMDVKYQHPSIHLYMMDLKAPLIPEVEAADNGNYEEEVEVAVNQEEDEDPGVKSESCSGSSPEAKSGSLDDWEIRRCGAMAARLLKDVKL

SEQ ID NO: 184381 - protein, 237 aa, Zea Mays
MAAAASPATAAAVREAAPAHRQIGIRPGHGPAPFRIGFLAKPSSRWAAISVPPGPRRAAPAASAARERVTEEEERPVSVELEPIASEQQLDWVLGEARQLQLPIVLLWMASWCRKCIYLKPKLEKLAAEYHPRIRFYCIDVNCVPQKLVNRAGVTLVCSNCVHTQVTKQIPSTFVKLTRTLMAPFVGTCEICTAGLEQKMPCIQLWSDSRKQAEVIGGGHKSWLVIDDVRRMIEQEE

SEQ ID NO: 184382 - protein, 413 aa, Zea Mays
MAVEGYKAQSEMVIDSLDRLITSWEEQKESVIVEGVHLSLNFVMGLMKKHPSIIPFMVYITNEDKHMERFAVRAKYMTLDPAKNRYIKYIRNIRAIQEYLCNRADKHLVPKINNTNVDQSVAAIHATVFSCLRRRAAGEQLYDLNTNTVAVVDEEYRNQRAANTLGSKGMFQLIQRKGSSRNLMALLNTDGSVTKAWHVSASDGNGNLNGITNNKKSPENPMLDPSQIGKAEAVNLQFGPFGISAWMSDTGGTSHTGSVEDLRPDSVETGGRNYSSCCSSPKMSDSTSKELMEDYSVYGSDEEADDPRDAETDDDLTDEERDMHEIDAGSVDEHSTKSDEEYEDLAMRDVMENGDWSDDDQAVGKTKNSPALESIHGSGAAEDDGIKSRYHHNLDLFLKMSKEVAGTRMPCAS

SEQ ID NO: 184383 - protein, 398 aa, Zea Mays
MWQVHFIIFAGEYLDPIAVAQAKAKRNANKPTVVSHPNTSGDKDVTSGDKSQHGSSELPPRAELIGNKQMAVEGYKAQSEMVIDSLDRLITSWEEQKESVIVEGVHLSLNFVMGLMKKHPSIIPFMVYITNEDKHMERFAVRAKYMTLDPAKNRYIKYIRNIRAIQEYLCNRADKHLVPKINNTNVDQSVAAIHATVFSCLRRRAAGEQLYDLNTNTVAVVDEEYRNQRAANTLGSKGMFQLIQRKGSSRNLMALLNTDGSVTKAWHVSASDGNGNLNGITNNKKSPENPMLDPSQIGKAEAVNLQFGPFGISAWMSDTGGTSHTGSVEDLRPDSVETGGRNYSSCCSSPKMSDSTSKELMEDYSVYGSDEEADDPRDAETDDDLTDEERDMHEMQAL

SEQ ID NO: 184384 - protein, 491 aa, Zea Mays
MPSLCTSMLDPTRKLTCFLLAELKRERNRWQYSCVGQVDVASPLYHLCCGDKDVTSGDKSQHGSSELPPRAELIGNKQMAVEGYKAQSEMVIDSLDRLITSWEEQKESVIVEGVHLSLNFVMGLMKKHPSIIPFMVYITNEDKHMERFAVRAKYMTLDPAKNRYIKYIRNIRAIQEYLCNRADKHLVPKINNTNVDQSVAAIHATVFSCLRRRAAGEQLYDLNTNTVAVVDEEYRNQRAANTLGSKGMFQLIQRKGSSRNLMALLNTDGSVTKAWHVSASDGNGNLNGITNNKKSPENPMLDPSQIGKAEAVNLQFGPFGISAWMSDTGGTSHTGSVEDLRPDSVETGGRNYSSCCSSPKMSDSTSKELMEDYSVYGSDEEADDPRDAETDDDLTDEERDMHEIDAGSVDEHSTKSDEEYEDLAMRDVMENGDWSDDDQAVGKTKNSPALESIHGSGAAEDDGIKSRYHHNLDLFLKMSKEVAGTRMPCAS

SEQ ID NO: 184385 - protein, 174 aa, Zea Mays
MEEEVGKRFYPMVPVPHVPKINGEIPSIDEATMDHERLTERLRLYELVENKVKGDGNCQFRALSDQLYQSPDHHEFVRSQIINQLKTNRDAYDGYVPMAYDDYLEKVARNGEWGDHVTLQAAADKYGVKIFVMTSFKDTCYIEILPKVQKSNKVILLSFWAEVHYNSIHPQNGE

SEQ ID NO: 184386 - protein, 229 aa, Zea Mays
MRCLPFLHGDTKEKDPVTKSASLRSMSTTSTERDVRSGSDFTSLNVSDMSAESIRRTQYPSFTDRPSNLRVFSFAELKSATRNFSRSLMVGEGGFGCVYRGVIKTSDEPNERIEIAVKQLNRKGLQGQKEWLTEMNVLGIVDHPNLVKLIGYCAEDDERGVQRLLVYEYMPNGSVDDHLSSRSTSTLSWPMRLKVALDSARGLKYLHEEMEFQVTPLLYGHGGHNTCTI

SEQ ID NO: 184387 - protein, 256 aa, Zea Mays
MRCLPFLHGDTKEKDPVTKSASLRSMSTTSTERDVRSGSDFTSLNVSDMSAESIRRTQYPSFTDRPSNLRVFSFAELKSATRNFSRSLMVGEGGFGCVYRGVIKTSDEPNERIEIAVKQLNRKGLQGQKEWLTEMNVLGIVDHPNLVKLIGYCAEDDERGVQRLLVYEYMPNGSVDDHLSSRSTSTLSWPMRLKVALDSARGLKYLHEEMEFQVIFRDLKTSNILLDENWNAKLSDFGLARHGPAEGLTHVSTAIL

SEQ ID NO: 184388 - protein, 381 aa, Zea Mays
MRCLPFLHGDTKEKDPVTKSASLRSMSTTSTERDVRSGSDFTSLNVSDMSAESIRRTQYPSFTDRPSNLRVFSFAELKSATRNFSRSLMVGEGGFGCVYRGVIKTSDEPNERIEIAVKQLNRKGLQGQKEWLTEMNVLGIVDHPNLVKLIGYCAEDDERGVQRLLVYEYMPNGSVDDHLSSRSTSTLSWPMRLKVALDSARGLKYLHEEMEFQVIFRDLKTSNILLDENWNAKLSDFGLARHGPAEGGRDSRLRSSRVHADWAPDREERHMELRRPPVRADHRPPPHRPEPPKERAEAPGLGEAVHLGRETVPHHRRPAAGGALQPQVHDEAVQCGEPVPGPDAQVSPQDERGVRHGAEDRGLRGDRPAAAPAAALPRLGL

SEQ ID NO: 184389 - protein, 263 aa, Zea Mays
MRCLPFLHGDTKEKDPVTKSASLRSMSTTSTERDVRSGSDFTSLNVSDMSAESIRRTQYPSFTDRPSNLRVFSFAELKSATRNFSRSLMVGEGGFGCVYRGVIKTSDEPNERIEIAVKQLNRKGLQGQKEWLTEMNVLGIVDHPNLVKLIGYCAEDDERGVQRLLVYEYMPNGSVDDHLSSRSTSTLSWPMRLKVALDSARGLKYLHEEMEFQVIFRDLKTSNILLDENWNAKLSDFGLARHGPAEGLTHVSTACRSCDHSPS

SEQ ID NO: 184390 - protein, 582 aa, Zea Mays
MRCLPFLHGDTKEKDPVTKSASLRSMSTTSTERDVRSGSDFTSLNVSDMSAESIRRTQYPSFTDRPSNLRVFSFAELKSATRNFSRSLMVGEGGFGCVYRGVIKTSDEPNERIEIAVKQLNRKGLQGQKEWLTEMNVLGIVDHPNLVKLIGYCAEDDERGVQRLLVYEYMPNGSVDDHLSSRSTSTLSWPMRLKVALDSARGLKYLHEEMEFQVIFRDLKTSNILLDENWNAKLSDFGLARHGPAEGLTHVSTAVVGTLGYAAPEYMQTGRLTAKSDIWSYGVLLYELITGRRPIDRNRPKSEQKLLDWVKPYISDVKRFPIIVDPRLEGHYNLKSMTKLSSVANRCLVRMPKSRPKMSEVYDMVQKIVDCVGTGPPQPPLLHYHGSASEPGPGDKRARKGSVKRRRLWELRDPAHPGLIHFFVHPSDGLIYPFHNEEWRKRIDARRQKRKYGSKGCSGREMGEHNKVEIEDGGIPQWCRDISMHGFAMCDCSFMCLNPQHNNVEIEDNNIPQWCGGRSPSRFIMFACSFIYIGPQHDKVEIDDDSHRLTASFIHLYTREIYMTSLHRLLLGQICKQRKERI

SEQ ID NO: 184391 - protein, 255 aa, Zea Mays
MRCLPFLHGDTKEKDPVTKSASLRSMSTTSTERDVRSGSDFTSLNVSDMSAESIRRTQYPSFTDRPSNLRVFSFAELKSATRNFSRSLMVGEGGFGCVYRGVIKTSDEPNERIEIAVKQLNRKGLQGQKEWLTEMNVLGIVDHPNLVKLIGYCAEDDERGVQRLLVYEYMPNGSVDDHLSSRSTSTLSWPMRLKVALDSARGLKYLHEEMEFQVIFRDLKTSNILLDENWNAKLSDFGLARHGPAEGLTHVSTAT

SEQ ID NO: 184392 - protein, 254 aa, Zea Mays
MRCLPFLHGDTKEKDPVTKSASLRSMSTTSTERDVRSGSDFTSLNVSDMSAESIRRTQYPSFTDRPSNLRVFSFAELKSATRNFSRSLMVGEGGFGCVYRGVIKTSDEPNERIEIAVKQLNRKGLQGQKEWLTEMNVLGIVDHPNLVKLIGYCAEDDERGVQRLLVYEYMPNGSVDDHLSSRSTSTLSWPMRLKVALDSARGLKYLHEEMEFQVIFRDLKTSNILLDENWNAKLSDFGLARHGPAEGLTHVSTA

SEQ ID NO: 184393 - protein, 185 aa, Zea Mays
MATTRLLPLLRRRLAAAIAGSPAPYSLRGPSFPAPAAAGLRSLLKAAGASDTATEPQDQQHSETTPPPASVPTPESGLKVRDTSNLKISPRHDLAMIFTCKVCETRSMKMASRDSYENGVVVVRCGGCNNLHLMADRLGWFGEPGSIEDFLATQGEEVKKGSTDTISFTLDDLAGSQVRPCGQKN

SEQ ID NO: 184394 - protein, 148 aa, Zea Mays
MHGGLSPELNKLEQILNLSRPTDVPDTGLLCDLLWSDPSNEATGWAINDRGVSYTFGPDKVSEFLEKHDLDLICRAHQVVEDGYEFFASRQLVTMFSAPNYCGEFDNAGAMMSVDETLMCSFQILKPARKVLGGSTNNKSGFKSSRGW

SEQ ID NO: 184395 - protein, 166 aa, Zea Mays
MSSFGLQVSALIDEKILCMHGGLSPELNKLEQILNLSRPTDVPDTGLLCDLLWSDPSNEATGWAINDRGVSYTFGPDKVSEFLEKHDLDLICRAHQVVEDGYEFFASRQLVTMFSAPNYCGEFDNAGAMMSVDETLMCSFQILKPARKVLGGSTNNKSGFQSSRGW

SEQ ID NO: 184396 - protein, 274 aa, Zea Mays
MQKIASHIGNASKFSKASKLALQLIEAGSVKPGTIGHFFAILEAAMSSPGVCNEPSVRADYHKLFDAAQGVTELLNQEQKNRFNIWVLHAVVANDLFTDDSFVFSKAVGKIKDAISALPVATVDDDNDEAAALAAASKTDVATDNEAGHGVPAAASDSVVDDGAHAVALEPEEESSDPFGLDGLLEHRPKKTSGRAREKAVAALNRKTVEEEAKRVLKSQREALLKCLEIAARRYRIPWRTTTRPGSHGGSGTRSLSCGTRSRSSRSGGSKASR

SEQ ID NO: 184397 - protein, 170 aa, Zea Mays
MGGCCCCCCSARASDSDRAPHRQNPEEHAPLSSAFDGPSPTSAIVAVDTNLDTPSLDTYRAPPAPLPYDVCFTVSENPDVEKSGIKIKTDGQQSPKVDEFESCEKGAPEDKADEEEDVCPICLEEYDKENPRSVTKCEHHFHLCCILEWMERSETCPVCDQITLIDGMYE

SEQ ID NO: 184398 - protein, 137 aa, Zea Mays
MGGCCCCCCSARASDSDRAPVRIYHRQNPEEHAPLSSAFDGPSPTSAIVAVDTNLDTPSLDTYRAPPAPLPYDVCFTVSENPDVEKSGIKIKTDGQQSPKVDEFESCEKGAPEDKADEEEDVCPICLEEDFTYKALP

SEQ ID NO: 184399 - protein, 70 aa, Zea Mays
MMASVWFSNLYVNFCNITIGPKKLLNRQHLLLRLGHPSRQLLALCIILLWWEGHHFARSEQGVPDCDKPI

SEQ ID NO: 184400 - protein, 277 aa, Zea Mays
MLRGIRGVGLARMSRPRKYKPDGSVTLGLSPTSSSTPHSSSSGMGTMVNTPGSGFGSGGSGGSGSGAPSEKRGRGRPPGSGKMQQLASLGKWFLGSVGTGFTPHVIIIQPGEDVAARIMAFSQQGPRAVCIISATGAISTATLHQDSDSGGVVTYEGRFEILCLSGSYLVVEDGGTRTRSGGLCIALCGPDHRVIGGSVGGVLTAAGTVQVIVGSFMYGGSKKNKVKAEVDMEPEEVAPAEHSGMVPPAMSGGGWEAGMMRQMDSRTPAIDINSIRG

SEQ ID NO: 184401 - protein, 201 aa, Zea Mays
MVTEFMYIMLRDLKLNVREIHSRKPQLYRTRISEEFRGSNRIVLVTSDVSTRGVNYPDVTLVIQVGVPPDREHYIHRLGRTAREGKSGKGILLLAPWEQYFLDEIGDLPIDKYPAPDIDQEMKQKVDDSIEMVDMSIKEAAYHAWLGYYNSIADIGRDKRMVVDLANRFGASIGLEKPPAIYRKTALKMGLKDVPGIRIRK

SEQ ID NO: 184402 - protein, 404 aa, Zea Mays
MKSNTNQRVSPIFALVLCPTRELAIQLTAEANVLLKYHEGIGVQSLIGGTRFKLDQRRLESDPCQILVATPGRLLDHIENKSSFSVRLMRLKLLVLDEADHLLDLGFRKDIEKIVDTLPRQRQTLLFSATIPKEVRRVSQLVLKRDHVFVDTVGLGAVETPTKVQQSCLVVPHELHFHTVHHLLREHIDREVDYKVIVFCTTAMVTEFMYIMLRDLKLNVREIHSRKPQLYRTRISEEFRGSNRIVLVTSDVSTRGVNYPDVTLVIQVGVPPDREHYIHRLGRTAREGKSGKGILLLAPWEQYFLDEIGDLPIDKYPAPDIDQEMKQKVDDSIEMVDMSIKEAAYHAWLGYYNSIADIGRDKRMVVDLANRFGASIGLEKPPAIYRKTALKMGLKDVPGIRIRK

SEQ ID NO: 184403 - protein, 402 aa, Zea Mays
MKSNTNQRVSPIFALVLCPTRELAIQLTAEANVLLKYHEGIGVQSLIGGTRFKLDQRRLESDPCQILVATPGRLLDHIENKSSFSVRLMRLKLLVLDEADHLLDLGFRKDIEKIVDTLPRQRQTLLFSATIPKEVRRVSQLVLKRDHVFVDTVGLGAVETPTKQSCLVVPHELHFHTVHHLLREHIDREVDYKVIVFCTTAMVTEFMYIMLRDLKLNVREIHSRKPQLYRTRISEEFRGSNRIVLVTSDVSTRGVNYPDVTLVIQVGVPPDREHYIHRLGRTAREGKSGKGILLLAPWEQYFLDEIGDLPIDKYPAPDIDQEMKQKVDDSIEMVDMSIKEAAYHAWLGYYNSIADIGRDKRMVVDLANRFGASIGLEKPPAIYRKTALKMGLKDVPGIRIRK

SEQ ID NO: 184404 - protein, 415 aa, Zea Mays
MFTHDILVLNAMKSNTNQRVSPIFALVLCPTRELAIQLTAEANVLLKYHEGIGVQSLIGGTRFKLDQRRLESDPCQILVATPGRLLDHIENKSSFSVRLMRLKLLVLDEADHLLDLGFRKDIEKIVDTLPRQRQTLLFSATIPKEVRRVSQLVLKRDHVFVDTVGLGAVETPTKVQQSCLVVPHELHFHTVHHLLREHIDREVDYKVIVFCTTAMVTEFMYIMLRDLKLNVREIHSRKPQLYRTRISEEFRGSNRIVLVTSDVSTRGVNYPDVTLVIQVGVPPDREHYIHRLGRTAREGKSGKGILLLAPWEQYFLDEIGDLPIDKYPAPDIDQEMKQKVDDSIEMVDMSIKEAAYHAWLGYYNSIADIGRDKRMVVDLANRFGASIGLEKPPAIYRKTALKMGLKDVPGIRIRK

SEQ ID NO: 184405 - protein, 749 aa, Zea Mays
MGGGPRTFPGGLSKWQYKRMHEKLARQKQRGLLRHEKQLYLARLRSEIRASRLPGAAAEAPPGGEGPTSSRAHIRALADRFRRPGAEDLWNEDDGPLRRVKRPPTGIASGVRHQQQQLDSGKPRGGPSWEDLTSLDQPRPLDRGKGPTSAAFNPRREYLTVVAPWCPRWDPRPLGFVAPKKSYPVMTRCSVSCQPCVDLRPLVASGLTEDGNGRKDTPLAQFNQERFYSVAARRFGRKWRPDSSDQDDKGTSAPKKNLRFGKKFGASSEEDSEIDESGDTGAIRRRWSSAALRNCDVKKERRVLKSYEEESNDLAGRIQELREEIRNREVLGTERRRYESRGESLLTSKRFDQCGVSALTVKALTDAGYVQTTVVQEAALPICLEGKDVLVKAKTGTGKSAAFLLPAIESVLNAMKSNTNQRVSPIFALVLCPTRELAIQLTAEANVLLKYHEGIGVQSLIGGTRFKLDQRRLESDPCQVRRVSQLVLKRDHVFVDTVGLGAVETPTKVQQSCLVVPHELHFHTVHHLLREHIDREVDYKVIVFCTTAMVTEFMYIMLRDLKLNVREIHSRKPQLYRTRISEEFRGSNRIVLVTSDVSTRGVNYPDVTLVIQVGVPPDREHYIHRLGRTAREGKSGKGILLLAPWEQYFLDEIGDLPIDKYPAPDIDQEMKQKVDDSIEMVDMSIKEAAYHAWLGYYNSIADIGRDKRMVVDLANRFGASIGLEKPPAIYRKTALKMGLKDVPGIRIRK

SEQ ID NO: 184406 - protein, 709 aa, Zea Mays
MAAAAAASMVVVREVLGLDVVDEVDQPIIDYIANVLADEDFDFGAPEGHGIFEALGELLIDSGCVSDQEHCLQVCSKLCEKFGKHGLVKPKQAMRSLVTPLRMNAGMDDDVAPKKPQPEVFDGPLLSSRDKAKIERRKRKEERQREVQYQMHVAEMETLRAGMPPVYVNHSNDGGPAVRDIHMENFSVTVGGRDLIQEATITLAFGRHYGLVGRNGTGKTSFLRAMALHAIDGIPKNCQILHVEQEVVGDDTTALQCVLNADVERVQLLQEEARLVQQQKDLEIEAEFGQSSDKGKDGFDKDSISKRLEEIYKRLELIDADAAEARAASILAGLSFTPEMQRKRTKQFSGGWRMRIALARALFIEPDLLLLDEPTNHLDLHAVLWLETYLLKWPKTFIVVSHAREFLNTVVTDILHLHGRKLHAYKGDYDTFERTREEHLKNQQKAFETNEKARQHMQRASLVQSRIKALERMEHVDAVVSDPDYKFEFPTPDDRPGPPIISFSDASFGYPGGPTLFKNLNFGIDLDSRIAMVGPNGIGKSTILKLISGDLQPTSGTVFRSPKVRMAVFNQHHVDGLDLTVNPLLYMMKCYPGVPEQKLRAHLGSFGVSGSLALQSMYTLSGGQKSRVAFAKITFKKPHIILLDEPSNHLDLDAVEALIQGLLIFQGGVLMVSHDEHLITGSVDELWVVSEGRVTPFSGTFKDYKKMLK

SEQ ID NO: 184407 - protein, 310 aa, Zea Mays
MQEVAVETFGSMAKTEKIAFILEQVRLCLDRQDFVRAQILSRKISTRVFDADPSKEKKKPKEGDSIVQDAPADIPSLLELKRVYYELMIRYYSHNNDYLEICRCYKAIYDIPAIKEDPTKWIPILRKICWYLVLAPHDPMQSSLLNATLEDKNLSEIPNFRLLLKQLVTMEVIQWTSLWEFFKEEYEKEKDLLGGALGAKASEDLRLRIIEHNILVVSKYYARVTLERLADLLCLTLQEAEKHLSDMVNSKSLVAKIDRPMGVVSFRTTQDSNGTLNSWATSLEKLLDLVEKSCHEIHKETMIHKTALKV

SEQ ID NO: 184408 - protein, 171 aa, Zea Mays
MQSSLLNATLEDKNLSEIPNFRLLLKQLVTMEVIQWTSLWEFFKEEYEKEKDLLGGALGAKASEDLRLRIIEHNILVVSKYYARVTLERLADLLCLTLQEAEKHLSDMVNSKSLVAKIDRPMGVVSFRTTQDSNGTLNSWATSLEKLLDLVEKSCHEIHKETMIHKTALKV

SEQ ID NO: 184409 - protein, 324 aa, Zea Mays
MEGDGTNLDAAIESLLNVEKQMRLAGDVAGTRKAVIDIVELCYKAGAWKTLNDQIVLLSKRRGQLKQAITAMVQKAMEYIDLTPGIDTSIELIKTLSSVSAGKIYVEIERARLIKRLAKIKEEQGQIYEAADLMQEVAVETFGSMAKTEKIAFILEQVRLCLDRQDFVRAQILSRKISTRVFDADPSKEKKKPKEGDSIVQDAPADIPSLLELKRVYYELMIRYYSHNNDYLEICRCYKAIYDIPAIKEDPTKWIPILRKICWYLVLAPHDPMQSSLLNATLEDKNLSEIPNFSGQVCGNSSRRNMRRRRIFLGELWVPKLQKI

SEQ ID NO: 184410 - protein, 235 aa, Zea Mays
MEGDGTNLDAAIESLLNVEKQMRLAGDVAGTRKAVIDIVELCYKAGAWKTLNDQIVLLSKRRGQLKQAITAMVQKAMEYIDLTPGIDTSIELIKTLSSVSAGKIYVEIERARLIKRLAKIKEEQGQIYEAADLMQEVAVETFGSMAKTEKIAFILEQVRLCLDRQDFVRAQILSRKISTRVFDADPSKEKKKPKEGDSIVQDAPADIPSLLELKRVYYELMIRNKRGSNKVDTDS

SEQ ID NO: 184411 - protein, 288 aa, Zea Mays
MTTLRKLLLTGNPMRTLRSSLVSGPTTTLLKYLRSRLSSDEEGSRSTPTKDDQIAAARRLSLSSKELDLSGLGVTSVPAAAWETSDVVKLDLSKNSIEDLPNELSLCSSLQSLVLSNNKIKRWPHTVVSSLPCLSSLKLDNNPLVEISSTDLVPLSKLEVLDLSGNASALPEPSAVSALPQLQELYLRRMKLHEFPNGLLGLKLLRILDLSQNHLTTVPEGIKNFTALIELDLSDNNITALPAELGLLEANLQVLKLDGNPLRSIRRTLLERGTKAVLKYLKEKLPSE

SEQ ID NO: 184412 - protein, 367 aa, Zea Mays
MDNAHRIESRKESTYSHPRNNLLSSIPADIGTLSKLGILDLHSNQLKEYPVGACNLKLSFLDLSNNSLSGLPAELGKMTTLRKLLLTGNPMRTLRSSLVSGPTTTLLKYLRSRLSSDEEASGSRSTPTKDDQIAAARRLSLSSKELDLSGLGVTSVPAAAWETSDVVKLDLSKNSIEDLPNELSLCSSLQSLVLSNNKIKRWPHTVVSSLPCLSSLKLDNNPLVEISSTDLVPLSKLEVLDLSGNASALPEPSAVSALPQLQELYLRRMKLHEFPNGLLGLKLLRILDLSQNHLTTVPEGIKNFTALIELDLSDNNITALPAELGLLEANLQVLKLDGNPLRSIRRTLLERGTKAVLKYLKEKLPSE

SEQ ID NO: 184413 - protein, 446 aa, Zea Mays
MFVSWTMLTELNLAKNLLTAIPGSIGALPKLIRLDMHQNKITSIPPSIKGCSSLAELYMGNNLLSSIPADIGTLSKLGILDLHSNQLKEYPVGACNLKLSFLDLSNNSLSGLPAELDHRSDSCMRDKCMLWPLRTSYSLWYCLTENSDNPCATQGKMTTLRKLLLTGNPMRTLRSSLVSGPTTTLLKYLRSRLSSDEEASGSRSTPTKDDQIAAARRLSLSSKELDLSGLGVTSVPAAAWETSDVVKLDLSKNSIEDLPNELSLCSSLQSLVLSNNKIKRWPHTVVSSLPCLSSLKLDNNPLVEISSTDLVPLSKLEVLDLSGNASALPEPSAVSALPQLQELYLRRMKLHEFPNGLLGLKLLRILDLSQNHLTTVPEGIKNFTALIELDLSDNNITALPAELGLLEANLQVLKLDGNPLRSIRRTLLERGTKAVLKYLKEKLPSE

SEQ ID NO: 184414 - protein, 62 aa, Zea Mays
MVRLEYTATCSQRATTGAALIIAAARLSYANIEPQRAKAFIHRKLGGSASPQHQEQDPARST

SEQ ID NO: 184415 - protein, 63 aa, Zea Mays
MEAKLAALDTATTEAKWLHELLMDLSVVEKPIQAIFMNCDNQTVIGKVTSSKDNEKSSRHVKR

SEQ ID NO: 184416 - protein, 164 aa, Zea Mays
MSRPLFLRILQGLQQHDIYFTQRVDATGMPGLGPLQKVCAAMRILAYGLPSDAVDEYIQIGESTARECLHHFCRAIIDCFSAWYLRTPTQDDINRIMHNSESRGFPGMLGSIDCMHWEWRNCPTAWRGQFCGRNGRASMILEAVATYDLWIWHAFFGMPGTNND

SEQ ID NO: 184417 - protein, 164 aa, Zea Mays
MALAARGLGFGCSSWHSRTGGLRGMLGALDCGLSQSLTLRWREAGFHFPRFCPFSRQVAPPIGLRSFELPSPRIASHRSSHLRTRKPIRRTSSGDREDDAVEPNRLLAVAVHLLPECRRRLHHAFQDARRVQHHAAHREAGRRRAAVWHGREGRSVHRQWRRDG

SEQ ID NO: 184418 - protein, 230 aa, Zea Mays
MMPLSQTDFSPSQFTSSQNAAADSTTPSKMRGASSTMPLTVKQVVDAQQSGTGEKGAPFIVNGVEMANIRLVGMVNAKVERTTDVTFTLDDGTGRLDFIRCTFSVGKSPCFCADVHWLSRNGMYIAVIGSLKGLQERKRATAFSIRPITDFNEVTLHFIQCVRMHIENTELKAGSPARINSSMGVSFSNGFSESSTPTSLKSSPAPVTSGSSDTDLHTQVLNFFNEPANL

SEQ ID NO: 184419 - protein, 317 aa, Zea Mays
MSTFPPPPPSAARSPVARVRLDHLVPFDGAFTPAYARAVEAVAASLTRHGAAAVDLPAADAAVVRCALESARAFFCDRSGLYVYRAGRALDDGELSPACMSDAFRCLGKTARAALCAIARNLRLRSDAFSHLLDDNPLPLDEVSASELMVSFSHGHPQSSQAPMVGLRPSMAEVDRGFVTLVASDHPGIEVCNPNGHWYPADVGSSPDVLLLLTGRALSHVTAGLRLNSQYRIINNENRASLMFRLMPRANAILDCSPISAAGHCTPQIHRPISASQFMDDLRAEENVYHHLEAPPESQGNFVNEPSLRSVLSDPLS

SEQ ID NO: 184420 - protein, 243 aa, Zea Mays
MFGAFSHLLDDNPLPLDEVSASELMVSFSHGHPQSSQAPMVGLRPSMAEVDRGFVTLVASDHPGIEVCNPNGHWYPADVGSSPDVLLLLTGRALSHVTAGLRLNSQYRIINNENRASLMFRLMPRANAILDCSPISAAGHCTPQIHRPISASQFMDDLRAEENVYHHLEAPPESQGNFVNEPSLRSVLSDPLSGAFLEDAMVLPCGHSFGGLMLKKVLELVYSETLYSVFLTFLKKIGLFVNQ

SEQ ID NO: 184421 - protein, 370 aa, Zea Mays
MSTFPPPPPSAARSPVARVRLDHLVPFDGAFTPAYARAVEAVAASLTRHGAAAVDLPAADAAVVRCALESARAFFCDRSGLYVYRAGRALDDGELSPACMSDAFRCLGKTARAALCAIARNLRLRSDAFSHLLDDNPLPLDEVSASELMVSFSHGHPQSSQAPMVGLRPSMAEVDRGFVTLVASDHPGIEVCNPNGHWYPADVGSSPDVLLLLTGRALSHVTAGLRLNSQYRIINNENRASLMFRLMPRANAILDCSPISAAGHCTPQIHRPISASQFMDDLRAEENVYHHLEAPPESQGNFVNEPSLRSVLSDPLSGAFLEDAMVLPCGHSFGGLMLKKVLELARCSICNGDVDEASLFPNLVSNVTQL

SEQ ID NO: 184422 - protein, 255 aa, Zea Mays
MFRLMPRANAILDCSPISAAGHCTPQIHRPISASQFMDDLRAEENVYHHLEAPPESQGNFVNEPSLRSVLSDPLSGAFLEDAMVLPCGHSFGGLMLKKVLELARCSICNGDVDEASLFPNLALRAVATVVKMEDDRRLFHNAALRKRRKEVTEHMDAQRRNGSSKDSIELGLEAESPRAFKGVQYPFVVGERVLIMGNKRTPDKFVGKEAVVTSQCLNGWYLVKAVDSGESIRLQYRSLRKAGELQVQALLQSRR

SEQ ID NO: 184423 - protein, 190 aa, Zea Mays
MFGAFSHLLDDNPLPLDEVSASELMVSFSHGHPQSSQAPMVGLRPSMAEVDRGFVTLVASDHPGIEVCNPNGHWYPADVGSSPDVLLLLTGRALSHVTAGLRLNSQYRIINNENRASLMFRLMPRANAILDCSPISAAGHCTPQIHRPISASQFMDDLRAEENVYHHLEAPPESQGNFVNEPSLRSWGFS

SEQ ID NO: 184424 - protein, 466 aa, Zea Mays
MQHARNRELREEVYRAYLTRASSSELDNTNIICQILKLRLEKAKLLGYKNYAEVSMAQKMATVERVEELLEKLRAASWDHAVKDMEDLKVFAKDSGSPEANDLTHWDLTFWSERLRESKYDINEEELRPYFALPKVMDGLFTLAHKLFGVTVEPADGLAPIWHSDVKFYCVKDSSSSPVAYFYFDPYSRPSEKRGGAWMNVVFSRSRVLARNGLAARLPVAHIVCNQTPPVGEKPSLMTFREVETVFHEFGHALQHMLTKQDEGFVAGIRGVEWDAVELPSQFMENWCYHKNTLLSIAKHYETGETLPEEIYAKLVAAKNFRAGTLSLRQIRFASVDMELHTSYDPNGSVSIYDVDQRVAERTQVLAPLPEDRFLCSFSHIFAGGYAAGYYSYKWAEVLSADAFSAFEDAGLDDEKAIEETGRRFRDTVLALGGGKSPLEVFVSFRGREPSPEPLLRQNGLLPVAA

SEQ ID NO: 184425 - protein, 81 aa, Zea Mays
MIILTLVISYSKLTKTETTDFPLMYTAFQICDGCFLLKVLNSLMILLTSVISHRKQTKTETIDFPPNFMFQPYVRNFLNMW

SEQ ID NO: 184426 - protein, 198 aa, Zea Mays
MGGSCRLPPRRCRPAPRVRQHAGAPRPRGPLLPRLPRPRTPVLVSVDVTRRRGRLRLDGIVRTVITLGCFRCAEPAPQGIFANFSLLLTEDPVEEEPDLGTIFQEDDDKGGASLACAMDGDQDIDWDDRLHFPAADKEIDISKHIRDMIHLEITLDAVCNPNCKGLCLTCGANLNTTSSCTCKPRNVQGLSPLKGVFK

SEQ ID NO: 184427 - protein, 133 aa, Zea Mays
MRLLGKFVENECEKIDRLMELYTRYSDRVKEETERLDSLDLEDLEMDDDERYNRKLEAGLYTLQLIALILGHIWHSGNSQMRARVELLLKQNKLTKQDVKSILEEYHDNIGDLDGPEEKERAQVRTKEIIDAL

SEQ ID NO: 184428 - protein, 282 aa, Zea Mays
MAPLARQGTRVRRQQAAVAMYKSRDPKTSDEEEMLENLFDCLCCVLMPLENKERFVKAEGVELMIIIMKQKKLAYSSATRTLDFAMTKFPPACERFVDVLGLKTAFAAFMGKIPVNKKNKKESYQEELEERIISLIASLFGGITKGSRRMRLLGKFVENECEKIDRLMELYTRYSDRVKEETERLDSLDLEDLEMDDDERYNRKLEAGLYTLQLIALILGHIWHSGNSQMRARVELLLKQNKLTKQDVKSILEEYHDNIGDLDGPEEKERAQVRTKEIIDAL

SEQ ID NO: 184429 - protein, 455 aa, Zea Mays
MDAAAVHKRKRPEEADPSAGELDLSAADAVEVLDLRAAKRLLLAFERRLRDNLEARMKYPDDPARFADSEIALHAETDRLRLLAGAPELFPDLVPIGLASSLASLLTHDNVDLAAAAASLLADLTDSEDPSDLAAVQALADALVDANALDLLVHNLSRFSETDPDEAEAVHNTLAVLENLLDLRPNLADKVCGGTKLLRWLLSRVKAREFDANKQYASEILAILLQNSPANQKRLGQINGVDALLQAVAMYKSRDPKTSDEEEMLENLFDCLCCVLMPLENKERFVKAEGVELMIIIMKQKKLAYSSATRTLDFAMTKFPPACERFVDVLGLKTAFAAFMGKIPVNKKNKKESYQEELEERIISLIASLFGGITKGSRRMRLLGKFVENECEKIDRLMELYTRYSDRVKEETERLDSLDLEDLEMDDDERYNRKLEAGLYTLQEFPDESKSRITS

SEQ ID NO: 184430 - protein, 64 aa, Zea Mays
MLIWMGNGMLDLKCESTCSVVLPILLVCTALGTVDLVICKLESFPYSSSSEAYVVGSLHHQLWF

SEQ ID NO: 184431 - protein, 758 aa, Zea Mays
MLFLFLCFLSSSADCSVASSGQQHPATFINQWLAHLQSTMPNDPKTDKARKASSNDPGWKYGYWAYLANRDQVTCTLCDTIVFGGIKRLKQHLAGGYGNTKICSKTTTAIRKEMRDYLESKRRKRAIFLDDNEQQEEEEDVMVVDAAAESVQVQQDAPIESQGSKVQPSSGTAAKHRRATYLYKDTTSIKTKANQASKQKSIVEMLRKSPEDVVDERRKGCSQPTIASKMKSKEEKNYVDMQWALWFYECGVPFNAAAARQFQVAVEATAQFGSGYKPPYQLGQPLLKDAVKLTTMREEHKRAWKHYGCTLMSDGWSDRRGRHLINFLVSPCVAHCLDLMLEDIGNLKEFKKPIVRARRVTTFIYRHGRILSLMREKTGGADLVRVAATRFATAFLTLKSLYKHKDPLKALFLSEEWNENKLAKTAAGKEACDIVLSVEFWNKVEDCLRASAPLLIVLRVVDGDEKPAMPEVAALMKHAKEKIKLSFAIDSKKSLLKRIIDIIEKRWMKQMDHPLYGAALYLNPGKLHPLIRDDDDATVGQLRGCFLDVLARMVDDEETRAKIDAQSLDYEALRGEAFSNKMAKNNLETMNPHSKIHTKKRNRLLHKRLNDIVYVSYNRRMKTRFQIRREKKGKGFDPLVIEEFDWDNEWADSSYVQPQGARGCDCGEDENGLTWELVDQAVGASSSLRGRNLPRNANKRARVSHSRFDFEEDFGSANEEEEDQDPHDDVDVTDSEDAHDDVGGENTEAAPDEFEDGY

SEQ ID NO: 184432 - protein, 90 aa, Zea Mays
MKGSKQPLMQIAFAGPQECVSTTINDSVPCTQTISASITENYNLLGTCTTGVQRQYQASASSCEGDYSSTGIRPGFKIAVLTGNLASETA

SEQ ID NO: 184433 - protein, 92 aa, Zea Mays
MDRNYERTMNDRMIERTNDRNFGSITRKRLFGRTNGRTIGRTDERTMNDRTNDQTIGRTNDRNFGSITAGKRLFGRTNGRTIERSDERTNEP

SEQ ID NO: 184434 - protein, 96 aa, Zea Mays
MNSSPTPEHLTKLAPLISSCVWHDSCSGSCSSSLTTAGSGELRFGFGGFHQRLHRIRVVVEDNQPIGKVGARGGVTPRRVAWSGLGRHKLRPCSKF

SEQ ID NO: 184435 - protein, 66 aa, Zea Mays
MSFLDPLLGAIANDAEVTQLGAIGYGAEVRVTLAKTDVVAPTWHQARRHRSWRRAVLQKQKQKISR

SEQ ID NO: 184436 - protein, 89 aa, Zea Mays
MGGATSKQYLVAHQLCQTFAGHFMRSWSNPALSPDLYAMSVHAQLVQYNSSNIIFALTRWSSLDFAFIYMQFFFPCLCLPRVQLFSVLV

SEQ ID NO: 184437 - protein, 195 aa, Zea Mays
MLCLYVDDILIFGSNLNVIEEVKNLLSSNFEMKDLGEADVILNIKLVREADGGVTLLQSHYVEKVLNRFGFSDCDPAPTPYDPSVLLRKNRRIARDQLTYSQIIGSLMYLASATRPDISYVVSKLSRFVSKPGDDHWRALERVLRFLKGTMTYSIHYTGNPKVLEDYCDANWISDADELYATSGYVFLFGGGAVS

SEQ ID NO: 184438 - protein, 97 aa, Zea Mays
MNIRQHSRCHYKQNSGSAPAGTNNPPRWRACGGDKTPGGSPTPAPKWPNSSSHGPRTDAAAGGLSFASPHKGREPDIKAKEPEVGSRVALTVSSAEK

SEQ ID NO: 184439 - protein, 52 aa, Zea Mays
MRPSVDRAESDRSHFAAPLTGLTRRQRRLRRSDCCAARQGEADSNQVQPRAP

SEQ ID NO: 184440 - protein, 52 aa, Zea Mays
MARHSVPTHINRPHRFPVSRSGLTALAYNASLTPTGRRAVTALVPTITGMGD

SEQ ID NO: 184441 - protein, 160 aa, Zea Mays
MQVAAAMQLQCNHGRPTGRRPAVLYSTCWQAWTNRSLYGKRQELAQEGDDGRTRKEGRKRMVCQLPSNLSSWEGSEERRMACVEGAIEGGLRDSRPARGRPRVVIKSFVRWGALHYVRLGVAAMFGPVYSCHLQLHIIVLSTGRYCTAIGGACMRACMMR

SEQ ID NO: 184442 - protein, 68 aa, Zea Mays
MGETISFAPRKAIKSQVLADFVAEWVDTQLPTTLIQPELWTMFFDGSLMKTGAGAGLLFISPLGKHLR

SEQ ID NO: 184443 - protein, 89 aa, Zea Mays
MPMPMPSCMPPASCKPCMLISLLCSQASAGSVDEPPAAGCRRQDGSIRMNTTAATLLFPGKRIAAAVLLLWSFPVLIGCRHSFHTSMGC

SEQ ID NO: 184444 - protein, 106 aa, Zea Mays
MSCLHGFVKSPLIDQVGIVACSSPGCGRLGGARTRTMTPKQKSLPPIHHLFLFLPHASSRGSCWSRSTRGRQAVDGTRKDTVAREQEAPSSLLDAGHAWVTIVFFT

SEQ ID NO: 184445 - protein, 51 aa, Zea Mays
MSGAAHAQDGNWASRQVRGIWVEKGAASPTGNPFLFLLFFLFFLFLIPNPT

SEQ ID NO: 184446 - protein, 52 aa, Zea Mays
MSGAARAQDGNWAARQVRGIWAEKGAASPTGNPFLFLLFFFFFFFFLIPNPT

SEQ ID NO: 184447 - protein, 93 aa, Zea Mays
MLLGLPHLEVAGWGGIYSHQPKTSRWCILLAKGAPDWTVSGAPPRHPVIRSWTWSTVGGSVLMWHRTVRCPSDRCSDFCRITVHFAESTVARR

SEQ ID NO: 184448 - protein, 84 aa, Zea Mays
MINRLINNPPALLDTTRGFLHKLLSFRFLMTTNLVITQNSLTDHLIKIFSQTSCHQTLELLVKATQEIKLFLLISIHKIQDILG

SEQ ID NO: 184449 - protein, 85 aa, Zea Mays
MVSYTFDHKGLQKVPFLCFPDNHCYTKTLPMVNIHPTLLRKQEHMLSTYLLESDLLSQSVHSFEDDKQNYELVWFLTSCVTLSKI

SEQ ID NO: 184450 - protein, 75 aa, Zea Mays
MLPIYQGIATSHTPLPRRRGRVTLRGLYKVPLASENPLQFIGSSNAGFLPDRHRSKINQGPPYTDHSPTALAPFG

SEQ ID NO: 184451 - protein, 52 aa, Zea Mays
MKMCSRRGIAEHRPSDLNQRSRLNLVALKSVRNPSPRIQDLRPGFNESNGYT

SEQ ID NO: 184452 - protein, 139 aa, Zea Mays
MTMELFHRRRRIGERLQGLILPSVMATLKAQTRGLGHLTIVKSDNYLAEVRDSTNCLTKHVVKAESRQCSCQEWQHTGKPCQHGLAVIIAQDVRNVGMENFVDDYYYVDKFRKAYMRRIPPIGDRSFWPKVDFSNEVAC

SEQ ID NO: 184453 - protein, 68 aa, Zea Mays
MMCNMTHLTCQVVGTEEYNNDLALFQVSFPFSMPGVDLTCIEPTLSPVGEVILLDKATGWCWFIVVLY

SEQ ID NO: 184454 - protein, 106 aa, Zea Mays
MGDNLSCLVILQIYFLCLYAYADVIVDITPQLITLNQRTKSNMYHKNKHSSADILIKTVFRIMCPLPKGHFRYMIPKCEIHLVFRRDKIRVIRLKQQYTRKDLKKV

SEQ ID NO: 184455 - protein, 117 aa, Zea Mays
MDAVRSSRLIRRHRCSHIVGCHRRSWVRVCHRRSGLGVRRHCSPASGALSPLAGPPRDSVVAVACLPQGPTVALPPERGAAATAPPNLGTAVTTPDRGTVAAARPDRGATATTVKGS

SEQ ID NO: 184456 - protein, 54 aa, Zea Mays
MFAAPWGQTHQVCLQPAEQHAIMSLQLADTHSCNQQAINDVTGVTTQHAMVIKE

SEQ ID NO: 184457 - protein, 168 aa, Zea Mays
MEENGGRWIERARRREQQGASMEGADPAMACSCSQLCAETRPRGRRSEEPSCYFLGAMGRGKRSLLLAPLGKLAWAPAMGELAAAPGKRSPRHGCWRPREHSEMGKKESSGVAPWAGKLLAMGGKSSCSPWTEKGREEGRWRTGKSAMAVGGAMGAWSSAPCVLAAAL

SEQ ID NO: 184458 - protein, 80 aa, Zea Mays
MQCGKGALLHVVFRTRPALPPRGSPLTSSCSSIAGRPKLKTQTSSETIADSGRPQAPVHCLAESLRHASFQEAGKKTLLC

SEQ ID NO: 184459 - protein, 121 aa, Zea Mays
MNKIMCLKKIWHMHSSNPFSPWQMASYKTTPTTSGIGARSPLGAEGEFGGEGSDTHLPAPSELPLDLAQVLVNQTRLIEVLTRSLENQRPNGGRPQDRMGDFLRLKPPTFVRSSNPLDADD

SEQ ID NO: 184460 - protein, 150 aa, Zea Mays
MVSNLAAESIYVVEEFMDVFPKEFPGMSPEREVEFYIDLILGTAPIAKRPYRMAPTEVAELKLQTTKLQQKGYIRPSSSPWGAPVLFVTKKDGSMRMCIDYRSLNEVTIKNKYPLPRIDDLFDQLQGAKYFSKIDLRSGYHQLRIKEADV

SEQ ID NO: 184461 - protein, 125 aa, Zea Mays
MVADALSRKPFGEKATNFLEDWKRESAQLNACLGDSGNIEVKLMLEDLICKAQCLDTETASLMERARKEQLSDLKTDEEGTLWFRDRLCIPKGEARGILLDEAHNSAYSIHPGTTKMYLDLKTRY

SEQ ID NO: 184462 - protein, 74 aa, Zea Mays
MHGVKRFQVKGKLAPRFVGPYPIIGRIGPTAYRLQLPEFMSDVHNAFHVSQLHKCLKVPESHLIEETVQIQKDL

SEQ ID NO: 184463 - protein, 83 aa, Zea Mays
MVLGPLALETSTLGTQTQVFDPLCLPPTYLATTLPDLLVSTYEASKVLNETLGSFDAIGDFFLGILTWVECLELDASLLYIKA

SEQ ID NO: 184464 - protein, 76 aa, Zea Mays
MVAINTTPTGHFKEWESKQHSKSSSDILKPSQPHIFIDPSYTQDLDHYNQHKCHKRESKQSRATQLSLALAPCEIH

SEQ ID NO: 184465 - protein, 54 aa, Zea Mays
MTNQSMMRMIFGLESEANLMSPIMIVHFVLLLLSIFVILTLARKKKKMNDGDQT

SEQ ID NO: 184466 - protein, 95 aa, Zea Mays
MVLSPSSPSDFEGLTPIEHAFLRVVECIGLTDSKEEDEEDEEEDDKDEEGNGNDTGSGSNEGSGGKGSDIKGDNRGEGQLPQYMILTLIFFRNPQ

SEQ ID NO: 184467 - protein, 78 aa, Zea Mays
MGGTDENLDEGDRGFEHGGPDVSEGRARDAEKRTLVREDSRDRGEKSGRNNDHEILLELGDPNTNLLCYHVTNVRIDE

SEQ ID NO: 184468 - protein, 78 aa, Zea Mays
MLQMGCPAITVNEDIIKKYQHELSDKWFQYVIHQALKCRWGVSEPKGHDKELKMATMGAERCFFHICWVHAYLMVATS

SEQ ID NO: 184469 - protein, 63 aa, Zea Mays
MMRTPCFRWRLSRRLWTRTQEIGVGRGRRIPGGVLDAGEFLQCAPGNLLRLGDLFLLLIIPST

SEQ ID NO: 184470 - protein, 84 aa, Zea Mays
MNYLKKIQLNKLNLIVIANTMIIIEHVGIYTIENIIKSSVKKEKNNKYSLQCQRKTLGKVFVSMPNVICRMFCLWQTRYVPLGK

SEQ ID NO: 184471 - protein, 71 aa, Zea Mays
MCNIFKHLNLMFLLICPKLHFWPSILAHLDLISSTCLLRACTHAHIKVVSLMWYVEHLITKTDRNGPMALL

SEQ ID NO: 184472 - protein, 71 aa, Zea Mays
MALHKEATGAWQRGRQRAWRERSGQRVIGWEDAGVCGEGELGAALDIATGWRSVWRGESVAARATRGRTTP

SEQ ID NO: 184473 - protein, 106 aa, Zea Mays
MSHLHSLLIMSPPLAPPLPHVRWTVAGEVEVGQGRGQGWGLFIRLAKGIAGAFAMCRNRAIEESVHKRPTEALHEDFRRYVASTGHPLPLGSPPPPIPTYLENLNE

SEQ ID NO: 184474 - protein, 74 aa, Zea Mays
MAAPLHGFLLPLDLPPCSKDREEEEHIELKGKRGSRRCSSPSLLAEFLGETLGMDEILVPPCNYVLLEVVDHGN

SEQ ID NO: 184475 - protein, 53 aa, Zea Mays
MFHLTLALLNAGACCSSREVGSSSTSTFTLIITLLRRSQDLIRNFLSTDIVSN

SEQ ID NO: 184476 - protein, 56 aa, Zea Mays
MEVVGGIYSLQPLPSSWLFLLLMGAPDSPVVHRTWHCSVSGACHISYPLGFRAVDR

SEQ ID NO: 184477 - protein, 54 aa, Zea Mays
MIVFFSYFVLHFSLGCGVLEVPLLTRVRISIVKYFGKSILWHLISMCQPLSLIF

SEQ ID NO: 184478 - protein, 130 aa, Zea Mays
MTVKKEEFLALKQGPLSVSEYQDRFLQLSRYAPEDVNTDAKRQYRFLRGLVDPLQYQLMNHTFPTFQHLIDRAIMTERKRKEMEDRKRKISGPQPGSSSRPRFSSNQSQQFRQNQRPPQQFQRQYPQHQY

SEQ ID NO: 184479 - protein, 140 aa, Zea Mays
MAKGYSQVEGLDFDETYATVAWLESIHKLYQMDAKNAFLNSPIKEEVYVEQPPSFEYYEYPSHVYKLSKALYGLKQAPRAWYECLRDFLIANAFKVGKADPTLFTKTIDKDLFICQIYVDDIIFGSTNKSSCEEFSRIMI

SEQ ID NO: 184480 - protein, 59 aa, Zea Mays
MLKGRTFSRELLFGQRKSILKRGRIFKTRKCFSKILFLYLRPHAKEFKKDFSKSFAKTS

SEQ ID NO: 184481 - protein, 81 aa, Zea Mays
MILKVFLKRKILGDILVEYLGNISGKNLKGITREISGQYFWKEFEGDHWRNICRIFEENFGENIDHYILFADINSQTNNLK

SEQ ID NO: 184482 - protein, 74 aa, Zea Mays
MLLNGLKPSVANARRIFRLSAANSRCFLSKSRHKGESAGCLSKPSFIRCSSCHLARSATLGVMNGLWSILVIGI

SEQ ID NO: 184483 - protein, 81 aa, Zea Mays
MFGGAPDCPVRHPTQGKNCLPRMPPTAPSCLGAIKGTPRRMEESTKHTLSILSLPHSISAHLIDFLSDLSSVLVVNLLRFI

SEQ ID NO: 184484 - protein, 128 aa, Zea Mays
MGYNCLFTDVGVTVFRRSDDSIAFKKVLEGQLYLVDFDRAELDTCLISKTNMGWLWHRRLAHVGMKNLHKLLKGEHILGLTNVHFEKDSICSACQAGKQVGVHHPHKNIMTTDRPLELLHMDLFGPIA

SEQ ID NO: 184485 - protein, 52 aa, Zea Mays
MNRSALPGSTVLLRLASSQEGTRYSHYLPRLVRGCIFTHGIARFKLTLSHIQ

SEQ ID NO: 184486 - protein, 57 aa, Zea Mays
MGLKQRAAGPRFENFCCCLRLLLLPLQRQRTMHACMVTNNLLNLLQCAYASKKKNRT

SEQ ID NO: 184487 - protein, 191 aa, Zea Mays
MPFDSLEAVEEFYKTYAHESGFAVRIGAQTKVLDVVENKRFLCSRQGLSKKKKDEGAVTSKVHPYVEQKKPKVRMETRCGCNAHIYVKLAPDKRYFIASMVEQHNHGLVSPDKISFLHSNRSISQRVKTTLFTCHKASIGTSQAYRLLQVSDGINYIGCMKRDLQNYYRGLRQRIKDADAELFVAQMERKK

SEQ ID NO: 184488 - protein, 202 aa, Zea Mays
MQWNSIIVAYGLLGNEWLANKYAIRESWIPTFFMDIPLAGLLRTTSRSESSNSFFNHFIHRKLSFVEFWLRFDTSLECQRHEELKANNISIHSSPLLSRPWPLEKQGSILYTHTVFKKFQQEVIAARDHCFIVAIMQQEGVKVVIINDGSMRDRVVQWSSSTVFASCSCKLFETMGIPCWHIILTLRGERLYELPSAYILKR

SEQ ID NO: 184489 - protein, 82 aa, Zea Mays
MTCSSHHPSCILKLCHDLMVRPYRYIFSIVRCPGRGTMRLHILRGMKAEVIFAFADICTHEVYMKCDITMLLLWFLRARCGD

SEQ ID NO: 184490 - protein, 87 aa, Zea Mays
MLRERERERARHPSMHHVAGAREEHLATKEQQFRWQDLGAGRGRKQQLLLQKKPLCRLQKKGARTRFGLESRPNTKQEPSLWRYMGR

SEQ ID NO: 184491 - protein, 57 aa, Zea Mays
MPIYGLFYLLPLSKKRMQLSFFRSQTLKSMVISNNFHNLVDCIYKLVIFAAKYFVIL

SEQ ID NO: 184492 - protein, 94 aa, Zea Mays
MARCSLALGLISSLSSPLSLCTHAARPDPPSHGASRHALRCFSCLPSRRSPSPVRAPSFPFPWPRAPSFSLRAAACSTVSCSLELAQLPLLARV

SEQ ID NO: 184493 - protein, 111 aa, Zea Mays
MAPIRARPCRHRRVVACDSFACRRASGFPRPVLAWPYPNHAIVDTTRGWLSTLPSSSSPRNLHAHRSRCPTSLCHPSCAVTPPCSSSSIHVASATCLSIPPIYLSVARHLR

SEQ ID NO: 184494 - protein, 69 aa, Zea Mays
MAVAFSLLVVVLASSLWARRCGIPIDVPPVLTRPSQPAYVVVSLRPASCLLCRSSISNSPRRRALSTLS

SEQ ID NO: 184495 - protein, 60 aa, Zea Mays
MTSCQFFTSRMDNSQQKDTEGRPSSGLSSKIHLKVGGYTHWVHLRCTPWIIILNQYSADL

SEQ ID NO: 184496 - protein, 55 aa, Zea Mays
MLSTAPSCLGAIKGTPRRMEENIKQPLSIVDHSHFILAHLFDILSDLSSVLVRTL

SEQ ID NO: 184497 - protein, 76 aa, Zea Mays
MTGAKNAVSTARPQHSRERKRKKKKKRAKRPPEKHERVYSVRFVITHDHEQNEALPLLLPLPSPPLRPRGDGRTPT

SEQ ID NO: 184498 - protein, 93 aa, Zea Mays
MWEKGCGPLDAKSESSVASLLFSRKENPSGGLFPLLPLLGRQPFPPSNTWPPLSPFPLGWLPSPPMVAPLHGFLLPLDPPRAARIEKRRSTLS

SEQ ID NO: 184499 - protein, 75 aa, Zea Mays
MNAYECNAYVLCLHTSKGMKPHRTPSRATYDAKLYRYGRTIGHDKTSYANESCNVYGMLYLSINFTSFRYNTNLK

SEQ ID NO: 184500 - protein, 86 aa, Zea Mays
MLRAKLGMSIKSAGDKLKFGLLTIFPCVQPAFKKAVVVPREASRAQKSACPAITSSSASTSPSMYSKVPGRFSAEGVNLSELAPIE

SEQ ID NO: 184501 - protein, 95 aa, Zea Mays
MWEKGCGPLDAKSESSVVSLLFSHKENPSSGLFPLLPLLGRHPFPPPPPTLGRPSLLSPWAGRPLLPMPAPLHGFLPLDLPPCAARIEKRRSTLN

SEQ ID NO: 184502 - protein, 62 aa, Zea Mays
MARRVSRWPQVAALDIRTSQPARQVVRRTDKMTGGGWWIHHRLTPHSKRVAGQLASNLKQTK

SEQ ID NO: 184503 - protein, 89 aa, Zea Mays
MCWALNHQNIIEIAQGHISLLISPFLVIYANTYKSNQKKCNINAIENKIVFAQVLTYLDHSLPPLGLFLQIKFIFLSLIQTHLFGHKER

SEQ ID NO: 184504 - protein, 218 aa, Zea Mays
MAPKKASATGTAALQPLDHNQETVSLREARSQKRKAVSPTPPEDEIDQEIRDMEMLHQQVQRKKEKMARLAELQRQIDEASEEVRHLAQNEQHRRPQHQDLHQEGFLNEDDWYDNFHHGNFVFDDASPLSAELQATPWPPSYKPPQLPVFDGHSDPKQFLMSYEATVSSYGGNAAVMAKMQDVRWMMRCACHAYNTSYNVIQKRYFNFIQDGNQPHIS

SEQ ID NO: 184505 - protein, 91 aa, Zea Mays
MERGRLQHLGKREEGRGGRVTAKGGKGGGCPQGALREGAARVLGGKVGFPPPDRDQRPKTIPTTELSTPAHTSNINLLFYRCLPPKIPNPP

SEQ ID NO: 184506 - protein, 90 aa, Zea Mays
MLATPSRVHPCVQPWVSLRNVPAPRPPSCSAASNLCRSSSCGPLRRARQIKSHVVNLHSFCLAIGSAYVDHLIAMDSVSTPHYNSPVVKL

SEQ ID NO: 184507 - protein, 77 aa, Zea Mays
MITKITLGSSFPPSFLPSSSLQSPMEDSHLHDGHQAGRLHLGEEEGGGLGLRGGAAITWGRRRGIGAAARVEERWEG

SEQ ID NO: 184508 - protein, 61 aa, Zea Mays
MFPTEELEDLCVTADFPVSGIGSSVILSFCCDICSVLKSEPFCERPDHPALEVELSVTRDS

SEQ ID NO: 184509 - protein, 77 aa, Zea Mays
MKTIQNQREHTIDPVVVIVCFLDPKPYAPLHIPPSRYLDSSNSRFFFKKNWLEKKTEINKVCPTTTSRTSRGTRGEK

SEQ ID NO: 184510 - protein, 76 aa, Zea Mays
MKNSRKLRHILIWEKNSYFIEDEQVIVWFKKRICVPDIEHLRQLILRETHDSAYSIHLQNYTLNLRRIYHRVKFEF

SEQ ID NO: 184511 - protein, 74 aa, Zea Mays
MWPPNTCPHLKAEPVDMALVLRLRLLVSSTIVVSRLLFVLCECPSADAELKARVLRGCWLIIHCQVDVLICNSF

SEQ ID NO: 184512 - protein, 105 aa, Zea Mays
MISPRTLARVIRKETGRRRGTLKRSSTKTATSLLLPQETTTTRKRNRLTQTFHLIILAFRLTPMPIYFQFHLGNLRILMEKTTHFGVTKCVVTYSLSIHVFGRSL

SEQ ID NO: 184513 - protein, 87 aa, Zea Mays
MYMSTRFLKQLVARARAYFGNFCKTGCQKSKGLLWKFLQNSLSKEQGFILETSAIHFMLSIPQTVVSFARCKKNMVIKAVKRYEPHF

SEQ ID NO: 184514 - protein, 75 aa, Zea Mays
MNAYECNAYVLCLHTSKGMKLHRTPPRATYDAKLYRYGRTIGHDKTSDANESCNVYGMLHLSINFTSFRYNTNLK

SEQ ID NO: 184515 - protein, 63 aa, Zea Mays
MPSAPRFGGACTLVSFAILAKGRCFFGPLAKGLRSRCSLNLLQRNKLILRGGYCWGPSPSKGP

SEQ ID NO: 184516 - protein, 90 aa, Zea Mays
MRRQMSDKAVADGPVVHPRRSARTLKMHFTEPVTISDGARFSFGRTVVLTYVFAEFMSEAHPSVVDGPPQGPGWSAHRCFSKKLILSGII

SEQ ID NO: 184517 - protein, 55 aa, Zea Mays
MASEVSNLDASRSSWYPDATSCNQAGTIEDNANRWPSGCGLRDNASLTLFSTPFL

SEQ ID NO: 184518 - protein, 102 aa, Zea Mays
MYTQGYAAWRMLVSRSLVMIHCGTTLMCDLPLTPPLKRFLCCFLQQSSNICHHCWIKRVYNSNVFLGKFSTHSEISNKNQNLFVSNRVLKKIHPFHVWSLFS

SEQ ID NO: 184519 - protein, 103 aa, Zea Mays
MVRVPRATNFNSTVDAVGKVLPSSSARVHCKAPPYSATSRHEGASAGHCCDLLQVAIHVLPFRPYGVHGIQVAGCTHASPMRVCNTTSTPEPTVLTPSGPLGS

SEQ ID NO: 184520 - protein, 103 aa, Zea Mays
MSSCQNVEVNTGSRSETMDCGTSWRRTMSVKNACATVSAVYGCASGMKWQYLLKRSTTDRITVFPFTRGSASTKSSAMSAQTAEGTGRGKSNPAGWRCSDLYR

SEQ ID NO: 184521 - protein, 57 aa, Zea Mays
MRQTLRDYGYKLSKVPLICDNECAIRMVYNPVEHSRTKHTDIRYHFLRHHQQKGDIE

SEQ ID NO: 184522 - protein, 92 aa, Zea Mays
MIKQQNDHIATLNTKIAEHELENEKIKFAKSMLYNGRRPDIKDGYCFQQGNQNKTKLNAPKKLSNFVKAKAPMVQDREGYILYPANYPKHKI

SEQ ID NO: 184523 - protein, 96 aa, Zea Mays
MRQTLRYYGYKLSKVPLLCDNESAIRMADNPVEHSRTKHIDIRYHFLRDHQQMGDIEIAYVSTHNQLANIFTKPLDEKTFSKLRNELNLLDSRNFD

SEQ ID NO: 184524 - protein, 63 aa, Zea Mays
MIEGANSKGHNTPRKLRGSSKALSGRQPQGAEASGASREDLGINQEKFTAYSMVKTRAIPPGC

SEQ ID NO: 184525 - protein, 86 aa, Zea Mays
MRSEKGAQNHAEGGTEDMGAVEQEELPWEGGRTRSGKVTASTMARTTQEDWARAGRAGSHQGQRPGARWWRSRSRAQERSDQGRAS

SEQ ID NO: 184526 - protein, 58 aa, Zea Mays
MLFRTWCVLVHVGRARCFVCRQRAMSHVPRLVRALGRVVRSCCFTCYVFRLAPLIRPA

SEQ ID NO: 184527 - protein, 70 aa, Zea Mays
MKMKMKKEKKLVLYGLILSPRWSKSHFIAPTHEAHPLAERSPLLDGMWAPPLSFPHMLRVTGCGANMTYS

SEQ ID NO: 184528 - protein, 82 aa, Zea Mays
MSATATRQQRGHDTVRRRGLWRGCRRSTTSQRRVNSRCWRVVRWAGNERERRAAWTELRWGSTDSGADGEERQAPVSLYGLW

SEQ ID NO: 184529 - protein, 60 aa, Zea Mays
MVLGLQLSLHRRDEAFQHVQLLDARWPTSWRPPRASFPRWPPPSCSAFWRLVVVSSCVTA

SEQ ID NO: 184530 - protein, 87 aa, Zea Mays
MDPKGKGMVVNDKEESFVNDPKDDKPTDSGSGHKRKDGRKKKTRRIKEIVYYDSDESSSSQKDNYSDYEKKKTINSNFSFDYSRIPQ

SEQ ID NO: 184531 - protein, 52 aa, Zea Mays
MFHLTLALLNAGACCSSREVGSSSTSTFTLIITLLRRSHDLIRIFLSKDVCF

SEQ ID NO: 184532 - protein, 70 aa, Zea Mays
MKPHRTPPRATYDAKLYRYGRTIGHDPTSYASESCNVYGMLHLSIYFTSFTYNTTSNNTSFTFRYNTNLK

SEQ ID NO: 184533 - protein, 72 aa, Zea Mays
MLVHACSLTHCFELNCFLGLLMYLFYICSTLGSFHIGFSCNGRCNKSTGAISMNPYTISKGHKLVVECTALL

SEQ ID NO: 184534 - protein, 124 aa, Zea Mays
MDVKNAFLNGDLQEVYMHPPPGVDTPSGHVCRLRRALYGLKQAPRAWFERFISVITAAGFSSSEHDPALFVHVSPQGRTLLLLYVDDMLITGDNSEHISHVKQHLSKEFQMSDLGPLSYFLGIE

SEQ ID NO: 184535 - protein, 52 aa, Zea Mays
MQGSTMPRAGGRGRCDDGGAWSSRLNLGRWEPRTDGLDGGRCSGEGGRCSVN

SEQ ID NO: 184536 - protein, 169 aa, Zea Mays
MSRLLSLRFMRPHLVLPLPHVRWTVVFEVEVRAGVGVGAYLCAWQMGSSGSSPYATVVLSRRLCTGVSLKHFTMTCEASRLPWAIPCHSTLLHLRSLPTLRLLMNGTNRSMACHLLLLRMKLRSLMTPSSMLLLPPLDLFLVTLGLQALVTLLLLLYSRVLHLPQLSFI

SEQ ID NO: 184537 - protein, 53 aa, Zea Mays
MAAHARYVYFFYILHFLFSFFLFIFRFLTYIKYTNSNTSRNRIYLFIYLFSPF

SEQ ID NO: 184538 - protein, 82 aa, Zea Mays
MTCTSHHPSCILKLCRDLMVRPYRYIFSIVRCPRRGTMRLHILRGMKAEVILAFADICTHEEYMKCDITMLLLWFLPARCGN

SEQ ID NO: 184539 - protein, 136 aa, Zea Mays
MALGCPAPCFSRAPAISRGSPVPRSTLLPPTAPPFSLSLKFSARIELLRDGCHGVHQRSRPAHVLHGAWLCYSPPISLRLSLLADRAPSLQPSFFFYSPSRLLPLPGRGFPCSVPCRPAPSSWRRSASPLHQPCPA

SEQ ID NO: 184540 - protein, 357 aa, Zea Mays
MLAAHPMSYELAKEFDRLSLRFLNNTQGVTDELEPTLEQDIRKGQKDDEKINKIRELIIDGKGPDFCEDAEGVVCFKDRLCVPDIKSIQELILKKAHETTYSRHPGSEKMYQDLKKISWWYGMKRKTAEYVARCKSCERIKAEHQRPTCLLQPLQIPQWKWDEIGMDFIVGLPRTRAGYDSIWVVVDHLTKAAHFIPVRTTYSSPMLVELYISQIVCLHGVLKKIVSDRGTQFTSHFWQQLHETLGTHLKFSSAYHPQTDGQKERTNQILEDILRACALQDKLGWDKRLPYVEFSYNNSYQASMMMSPFQPLYGRNYRTLLHWHQLGERQVFGPDILLEAEENIRMIRENLKTTQSK

SEQ ID NO: 184541 - protein, 87 aa, Zea Mays
MESSLQTDDGEPGDGRLVLSSESSVSLKSSDGGVAGCFLLSPLVFLLPLSSFFPAIGVSRRGEEDRRKQEVCASEGVCGTQLVYLKK

SEQ ID NO: 184542 - protein, 105 aa, Zea Mays
MQDAARRAFSQYCSLFSGVADGLDLKYYPHHSTGSAGGVIVSPIGEGNPRLNNMVNLATVLNTELDHALDELGKVQAEVAELHAKCVACHYLDGGSPAPVGIQHP

SEQ ID NO: 184543 - protein, 108 aa, Zea Mays
MEGGGLKRSSSPSGPSFVVPDGLAPTAATSGGTSGCSRAYNTCTSSCKVIQYNCRLSRDTLSSAMWARAFASQSQAKERELMAQSMVVSRSEISYYRQLTSADNSAIR

SEQ ID NO: 184544 - protein, 66 aa, Zea Mays
MGKNISLILSSPSTQCAPPLLDPCCAGEGRSRGRRKPWRGAAMGGEDSQPKGKEERGGQVWEGGKG

SEQ ID NO: 184545 - protein, 51 aa, Zea Mays
MGLHFSLVVYLIMDLANFWLPIITLIGVVHDLLEKCLIITLYLFSLLKKLG

SEQ ID NO: 184546 - protein, 89 aa, Zea Mays
MRRFFFPQNPSGRPPIFPFSWPPTPPFPHPWPPLPLPLAATLHYFLLPLDLPLPTQQGSRRGGARWIEEEERIKEMFYPHLLQIFLGKP

SEQ ID NO: 184547 - protein, 121 aa, Zea Mays
MIMKGVNSLIALGAWIIWNHRNRIVFDGISPSVSAALRQAREEQQLWEMAEAKGLSFLAATIRGTKLPGLSLMGWFCFSGSVCSCFCFVLFFFLFFFLWFFIPSGEVFCTMVYFGPFFPST

SEQ ID NO: 184548 - protein, 75 aa, Zea Mays
MERVGGGCQWGGEQEREGAAATQLGRGRGAARVGEERGAPIHRIEINGPNSLSPLSSQPQRKKFQKIYCFLRNAS

SEQ ID NO: 184549 - protein, 86 aa, Zea Mays
MPGLRKVPQVMFKTTEMRQPLCFLSTFFCLFSGSILSLSFSFLFFFSFFSFLFFCFCFFDVTEGEKQGSSVDSVCGVIKREMVAAR

SEQ ID NO: 184550 - protein, 341 aa, Zea Mays
MEKCTFCTQRVSFLGYVVTPQGIEVDSSKVEAIQDWATPTTVTQIWSFLGLVRFYRRFVRDFSSIAAPLHELTKKGVSFAWDPPHEEAFNNLKDKLTHAPLLQLPDFQKVFEHECDASGIGLGAVLLQEGKLVAYFSKILNGASLRFSTYDKELYALVRTLQTWQHYLWPREFIIHSDHEALKHICTQTNLNRRHASWVEFIESFPYIIKHKNGKENVIADALSHRYTMLSQLEFRIFGLQTVKDQYVDDADFKDFYVHCKDAKPWGKFHIQDGFLFRANKLCIPASSVRLLLLQEAHGGGLMGTLAFTRHMRCWPHTSFGLGCTVMLSVLLHVALLARKL

SEQ ID NO: 184551 - protein, 163 aa, Zea Mays
MITIHEQTKQNIAATNAKNQVAGSKGRKLVTFEPGDMVWLHSRKDQFPILCRSKLMPRAAGPFKVLTKINDNAYILDLPTEFGVSTSFNVADLKPYMAEGEELPSRTTSLQEGEDDEDITMSTTTPAAPPHQAPLPSLARTITRARARDLNFVMLLKNEGPEE

SEQ ID NO: 184552 - protein, 252 aa, Zea Mays
MAASVSSSRCPLQPNSSLKLAVELPFSNRAGENLPGAALPPPARSVPISMAVASSSELALSSLYFSLCLAEPLLLSSSRAAPPQSTSLLALQLPQPSSDFFHGRYALVERSTPAVVVCLSASRALSRSSCCSCPGQQPRRSLLFLMFKPPNASALSVSRPYAANSLPRRAPCPLIGPCQVMALALVPCLRSLLVARPLAIGLTFMTQRHRLPCPTRRQPAVRASSTSPARVSLRRAWQQVLHVEAIATIDST

SEQ ID NO: 184553 - protein, 91 aa, Zea Mays
MSSSDTGSSDERVRRAYVSRTEGEESMNRSSSISIMEESATLLHTRRDNERQQPAWRPDATEEGVRRFDDTGEVNDEPTKPKLHDADQYTG

SEQ ID NO: 184554 - protein, 130 aa, Zea Mays
MAVPCVLATRCTASPCSLFFRPLDPASRLTHPSLLLPFFWRSLPLLRRQQAAASAVKPLQPAPTDARSRAPSSGANTSPLQDTLRFIVDTPPHSQRVDSLCNLAACRVAARLCYATASCRVMVVAAPCSL

SEQ ID NO: 184555 - protein, 96 aa, Zea Mays
MLSLTARPLSCSPARPLGSLGFNSQSCRRFHRLASFVVASRVQLYIRHSPVSSSFHVSSRNSKSRVKMEPAAWCSPSARQKARTSCATQVRFVKII

SEQ ID NO: 184556 - protein, 75 aa, Zea Mays
MKVHRVKARVLSSKKLGLQICNSRIITRSIIKSDCQDLILNYPFNQTFKNSLSYDNTSVWRIQFNKVQNTALQDP

SEQ ID NO: 184557 - protein, 65 aa, Zea Mays
MRCKMHMYEYNESSTKVAQDIQRHSGELNIKLEDTVDNQMLALVIYMSSGIRNHYHWKDDDTYYI

SEQ ID NO: 184558 - protein, 73 aa, Zea Mays
MVGHYSVINYRHGPTLYQPCQHGDLWSGPCDKGRTINEAPFTMWKITMHGLRGPDCSISGVLDGLRPGLCGRR

SEQ ID NO: 184559 - protein, 91 aa, Zea Mays
MDWKPSTTVRQIRSFLGLAGYYRRFILDFSRIAKPMTELLKKGVKYEWSQKCEEAFHTLRQHLTTAPVLAQPDNTKPFEVYCDASGTGLGC

SEQ ID NO: 184560 - protein, 364 aa, Zea Mays
MKVHDIRLPMREETEFIHVSLDQEFYTTANMHRYYRYLNSLSKMTVLPKGGNQMNVLGESRVFLLLLAPNSLACINVFDMIWEEILRASWSPLKGCLLAPFIMKMIEVVTQTHFEKPVKHSRYVPYWVDSSNPATRTKRTPLGSGGPASSLSHLLSLLIIHPPLASPLPHVRWTTAGEEVVRARDGVVVEDYSFIWPRAFLAPLPCAATGRSRSLCADVGLTGYMRIFFVMPPRQVILCLPGPLHLRPPPSLWTLMSGTNRNLVCHSLPLRMRPRSLMTPIIPRLILILLLPIRVRDPFPVTPGHPAPVTILLLPTRVRDPFLVTHGLLAPVITTLLLLISVCLLHPFFLQVMSLLGTPHSRKT

SEQ ID NO: 184561 - protein, 101 aa, Zea Mays
MCAPSTLARTEQATGRVRAHGMGTGWRRRGGRLPAPPLGCSVVPSLRAAGRAHRISCACCAVCTDPPSLSLPRISPYAGHGDASRGGASNRLRQMPLPSIP

SEQ ID NO: 184562 - protein, 195 aa, Zea Mays
MTGGSKLISRFTAASSATKVSTGGLRSNIQGSSSGKNGAAPNMSYKPAVSTSTSVGSTTKSSGIQCFKCGGRGHVIKECPNNCVILVTDDGEYTSASEEEAEAGNEDDINKSEEHTRCEFEHGTTLVVTQILSVQMKETEIGQRHNLFQTRAKVQDKVVKVIIDGGSCHNLASREMVEKLGLKLQRHPHPYHVQW

SEQ ID NO: 184563 - protein, 287 aa, Zea Mays
MLLRTMVKKNLKDWEECLPHVEFAYNRAVHSTTNFCPFEIVYGFKPMAPIDLLPLPLQERTNMEASKRAAYIKNIHEKTKEAIELKAVRKAASMNKHRKKVLFEPGDLVWIHLRKERFPDQRKSKLMSRGDGPFRVLAKINDNAYKIDLPPSYGVSNTFNVADLLPNTSEDTSESRTTPFQGKEDDMTTPLSNMLQPPSHTTSTQKQPTSSPTHVFDGPITRSRAKKLQQEVHALLYEFQLNTNENFVGPVLRRRRSFRKKQPSAEAVCVRWSKVPLHEASVSQTDL

SEQ ID NO: 184564 - protein, 62 aa, Zea Mays
MKQHVMKHKACHSCNQHSNFTPSNLDAAIHQHQCLKTTLFYEGVICTKHNPYQLQPLILIKW

SEQ ID NO: 184565 - protein, 52 aa, Zea Mays
MRPTLQVETLNQSWLLFSHGNQSLSSTLTLAAIYHQFEQWRPAPKPLCEHPF

SEQ ID NO: 184566 - protein, 219 aa, Zea Mays
MLVYVDDIIVASSSQEAIDAMLNGLIGFCLERYWPAFPCRYLGLPLSLHKLSKQQFQPIVEKIADQLPNWKADLMTRAGKRVQVQHVLTSMMVYHTMAVDIPKWGLDAFHKIRRGFLWRGRKEARGGHCLVAWGRVCRPLYLGRIGISSFPELCWALRMRWLWLQKTDPTSPWSDLPIKVPGKARAFFTDVVLTEVGDGTNTKFGRISGYMVRELRTLL

SEQ ID NO: 184567 - protein, 58 aa, Zea Mays
MEDSHPHDGHQAGRLHLGEDEVGAARVEGWRCNHLGNKERDWGGCKSGREEEREGRPK

SEQ ID NO: 184568 - protein, 83 aa, Zea Mays
MTSRCHVFLCSSAEMISKSSYSRVVAFSITCTVMSSRCHGFLCSSAEMISKSRCSRAVWYVIISICWFLYIVVICLCRVKPFL

SEQ ID NO: 184569 - protein, 52 aa, Zea Mays
MISNIFKQSTFLSVNSFPLITQCSSMDQAVSLAARSRRFESSFYPCKVNLNT

SEQ ID NO: 184570 - protein, 94 aa, Zea Mays
MQGSGRREGRLGGEDNSVEEFHPTQSRFPPQSVTSALRALRGLPSTHTEHGGWSFSPVDDSVSLFLPLRSAYGPLQSPGISAVAARRLHGVWRR

SEQ ID NO: 184571 - protein, 53 aa, Zea Mays
MFAPGSLKPGCDKPTISLRCVEYYDASCSHVWRDVNFSCTMFSCIVASRRASD

SEQ ID NO: 184572 - protein, 57 aa, Zea Mays
MILVQVFRQAFGGHQFGACFSTFSWGFFCQREHKSEASRKDWHRSEATEQRQRGGQC

SEQ ID NO: 184573 - protein, 62 aa, Zea Mays
MTGPPVSAPSVRWMAQRTNRLGLVSAKALSSFFSFSFSFLFCFLFIFTSSNLNSNFCCEFHT

SEQ ID NO: 184574 - protein, 64 aa, Zea Mays
MRYNIQWFGRGLPPRCGVPMDEDCTQPIPSDLEIKLENHDCLPYSIFSFVRNLHKLESLTPYTV

SEQ ID NO: 184575 - protein, 67 aa, Zea Mays
MPNQREQYGNTAHLFIGTGRSPCKITLMPFTFINEPIVILRGLVWLFIFKSVSPSRRDAEALPHIAS

SEQ ID NO: 184576 - protein, 51 aa, Zea Mays
MLSAMLIISADSFASGSTNDSKGSRGGDSLAAVENVNKFEVTKINNKVKSY

SEQ ID NO: 184577 - protein, 60 aa, Zea Mays
MNQHVMKLKPSHRCNQHYDFTTSNLDAAIHPHHCLKTTLFDERVICTKHNLYQLQQFILI

SEQ ID NO: 184578 - protein, 66 aa, Zea Mays
MGTAPWRLGAPFIAPRSLGAVGSSLGKQSTFHVCMQRIEQSATYFLQRPSRPLCAFGRLAHRAKHK

SEQ ID NO: 184579 - protein, 81 aa, Zea Mays
MGRAAAREKRIYWVRRRRRPRYRLLFFSFLFFIFIFHICFQIQTNVNFKYTSAKTSIGMQLYNFIYLLFFINDFIEHNIKE

SEQ ID NO: 184580 - protein, 59 aa, Zea Mays
MEDLRDSNIKLYYKLVSIDHMRGYSINNYLNFNLSYKLIIDHILVDYKDKHINKTNQLK

SEQ ID NO: 184581 - protein, 72 aa, Zea Mays
MLLSNSPKNPHKPEGYYRLVLKLDPTSPRAATKPKLPNSLAPAITQQAYSSEKHLKILGNEGDSPWNTALFL

SEQ ID NO: 184582 - protein, 186 aa, Zea Mays
MRKASDLLSDLKVTSRCLKAKGVKLNPEKCVFGMPRGMLLGLIVSKRGIEANPEKIAAIMQRPEPLIEDTRGLHAPLGRAACHRQSSEARDKRTGRRSRRSLHQHFERLTATLLLPLRCFRVVPLPCPRASFSRQGRVSPASAEPDPPSGAKKGGTPLRQNFQSKRPLRSPGYVRSRTPRSERGCM

SEQ ID NO: 184583 - protein, 70 aa, Zea Mays
MMAPCVLYDDGGSQPPYGSKRTSARTQQLRQLSLHQAPTLLRRPRHHTSWVPKSLRLSRRHVLRALALLR

SEQ ID NO: 184584 - protein, 62 aa, Zea Mays
MEDGYHRGRGRPAKGEKKGVAAKRGGEGKKRGGHLGFLLEKETTPQMTSIFASNGPQPFTSS

SEQ ID NO: 184585 - protein, 62 aa, Zea Mays
MHREQIKNKIKLPYIVGDYKIYIKWVVHIVHMTSLQQLKKICITFMAIETNHGGKTCMPLQL

SEQ ID NO: 184586 - protein, 78 aa, Zea Mays
MLKLLNASLISLVLRLKFCHLMLYSNNLFRLNLYFLKSFLCLGTSPILGHFHHLKCCITSSVQLLPLLTTVPSSKLQL

SEQ ID NO: 184587 - protein, 54 aa, Zea Mays
MFESLLTVSTTDVPVLQSAEVAHLYPQGVFSFLPRVDRTLKHFQGELVRAHCEA

SEQ ID NO: 184588 - protein, 70 aa, Zea Mays
MAAPLHDFLLPLDLPPRSKDREEEEHIELKGKRGSRRCSSPSLLAEFLGETLGMDGILVPPCNYVLLEVV

SEQ ID NO: 184589 - protein, 83 aa, Zea Mays
MLSRSHLWRCFFSPAKKTLVVAFSPFCPCLSANPFPPSNTWPPLSPFPLGLAALSSHGSPSPRLPPPSRSPPAQQGSRRGGAH

SEQ ID NO: 184590 - protein, 64 aa, Zea Mays
MDGFLCCTSTSKTTVNFNSLRDLLSPDPQSKRFGVAVDTFDSFDPLLHDTFQKRKPKFMMPHMV

SEQ ID NO: 184591 - protein, 65 aa, Zea Mays
MSYTKNVAYHPRHPLEKAEPETWTFDMPWHGFYREVGSVTHPIWRPEISLPRPYLPWQLTDERHP

SEQ ID NO: 184592 - protein, 88 aa, Zea Mays
MNAYECNAYVLCLHTSKGMKPHRTLPRATYDAKLYRYGRTIGRDPTSDASESCNVYGMLHLSIYFTSFTYNTTSNNTSFTFRYNTNLK

SEQ ID NO: 184593 - protein, 90 aa, Zea Mays
MGELALKLLELIALSLHKPDRLHRFFGDDQTTFMPINLYRHKDNSAYDTYCWAASAGWRVLFFDSGSRRPLVALQCLPEARFSRRSVSTH

SEQ ID NO: 184594 - protein, 75 aa, Zea Mays
MNAYECNAYVLCLHTSKCMKPHRTPPRATYDAKLYRYGRTIGHDKTSDANESCNVCGMLHLSINFTSFRYNTNLK

SEQ ID NO: 184595 - protein, 81 aa, Zea Mays
MARSSSSLLALSPRLFVPARSPIRALPSAAASSSLSSLPLSYACVSLFLCVLPRSSLLVNAPARILLCRPAWLYISHGCLL

SEQ ID NO: 184596 - protein, 76 aa, Zea Mays
MSKMNKLSTVVAIHFRNGLSFTEKNFFFLESNLMPSLLSFFNILVVFLTIKALLASRSSSLEDSSSICTLAFPFLS

SEQ ID NO: 184597 - protein, 63 aa, Zea Mays
MALVILGLLSSISTSISDLNCDPFKMLINSIFCFKYLIETIHLLRCFISLLLYSMHVLGSCWE

SEQ ID NO: 184598 - protein, 63 aa, Zea Mays
MALVILGLLSSISTSISDLNCDPFKMLINSIFWFKYLVETIHLLRCFISLLHYSMQVLGSCWK

SEQ ID NO: 184599 - protein, 71 aa, Zea Mays
MSIGDVCPKESEEPPNAQDQPSSSTQASPPTQNEDEAQVDEVEDQANEPPQDNDNDQGGDANKEDKEEEEQ

SEQ ID NO: 184600 - protein, 71 aa, Zea Mays
MADNPVEHSRTKHIAIRYHFLRDHQQKGDIVISYINTKDQLADIFTKPLDEQTFTKLRHELNILDSRNFFC

SEQ ID NO: 184601 - protein, 64 aa, Zea Mays
MIREFSPFLTIPCAASAAPFHHSKKDVRPGCGARACNPNFLRSIYQKILVKTQEIRRWFMVSSS

SEQ ID NO: 184602 - protein, 74 aa, Zea Mays
MAAPLHGFLLPLDLPPCSKDREEEEHVELKRERGSRRCSSPSLLEDLLRETLGMDEILVPPCNYVVLEVVDHGD

SEQ ID NO: 184603 - protein, 55 aa, Zea Mays
MSICFTGHSSLGPRRDDLTIYWALGLFVRSFILPVDPGDICPPHSWRRYLYRKQH

SEQ ID NO: 184604 - protein, 112 aa, Zea Mays
MQCVSPLPSYLLKYKTTPSANTTSMNAYECNAYVLCLHTSKGMKPHRTPPRATYDAKLYRYGRTIGHDKTSDASESCNVYGMLHLSIYFTSFTYNTTSNNTLFTFRYNTNLK

SEQ ID NO: 184605 - protein, 66 aa, Zea Mays
MHVSSDRNSGQLTISKLLNASSCPDMNRSLEQFRISIFLRNKGRLTRELIERFPGIYHSIQVKHKC

SEQ ID NO: 184606 - protein, 93 aa, Zea Mays
MIMDLGKTVASTPPCSLLFGSRWRQGLASTSLQWAPPKHRLHVPTHPSSAINCFPFLLSSVFCGLEPPPSLLHPLGHHLVNDSCLMLSDCHPS

SEQ ID NO: 184607 - protein, 158 aa, Zea Mays
MARTMLDEYKTPDRFWAEAVNTACYAINRLYLHRILKKTSYELLTGKKPNISYFRVFGSKCFILVKRGRKSKFAPKTVEGFLLGYDSNTRAYRVFNKSLGLVEVSCDVVFDETNGSQVEQVDLDEIGEEQAPCIALRNMSIGDVCPKESEEPPHAQDQ

SEQ ID NO: 184608 - protein, 54 aa, Zea Mays
MNNLLPNLGMSSIFLILGISFAKLAHIAHKYTFDHISFIYAMTNVFSSIFQTKS

SEQ ID NO: 184609 - protein, 72 aa, Zea Mays
MKLGWKRDGASGPRVNTAQAQEYLILFFYSFYFPILFFSFSFPNSKFQFQLNFNLWQIHPQINSTIWTYQKV

SEQ ID NO: 184610 - protein, 94 aa, Zea Mays
MSSKSKKGRGQRRCFKCKEPGHFIVSCSHKDKDERMRRCFGCNDKDHVITSCPLMKNQRCAFPTMTLTKIKNEQQASYKAERRFCYKCGEQGHL

SEQ ID NO: 184611 - protein, 64 aa, Zea Mays
MNAYVLCLHTSKGMKPHRTPPRATYDAKLYRYGRTIGHDPTSDASESCNVCGMLHLSIYLTSFT

SEQ ID NO: 184612 - protein, 60 aa, Zea Mays
MFYGSQAMQDEEKQASEAVERGKLRRVAERLSPTRSILVSIGCNRAHIFVSYKRGKTARL

SEQ ID NO: 184613 - protein, 97 aa, Zea Mays
MPLFMTNSMLHLPLFGFHNLYCSTCILILLQTGVHYHCVTSIYGIMKAISFFTIFIASLNKPFRLYNGSESLSVDPISLIFLDKERRPLCHCFALYY

SEQ ID NO: 184614 - protein, 63 aa, Zea Mays
MLTVMSGSDPHMIKLWNLNSIGHMHCMGFVINFVLLFLLWFGIYLHLVIANKSLTNIKSNAQL

SEQ ID NO: 184615 - protein, 52 aa, Zea Mays
MFRTGSGACALRFNGASSTAGRRVAPSHTGGATLQSKVLQSRPVTSGRAAGT

SEQ ID NO: 184616 - protein, 103 aa, Zea Mays
MPARRGSNRRDRAANSHDNHQRARCEQGEWVGARRDEAWSLPESSDRNVRPRGCLADREQEAYEEKVEAVNDTMELGFMIYSDEGERTVPGGEKRPALASRRH

SEQ ID NO: 184617 - protein, 50 aa, Zea Mays
MVRCRFNDHIALGNYHINVFMSTAYLVSGQQLHPILLVYLLWTKEIQELK

SEQ ID NO: 184618 - protein, 53 aa, Zea Mays
MNNKHNTCPSREISSTACHGKYRSRATHSRRKEEHKQYVKSHTWLALSIAMHI

SEQ ID NO: 184619 - protein, 54 aa, Zea Mays
MEAPPGLASRSLEMEAPPAGADVVQAPPFLVTPQDHGSLVRDFYCFCYISASAQ

SEQ ID NO: 184620 - protein, 54 aa, Zea Mays
MTKRRQKTLLGVGAQTPWAPRLTRATLFMALAEYVRAIDHPTHMIRYVLALGTL

SEQ ID NO: 184621 - protein, 68 aa, Zea Mays
MYVYIWSLDPPASYSYICGYDQPLYVYERERSSSAVVMYIYMLATQESPKWHQAAGEERPERTKCMRE

SEQ ID NO: 184622 - protein, 73 aa, Zea Mays
MTDPARKATTATDPAAKTRSGQRDDRSSREGRNNGESGWEGRGSDGSNEDDEGEGDGAVPVGQGPAPVLAGKG

SEQ ID NO: 184623 - protein, 114 aa, Zea Mays
MLTLGDSGPMPLLMAIRQGEVAPPCTEVNRDQGCLEHLPAHLPRSPSCKEATSSSLYAHSRRRLEPCGQRQPVLLMLHCYLDLQQPLLNLLERGLHLCEISPYVGPQVPHRWSW

SEQ ID NO: 184624 - protein, 135 aa, Zea Mays
MQCVSPLPSYLLEYKTTPSANTTSMNAYECNAYVLCLHTSKGMKPHRTPPRATYDAKLYQYGRTIGHDKTSDASESCNVYGMLHLSIYFTYFTYNTTSNNTSFIFRYNTTSNNTSFTFRYNTTSNNTSFTFRGVN

SEQ ID NO: 184625 - protein, 114 aa, Zea Mays
MGEGEIYGGGRNGGRLPWEERGRPTKGKMGEGGGQERGGWREKGWPPRVLWENRTDAPDDFCFCIQRPTTLSHIHAPKINFWSTFFLGYYTLPPLKRIRPRIRPLQAKHPRYPI

SEQ ID NO: 184626 - protein, 81 aa, Zea Mays
MQCVSPLPSYLLEYKTTPSANTTSMNAYECNAYVLCLHTSKGMKPHRTPPRATYDAKLYLGVVMDRDPNASSQFVKALNNL

SEQ ID NO: 184627 - protein, 73 aa, Zea Mays
MGSTTNMKVHRVKARVLSSKKLGLQICNSRIITRSIIKSDCQDLILNFPFNQTFKNSLSYDNTSVWRIQFNKV

SEQ ID NO: 184628 - protein, 117 aa, Zea Mays
MMGRFRGFVNSMELKEIPLIGRRFTWSNQREVPTLVKLDHVFCSADWEDFFPDCSLHSNATAVSDHCPLTLRIREGAWGGEDFTLRVFGQKSRGFWRWWLPRGVYLCRIFVHLRRYH

SEQ ID NO: 184629 - protein, 63 aa, Zea Mays
MRISWRWTLRGKKIQIFLLQSLTNRIPQISKNLGFESERDANRPIKTISILMFLDYANTGRYF

SEQ ID NO: 184630 - protein, 69 aa, Zea Mays
MFQGERGQRKASGDVGGRRAETGTYACYDEDPHSSLSLLLAFSREQVFHCFLGPLGGRSRPLVFLYRLP

SEQ ID NO: 184631 - protein, 61 aa, Zea Mays
MKASTASEHDCTGQRAAGDDGRETRSTELPKPRPTYVRIYALTGTSPSTLAYMGYAWHPFF

SEQ ID NO: 184632 - protein, 58 aa, Zea Mays
MKEQTMPKAFRHSSAASSISTFGFWRPKRCQIGRMIISLMSSRAFKSFLHKTIPSSSP

SEQ ID NO: 184633 - protein, 73 aa, Zea Mays
MADVSFFIEVHNRNPAFCRVPNDLPSVFRRMPKAKQKTLGQGFLCRVFFFETRQKLFAKCFFPTLGKGNLKIV

SEQ ID NO: 184634 - protein, 52 aa, Zea Mays
MVARLVPHVRSARRGHAFDGIYFVVFVVCVLLDSGEWVYSLLGFWLCLWTRW

SEQ ID NO: 184635 - protein, 81 aa, Zea Mays
MQVEIAHYVARCDTCKRVKATYMKTAGPLQSLPIPTWKWEDIVWTSSWDYPGLQKGMTLSGLLLIGLRKLLIFCQSRQITQ

SEQ ID NO: 184636 - protein, 102 aa, Zea Mays
MKGVSRFGVKGKLASRYISPFLVIEQCGPVAYRLQLPETLSAVHNVFHVSQLKKCLRVPDRTIEVTNVVLEPDLTYSEHPIRVLDQKDRVTRRKTLKFYKIQ

SEQ ID NO: 184637 - protein, 102 aa, Zea Mays
MSGERAVTREVCGEEKKVEGPFRKLSVTLDNSKETRFQLVKTLRAFSQIRQSARGRAWAPPCSLCCWADWARFSPTLFTLFPFSFSVELWKYVENYRKILKI

SEQ ID NO: 184638 - protein, 53 aa, Zea Mays
MHQRVSSNSYEPNAHFTRLKVCEKYLKHKERGCMHRGLPSFTGESGSDSQMSK

SEQ ID NO: 184639 - protein, 81 aa, Zea Mays
MKIVTMLFDERPSFDKIFARACEEFSCNINDPRISIQGLLYQVEEPFTRHQRAYVEYSNELDSLTPSMVSCSLLSFFLSSW

SEQ ID NO: 184640 - protein, 128 aa, Zea Mays
MVQDSVGYILYPANYPEHKIRKIHARKPHTVSHHAFMYKNEASSSRQSTHVKLPKKKTPATSNEHNVSFKTFDASYVLTNKSGKVVAKCVGGKHKGSKTCVWVPKVLVSNVKDPRSFGYLRTRPKFVL

SEQ ID NO: 184641 - protein, 52 aa, Zea Mays
MQTHEKEANSHLLLVICEKGHLIQIMHTTLPLSKKMPNFKMIALAQNNNQEK

SEQ ID NO: 184642 - protein, 52 aa, Zea Mays
MQTHEKEANSHLLLVICEKGHLIQIMHTTLPLSKKMPNFIIIALAQNNNQQK

SEQ ID NO: 184643 - protein, 153 aa, Zea Mays
MALASKRGDNVKLNAPPKRLSNLVKGKAPMPQDNEGYILYPVGYPERKIRRIHSRKSHSGPNHAFMYKGETSSSRQSTHAKLAKKKTPKASNDSNISFKTFDASYVLTNKSGKVVAKYVGGKHKGSKTCVWVPKVLVSNAKGAKTIWVPKVKN

SEQ ID NO: 184644 - protein, 59 aa, Zea Mays
MICCWCDLASIPATGIDDRVGYCFRWRGPGGVAWPGFAMLFGSSPLFISAALKFMVIIS

SEQ ID NO: 184645 - protein, 60 aa, Zea Mays
MIYCNIPVFTPSLETLKLLTPFFNYLLRPPPHKTSHSSYAYTMVVSSTSHRIFLTPKKHR

SEQ ID NO: 184646 - protein, 61 aa, Zea Mays
MMANNLGVRLHKFYPKIHLSVQNKVFAPFPTSETKTVEKKAPAFFGTWIGRFAQGFSGSVL

SEQ ID NO: 184647 - protein, 55 aa, Zea Mays
MVVGFRRTISFPAPRSPAPPAGPSAANNKSVAYRARSASLPCRFHPLVLQLDDDV

SEQ ID NO: 184648 - protein, 62 aa, Zea Mays
MPSRSRFSLVATSACTARPDAWPPRLPALSHPKTVASFPSPTPARQFLFVQITLAIDGNFGS

SEQ ID NO: 184649 - protein, 104 aa, Zea Mays
MAHKGKATSDVTYNLDDGPEAYTNPAVYSRLHDYTAMAQEVHGPDYDPSTEPIDPDVLMRVGGGKRHGRYWIADGAIDSSSTPTLSQVRARSTGSSPAIRPRHD

SEQ ID NO: 184650 - protein, 79 aa, Zea Mays
MKMLAIESKQDGVLSQAFGVLCDMVVPQKLKGKFYRTMISLLRRMMQNVGLQKDIMQISVAKICMLHYIYGHTRNRVRN

SEQ ID NO: 184651 - protein, 62 aa, Zea Mays
MKQHAMKLKASHSCNQHYNFTPSNLDAAIHQHQCLKTTLFYEGVICTKHNPYQLQQLILIKW

SEQ ID NO: 184652 - protein, 102 aa, Zea Mays
MDTNLEVSCLMLACMEPELQMQFETNHEVHDMIVALKDMFQTQARTERFNVSKAFLECKLAEGAAVGPHVIKMVGYSQRLEKLGFPISQELATDFILASLPP

SEQ ID NO: 184653 - protein, 117 aa, Zea Mays
MPMPCVPALRSRPHDGITSISPRPGGWGWVGRAWHVNLSSSLFFSFFFSKRSGSLPSRVVGRNVTACDSSSCSRRGGLALVVVAVMSCMAPSSIRFLLVCLRFSGLVSNIWFDRPIV

SEQ ID NO: 184654 - protein, 77 aa, Zea Mays
MIPTPQTSQIACETSPLQCRAFPAWIFRARRRLPQEATSSSARCPLWHLVEATSRAAGVHRSGQVGPGLDRLPEPLV

SEQ ID NO: 184655 - protein, 106 aa, Zea Mays
MADQSCVHIRELGSRAVNLPATFSSFSFRPTAHRARREEGKPPQGSFAPLSPSPLVLRQLLLQAWGRKIAAVPLRIYQQRCRNCSSGRPPCLRPAPHHGLGTFAAE

SEQ ID NO: 184656 - protein, 51 aa, Zea Mays
MNAYKCNAYVLCLHTSKGMKPHRTPPRATYDAKLYRYGRTIGYDQTSDANE

SEQ ID NO: 184657 - protein, 61 aa, Zea Mays
MQGEPKAALIEKRKEPPPRHPTAPERHLIPQAGIQRLAGGREEPFPLQIFKTTPSLGACGK

SEQ ID NO: 184658 - protein, 53 aa, Zea Mays
MHCIFVYIKHTHTHTRSAVRSENGNPGALPHLGSPLFSMLPADTDCAARNCDV

SEQ ID NO: 184659 - protein, 64 aa, Zea Mays
MQSRFGGFHALWLQIDPDHNASSAPKKKFLHPTSARLLARMTLAPSLCAAMASLPDLNVLEKKE

SEQ ID NO: 184660 - protein, 75 aa, Zea Mays
MFSRSNPLHSSHPSSIVVGNGCTLSITSVGALVLPGPFYLNDVLVAPHITHSLLSIRRFTINNSCSIEFDPSGFL

SEQ ID NO: 184661 - protein, 78 aa, Zea Mays
MSCSWAPTLSPRPPSSSPSSPAPAQRPSTASWPTAWQRPPGYANCYTSSTAPFSAPPLSIATTSAWSTSPPISCIISA

SEQ ID NO: 184662 - protein, 88 aa, Zea Mays
MSLNGIPIGTWKCLRDIAILWQWLTKLEKAYDKTPRNIMSWALEKHKVPAKYIGLIKDIYRNVVISVRTIDGDTNDFPIRIGLHQKQL

SEQ ID NO: 184663 - protein, 112 aa, Zea Mays
MLVPGLVVITRRLLIRQATFLTDLWREASDGDVATMLCDHWRTTGRKSGRVEIQRRLQDATHVCKRLQGSFLPTTEVEDARPVVVWNLDGIRDDLTRNDDLFTFIAERSAFI

SEQ ID NO: 184664 - protein, 73 aa, Zea Mays
MAKLTSHSHIIEACAETEPKRMRGLNETANVKDLFCIISYIYILNFRGVFSGVGAGAPSTSLLLALLSISTDR

SEQ ID NO: 184665 - protein, 52 aa, Zea Mays
MRQTDEVPYSSEADLPNAWMATDRHGPPVGARQWLGCTGQLVIWAETKSLSP

SEQ ID NO: 184666 - protein, 84 aa, Zea Mays
MITKITLGSSFSPSFLPSSSLQTPMEDSHPHDGHQAERLYLDEEEVGGDRVEGWRCNHLGKKERDWGSCKSGRERGGAAKGVGE

SEQ ID NO: 184667 - protein, 64 aa, Zea Mays
MLTEIQRVPRSSEGARRNTTSDDEFRSPQRLTPPQSATSASPATPRGSQTCCRSSFVGRGRGRR

SEQ ID NO: 184668 - protein, 175 aa, Zea Mays
MQELEGFSLLLLGRGQRLPADVPAHRYPSPIPHRSSDHNIWYQLAWVSIRSHAFCCQFCGIVLATGAPISMDRPTCHLRHVVLATGVPISMGCAACHLRHAILATGVPISMGSIACQFCHHILDADMPIFRDNAKFRNIIFVDSVSVPMGDATRGNHGSTITSSIDGGLVDQHKG

SEQ ID NO: 184669 - protein, 71 aa, Zea Mays
MALHPWLPAVVIDEHAQSKQPKHSKVSVFSSYFCLIQNPNPPQRSPIPIKKKGATKWVVIAREPSTGYYGK

SEQ ID NO: 184670 - protein, 80 aa, Zea Mays
MDRRIFGPGIDKNPARPCPSLLLVFFFFFLMARIRSNPIAHTYFNRAHALFSSSHLLSCANRCGCHSCVDSCIAPRPHTH

SEQ ID NO: 184671 - protein, 448 aa, Zea Mays
MKFLRPFLCGYLGVPVPDSSLGIDASDDDLSTMFLHQRCSCHVINLIVKAGLDPIRTYLDDFRTTITFLNASNQRIAAYKSYCMSMAIRPRKFGVDMDVRWNSTYLMIKHLLPHKSTFSVFIKTQYPLNEDGTPLLTDNHWAIAEKVLSFLELFYESTVALSGVYYPTATLMLHHILRIARHLNAFENDILLRCAVVPMKDKFLKYWRDIPILYAVAFILDPRAKMRGFNKVLIKLSSLTGTDYSRLPFDVRTKLTKVFQLYETKFGDTRMRGAHQPSSHLSGKKKMAWDDIYGDDDLDGEFSTPLGRRSGSSSSTPQAISTVASTSELASYLDSDTITEFDEDFNVLSWWHQHKLTYPILSLLAKDVLTVPASTISSESTFSLAGRVIEERRRRLAPDMVEISSCVKDWELADGHLQHSVEEDTKELEDEHDNLWLDDPATQSARDD

SEQ ID NO: 184672 - protein, 68 aa, Zea Mays
MHTTLALRFRSAARSCFFFCFFNERGNRIVLQSTCTHIPLALNGALLLAGERSIFGRPRMHAQQVLSF

SEQ ID NO: 184673 - protein, 85 aa, Zea Mays
MPGLRKVSQVMFKTTEMRQPLCFLSPFFCLFSGSILSLSFSFSFFLFFSFFLFLFLFFYITEGEKQGSGVDSVCGVIKREMVAAR

SEQ ID NO: 184674 - protein, 55 aa, Zea Mays
MRDLDKERCRDEVGRSRSSIDEVETQLRFVMATESVLPSGDTSARVGERKSRCAM

SEQ ID NO: 184675 - protein, 424 aa, Zea Mays
MIIYFIYSKQSLLLPSVLLLDPSSFPTTAFQSIPIATQPEASARKSPFPNPHATASLPSPSPPNSIVSKRQSAPSPNPRQAGSQPAMECEPEELQFLGVVGIYRFSAEILRGPHRPLFARIAAAFALPLSALFLLHVAISHALFTHIDSDDTALDASSPGTDTQRRLLSRLASDWLALLLFKSAYLLALLLLSLLSVAASVFSVASVYSAKRDALTFPRVLSVVPRVWRRLAATFLAAFALLFAYHAVAVLVFVGLLVAADNGSGLAGLLAFLVAVAYLLGLVYLGVVWHLASVVSVLEDHKGFAAMRKSKDLIRGKLVTAGAIFFTLNVVFAAVELGFRAWVVRGSGAASSRLLLGLIMLAALCCVVMLALVTQTVVYLVCKSYHHESLDKANISDHLEVYLGDYVPLKASDVQMEQFQPGNL

SEQ ID NO: 184676 - protein, 687 aa, Zea Mays
MEMGMTPDVMYGQNVFVPATATPYQYGYAVGSQMEWCNQSSSLGYDGQDNFYPTEGMQCVYYAAPDNGSVHPTYSSYPSDPSFVPDGSFMPQEYVADPANSTCQIAQTSYYIPAVLPYAQDSALGSATTHLHSNSNVAFLPGIPGYAATSANAAFPLIAPVTTKSDIVMHPHVQSTIVPSKQFQDYAKPPKVQLHNSVPQKQELPDRCMIPAKLPHASQVSAHLSGNNCLGCAAGSDLRKWAAAEKFQPSSKSSGHLNATGQKAHSLVDSEKPSNQRPAIIVKSHTTRLPVGNPDGTIVIRTDQYNRDDLRLDYMYAKFFVIKSIGEADVHKSIKYGVWSSSSSGNSKLDSAFRDADRISRRHSTKCPVFLFFSVNGSGHFCGMAEMVGPVDFHKDMDFWCQDKWTGCFPVRWHIVKDIPNGSLQHITLQNNENKPVTHSRDTQEVPYLPGMSVINIFKDIKVRYCLFDDFMSYEAEEAQKRAHRRCKLSSNAPDFVPVSQRTKDESGTEQRESRSVLVDRTSGIQNAAEKPHDTKVIKPQDPCVSEEQASEAEKENGPQGCRCSGNQGQEEAAKTATNHPPASGLKAAGAEGKQQQQRWKKVENPKQHADSVPAQCSQEEAPEKRLNGVSGCSSAVQEGCEEQRAAAKLASLKIGSRAAVEADRKTSAVGVVTIGSMPVRVDCCDV

SEQ ID NO: 184677 - protein, 278 aa, Zea Mays
MAHLLENILPRMQAGRECWNTRPPCIRVDAFALIIRHSLTRTNRFGFLPVYSGSSSVSPQANQPASVTITVHIPQALRFGFQHPWHPYPQVSCKLIISYLHKWKQFGPRKHAVVSMASRFAPCICSLFVRWPPVPADPHQEYLCSARLALCLWISQPLRRLVAHVPWISELLLPWIFFRAAASLPEALHLVRHEPVHHGAPITATEPAAARWRLGKRSVSCCTIPSALLPAALSRFWHVVSVASRVLILHSCCKIHHFNIDGGSSKAPGREESYMAPN

SEQ ID NO: 184678 - protein, 1596 aa, Zea Mays
MCSDMDQRDHHATREAAPEANGYHHSPHGVDQSQVVDADKHINHHSTDDNAPSSASGHRHGGISRHASTSSVDDRSIKSGDDSDGAESTNGRSSNTEISFLENDTVWIPPQAADKEDEAQSFATSIAYDDDDDDYSDGIKWGQSSFPSPGKQHDAGTSNHREVREKAMLEAMNGQLKILVSRFLASVGIPSSNEEASDSWLDIVTSLSWEAALLIKPDGSMGKEMDPGSYIKVKCIASGTRRQSEVIKGLVFKKNAAHKHMPTNCHNPRLLLVKGVLGHSDVGLSSFNSMGQEKDLLERAIGKIMEICSPNVVLVEKTVSRNIQELLLKEGVTLIFDLKLNRLQRIARCTGSPIISFSEVLDKPKLKQCDYFHIGKFTEEHNNASEGGKMTSKTLMFLEGFPCPLGCTILLKGANSEELKKVKQVMHFTVFAAYHLILETSFFEDQRVFLNDSTTKETSATATEGTYGVAALSGPIPNFPSHDDSPALRLFHATSNSYADVNKPLISPRNVDKFSAVSSSSSNDLEQGANVRSNNAERLTLPVQGPLRKLFADMLCHQNIYLPVTSLQEANDNRKEVRVESSQETVSNGFHRPKTGESVISIENGESINDAQTQEITQAIMPTGSSVSDKDAESPVMGDNGAHSTTSIIIKEKHADGDQADDALDSHSILILMSSQCTEKQVICEQSHLTRIKYYGSFDVSLGRYLQDILQNQKLSCSSCGEPPESHMYSYTHRNGNLTVLVKRLVPKHYLPGESEGKIWMWTRCSRCDHEHGVSKPTPRVLISAEARNLSFGKFLELSFSSHSAARRLSICGHLVNRDCLRFFGLGSKVAMFRYSPVEIYTTCKPQPTLQFVNPIRQDWFEGQRRNVHAKSMALFSGVARFLQNLKNEHPDAITLAVNCGLTLPVKDFTELEELLIKEKAQFESSLDKATDENGKPFGSVHGVLNINWYYQDLLLKLYIWDRRLYQLFYCKSVQLESCSNYKNPAGTVDGNCDDNFGVDKKIGEITSDEITAALGVSSTMESASNKLDHQSGDTTALLLHKSQEAGHSEFPCNGGSKAEESSIAHGQIKVDGTTETTNDPCFEISNDMEVQANLTVADPIPMEQERCSTPQQFKYPYWDDRERWIWNSFSESQMAYRDDIEIGYLGKFELINNYLPHYLSPLFEQHDDSYSPQFAVGPGSNILCIMEDEISSIIARALAISDERHHLIDLKFENGMDYSKGEYAKAIEKSFSFLSESSFSSSPWSSTDSEASLSSLSSFSSDDFSGYDSSSLLSPMHPEMTVNGKVTLKDKYSVTVVYDNQFFALRKKCCPSELAYITSLSRCKKWNAQGGKSKAYFAKTTDDRFIIKQIKKTEFESFIKFAPDYFKHVYHSLDTGSQTCLAKILGIYQVKQIKHGKEVKIDLMVMENLLFGHNISRIYDLKGATFSRRITDSNDHDTVYLDQNYVEDMGFSPIYIGGRTKHLLQRAIWNDTAFLTSVNVMDYSLLVGVDKEKHELVFGIIDYLRQYTWDKQLETWVKTSLVVPKNVLPTVISPKEYKKRFRKFMAKYFLSVPDTWSPDNPSKPCKSLGQSNRKLAEVQNGDNLSEHPNEVEGCA

SEQ ID NO: 184679 - protein, 1569 aa, Zea Mays
MCSDMDQRDHHATREAAPEANGYHHSPHGVDQSQVVDADKHINHHSTDDNAPSSASGHRHGGISRHASTSSVDDRSIKSGDDSDGAESTNGRSSNTEISFLENDTVWIPPQAADKEDEAQSFATSIAYDDDDDDYSDGIKWGQSSFPSPGKQHDAGTSNHREVREKAMLEAMNGQLKILVSRFLASVGIPSSNEEASDSWLDIVTSLSWEAALLIKPDGSMGKEMDPGSYIKVKCIASGTRRQSEVIKGLVFKKNAAHKHMPTNCHNPRLLLVKGVLGHSDVGLSSFNSMGQEKDLLERAIGKIMEICSPNVVLVEKTVSRNIQELLLKEEVLDKPKLKQCDYFHIGKFTEEHNNASEGGKMTSKTLMFLEGFPCPLGCTILLKGANSEELKKVKQVMHFTVFAAYHLILETSFFEDQRVFLNDSTTKETSATATEGTYGVAALSGPIPNFPSHDDSPALRLFHATSNSYADVNKPLISPRNVDKFSAVSSSSSNDLEQGANVRSNNAERLTLPVQGPLRKLFADMLCHQNIYLPVTSLQEANDNRKEVRVESSQETVSNGFHRPKTGESVISIENGESINDAQTQEITQAIMPTGSSVSDKDAESPVMGDNGAHSTTSIIIKEKHADGDQADDALDSHSILILMSSQCTEKQVICEQSHLTRIKYYGSFDVSLGRYLQDILQNQQKLSCSSCGEPPESHMYSYTHRNGNLTVLVKRLVPKHYLPGESEGKIWMWTRCSRCDHEHGVSKPTPRVLISAEARNLSFGKFLELSFSSHSAARRLSICGHLVNRDCLRFFGLGSKVAMFRYSPVEIYTTCKPQPTLQFVNPIRQDWFEGQRRNVHAKSMALFSGVARFLQNLKNEHPDAITLAVNCGLTLPVKDFTELEELLIKEKAQFESSLDKATDENGKPFGSVHGVLNINWYYQDLLLKLYIWDRRLYQLFYCKSVQLESCSNYKNPAGTVDGNCDDNFGVDKKIGEITSDEITAALGVSSTMESASNKLDHQSGDTTALLLHKSQEAGHSEFPCNGGSKAEESSIAHGQIKVDGTTETTNDPCFEISNDMEVQANLTVADPIPMEQERCSTPQQFKYPYWDDRERWIWNSFSESQMAYRDDIEIGYLGKFELINNYLPHYLSPLFEQHDDSYSPQFAVGPGSNILCIMEDEISSIIARALAISDERHHLIDLKFENGMDYSKGEYAKAIEKSFSFLSESSFSSSPWSSTDSEASLSSLSSFSSDDFSGYDSSSLLSPMHPEMTVNGKVTLKDKYSVTVVYDNQFFALRKKCCPSELAYITSLSRCKKWNAQGGKSKAYFAKTTDDRFIIKQIKKTEFESFIKFAPDYFKHVYHSLDTGSQTCLAKILGIYQVKQIKHGKEVKIDLMVMENLLFGHNISRIYDLKGATFSRRITDSNDHDTVYLDQNYVEDMGFSPIYIGGRTKHLLQRAIWNDTAFLTSVNVMDYSLLVGVDKEKHELVFGIIDYLRQYTWDKQLETWVKTSLVVPKNVLPTVISPKEYKKRFRKFMAKYFLSVPDTWSPDNPSKPCKSLGQSNRKLAEVQNGDNLSEHPNEVEGCA

SEQ ID NO: 184680 - protein, 268 aa, Zea Mays
MFPGKTLRKTNVKKKKATPKPEDGTKADKSADKPSSSTQADLPDELEAEKAIRKSTRTSVIVRQAEREAIRAEKEATAKPIKRKKEGEEKRMTQEEMLLEAAETEIMNMRNLERVLAREEEVKKKAVVHKDTYEGPTIRFFSRDGESRLEFINGASFGSELCTTSSPYPEKPVCVVTGLPAKYRDPKTGLPYATMEAFKIIRESFLKEEADRKRPNMSNMGELFESITGGHLMPKKRRVEIRSPNMLGGSRHGGRTWRIPAFDMVDED

SEQ ID NO: 184681 - protein, 256 aa, Zea Mays
MDAGDDEPPVLLDRAARASRGKRITKLLEDEVEQDEAFWNQEALKDEENDDNYVEEPDAGDEFDSDFGEDESETDDEPEKEVRERLPIKKRLMFPGKTLRKTNVKKKKATPKPEDGTKADKSADKPSSSTQADLPDELEAEKAIRKSTRTSVIVRQAEREAIRAEKEATAKPIKRKKEGEEKRMTQEEMLLEAAETEIMNMRNLERVLAREEEVKKKAVVHKDTYEGPTIRFFSRDVLCSIRGITSGIHKWSIIWV

SEQ ID NO: 184682 - protein, 277 aa, Zea Mays
MDAGDDEPPVLLDRAARASRGKRITKLLEDEVEQDEAFWNQEALKDEENDDNYVEEPDAGDEFDSDFGEDESETDDEPEKEVRERLPIKKRLMFPGKTLRKTNVKKKKATPKPEDGTKADKSADKPSSSTQADLPDELEAEKAIRKSTRTSVIVRQAEREAIRAEKEATAKPIKRKKEGEEKRMTQEEMLLEAAETEIMNMRNLERVLAREEEVKKKAVVHKDTYEGPTIRFFSRDGESRLEFINGASFGSELCTTSSPYTVIRRQGCLMQLWKHLK

SEQ ID NO: 184683 - protein, 266 aa, Zea Mays
MRGGTLQINWHDQQPVLSLDFHPVSRRLATAGADHDVKIWEVASDGKLPTATFKTGLVPNTTAHSSAVNVLRFSPSGEYLASGADGGGITLWKLHPADDGEAWKIHKTLLFHHKDVLDLQWSHDSTFLVSASVDNTCIIWEASKGTVQQKLEGHLHYVQGVAWDPLGQYIASLSSDRTCKIYAKKPQGKSKNAERLNFVCQHTLVKVEYQNHDESKPPTKSHLFHDETLPSFFRRLAWSPDGSFLVLPAGLSKHSSEAFDTTPWGK

SEQ ID NO: 184684 - protein, 385 aa, Zea Mays
MRGGTLQINWHDQQPVLSLDFHPVSRRLATAGADHDVKIWEVASDGKLPTATFKTGLVPNTTAHSSAVNVLRFSPSGEYLASGADGGGITLWKLHPADDGEAWKIHKTLLFHHKDVLDLQWSHDSTFLVSASVDNTCIIWEASKGTVQQKLEGHLHYVQGVAWDPLGQYIASLSSDRTCKIYAKKPQGKSKNAERLNFVCQHTLVKVEYQNHDESKPPTKSHLFHDETLPSFFRRLAWSPDGSFLVLPAGLSKHSSEVINTAYVMSRRDLSRPSIQLPGASKAIVAVRFCPVLFKPRGSNSDGFFKLPYRVVFAVATLNSLYVYDTESVPPILVHAGLHYAAITDIAWSSDAKYLAVSSRDGYCTIIEFENEELGQPHILPACMC

SEQ ID NO: 184685 - protein, 504 aa, Zea Mays
MRGGTLQINWHDQQPVLSLDFHPVSRRLATAGADHDVKIWEVASDGKLPTATFKTGLVPNTTAHSSAVNVLRFSPSGEYLASGADGGGITLWKLHPADDGEAWKIHKTLLFHHKDVLDLQWSHDSTFLVSASVDNTCIIWEASKVQQKLEGHLHYVQGVAWDPLGQYIASLSSDRTCKIYAKKPQGKSKNAERLNFVCQHTLVKVEYQNHDESKPPTKSHLFHDETLPSFFRRLAWSPDGSFLVLPAGLSKHSSEVINTAYVMSRRDLSRPSIQLPGASKAIVAVRFCPVLFKPRGSNSDGFFKLPYRVVFAVATLNSLYVYDTESVPPILVHAGLHYAAITDIAWSSDAKYLAVSSRDGYCTIIEFENEELGQPHILPGSKEVANGNLTPETKKPVCADSMKVDNSANKLKMEASPVAVGVRAPLLPTENIKRTGELAEGNVTCENKEPVTIDSMEVDADDTKGKEATIPVAAEVTPPPAVPAAKNSASSKPAKRRITPIAID

SEQ ID NO: 184686 - protein, 204 aa, Zea Mays
MAAEMVKAATSDKLKEMDWAKNIEICELVAQDPGKAKDVIKSVKKCIGSRSKTTQLFAVMLLEMLLNNCGEPVHRQVIDNGLLPILVKIVKKKTDLPVREKIFLLLDATQTSLGGAKARFPQYYEAYYELVSAGVQFSNRPNVLVTRAEVPVPETRTEPNNESLSTRLTEAQQEVHTQPVPDAREQRMNLCWILSSNVRFRSNE

SEQ ID NO: 184687 - protein, 134 aa, Zea Mays
MAAEMVKAATSDKLKEMDWAKNIEICELVAQDPGKAKDVIKSVKKCIGSRSKTTQLFAVMLLEMLLNNCGEPVHRQVIDNGLLPILVKIVKKKTDLPVREKIFLLLDATQTSLGGAKARFPQYYEAYYELVCLL

SEQ ID NO: 184688 - protein, 662 aa, Zea Mays
MLFSALEDPDTSPGHEQIVFEEEAGSWKGRMSAVVQMRGSIPLFWSQEASRLSPKPDIFVQRYDPTYEATKLHFDDLARRYGHPIIILNLIKTVEKRPREMMLRREYCRAVEYLNQNVPEEKKLRFIHWDFHKFAKSKSANVLGVLGKVAGEALDLTGFYYSGKPKVQKKRLIQLSRTSTARDGSLDIRASSGDLSRLRDGSLDIRASSGDLSRLSSNAEALSSTGFQDMRNQANKQEFLGDTPCYQTGVLRTNCIDCLDRTNVAQYAYGLAALGRQLHAMGLTDVLKIHPDSSIASALMEMYQSMGDALAHQYGGSAAHNTVFPERQGKWKATTQSREFLKSIKRYYSNAYTDGEKQDAINLFLGYFQPQEGKPALWELDTDYYLHVTTAGDDLMSDSYHLSSAPGNNVFVGSGAALNPGTILSPVPACKEDFSRKKLTSFDKLIERTCSSIRNVRLHCDADLKPSGGVGTSGMAPDAAEIQLKSPNWLFGQRKHTETISTARVAPVENVNEGNRDESNVSLCGELIWLSSSVESCEEDIFRRYLAFTTADVENGWYGGTLLYDRDENSGAYRHYSELCQGAVMDPFEHDPEKERHYAEALSVDLGDARVEAEMQAALDDYQVIGSDLSIIPSCGALAEDPSQLTRWIIGDERLLVGAAAQ

SEQ ID NO: 184689 - protein, 333 aa, Zea Mays
MSAVVQMRGSIPLFWSQEASRLSPKPDIFVQRYDPTYEATKLHFDDLARRYGHPIIILNLIKTVEKRPREMMLRREYCRAVEYLNQNVPEEKKLRFIHWDFHKFAKSKSANVLGVLGKVAGEALDLTGFYYSGKPKVQKKRLIQLSRTSTARDGSLDIRASSGDLSRLRDGSLDIRASSGDLSRLSSNAEALSSTGFQDMRNQANKQEFLGDTPCYQTGVLRTNCIDCLDRTNVAQYAYGLAALGRQLHAMGLTDVLKIHPDSSIASALMEMYQSMGDALAHQYGGSAAHNTVFPERQGKWKATTQSREFLKSIKRYYSNAYTDGEKQDAINL

SEQ ID NO: 184690 - protein, 971 aa, Zea Mays
MCAFSAFPLVSSSVGGSGARLDPFRVARAVDGRSQPASERGSRGRAGRHLARWRRKRTTRRWRRPWRSSASTRRARLLAGTQRFYVIGSSREKRWFRVLKIDRSEPSELNVSEDPVWYSLQEVKSLLQRIDEGNRSTGGLAFVTKAYGIAGCIKFLESYYLILVTKRRQIGCICGHAIYCIDESQMITIPHSSVQTDVATSKNELRYKKLLASVDLTKDFFYSYTYPIMQSLQQSVTSAGMKEMPYENLFVWNTFLTEPVRSRCHNTLWTVALVHGHFKQVKLSIFGREINVVLSSRRSRHFAGTRYLKRGVNDHGKVANDVETEQIVFEEEAGSWKGRMSAVVQMRGSIPLFWSQEASRLSPKPDIFVQRYDPTYEATKLHFDDLARRYGHPIIILNLIKTVEKRPREMMLRREYCRAVEYLNQNVPEEKKLRFIHWDFHKFAKSKSANVLGVLGKVAGEALDLTGFYYSGKPKVQKKRLIQLSRTSTARDGSLDIRASSGDLSRLRDGSLDIRASSGDLSRLSSNAEALSSTGFQDMRNQANKQEFLGDTPCYQTGVLRTNCIDCLDRTNVAQYAYGLAALGRQLHAMGLTDVLKIHPDSSIASALMEMYQSMGDALAHQYGGSAAHNTVFPERQGKWKATTQSREFLKSIKRYYSNAYTDGEKQDAINLFLGYFQPQEGKPALWELDTDYYLHVTTAGDDLMSDSYHLSSAPGNNVFVGSGAALNPGTILSPVPACKEDFSRKKLTSFDKLIERTCSSIRNVRLHCDADLKPSGGVGTSGMAPDAAEIQLKSPNWLFGQRKHTETISTARVAPVENVNEGNRDESNVSLCGELIWLSSSVESCEEDIFRRYLAFTTADVENGWYGGTLLYDRDENSGAYRHYSELCQGAVMDPFEHDPEKERHYAEALSVDLGDARVEAEMQAALDDYQVIGSDLSIIPSCGALAEDPSQLTRWIIGDERLLVGAAAQ

SEQ ID NO: 184691 - protein, 731 aa, Zea Mays
MKEMPYENLFVWNTFLTEPVRSRCHNTLWTVALVHGHFKQVKLSIFGREINVVLSSRRSRHFAGTRYLKRGVNDHGKVANDVETEQIVFEEEAGSWKGRMSAVVQMRGSIPLFWSQEASRLSPKPDIFVQRYDPTYEATKLHFDDLARRYGHPIIILNLIKTVEKRPREMMLRREYCRAVEYLNQNVPEEKKLRFIHWDFHKFAKSKSANVLGVLGKVAGEALDLTGFYYSGKPKVQKKRLIQLSRTSTARDGSLDIRASSGDLSRLRDGSLDIRASSGDLSRLSSNAEALSSTGFQDMRNQANKQEFLGDTPCYQTGVLRTNCIDCLDRTNVAQYAYGLAALGRQLHAMGLTDVLKIHPDSSIASALMEMYQSMGDALAHQYGGSAAHNTVFPERQGKWKATTQSREFLKSIKRYYSNAYTDGEKQDAINLFLGYFQPQEGKPALWELDTDYYLHVTTAGDDLMSDSYHLSSAPGNNVFVGSGAALNPGTILSPVPACKEDFSRKKLTSFDKLIERTCSSIRNVRLHCDADLKPSGGVGTSGMAPDAAEIQLKSPNWLFGQRKHTETISTARVAPVENVNEGNRDESNVSLCGELIWLSSSVESCEEDIFRRYLAFTTADVENGWYGGTLLYDRDENSGAYRHYSELCQGAVMDPFEHDPEKERHYAEALSVDLGDARVEAEMQAALDDYQVIGSDLSIIPSCGALAEDPSQLTRWIIGDERLLVGAAAQ

SEQ ID NO: 184692 - protein, 616 aa, Zea Mays
MAAEADDPSLAATLEKFRLYETRARFYVIGSSREKRWFRVLKIDRSEPSELNVSEDPVWYSLQEVKSLLQRIDEGNRSTGGLAFVTKAYGIAGCIKFLESYYLILVTKRRQIGCICGHAIYCIDESQMITIPHSSVQTDVATSKNELRYKKLLASVDLTKDFFYSYTYPIMQSLQQSVTSAGMKEMPYENLFVWNTFLTEPVRSRCHNTLWTVALVHGHFKQVKLSIFGREINVVLSSRRSRHFAGTRYLKRGVNDHGKVANDVETEQIVFEEEAGSWKGRMSAVVQMRGSIPLFWSQEASRLSPKPDIFVQRYDPTYEATKLHFDDLARRYGHPIIILNLIKTVEKRPREMMLRREYCRAVEYLNQNVPEEKKLRFIHWDFHKFAKSKSANVLGVLGKVAGEALDLTGFYYSGKPKVQKKRLIQLSRTSTARDGSLDIRASSGDLSRLRDGSLDIRASSGDLSRLSSNAEALSSTGFQDMRNQANKQEFLGDTPCYQTGVLRTNCIDCLDRTNVAQYAYGLAALGRQLHAMGLTDVLKIHPDSSIASALMEMYQSMGDALAHQYGGSAAHNTVFPERQGKWKATTQSREFLKSIKRYYSNAYTDGEKQDAINLWG

SEQ ID NO: 184693 - protein, 630 aa, Zea Mays
MAAEADDPSLAATLEKFRLYETRARFYVIGSSREKRWFRVLKIDRSEPSELNVSEDPVWYSLQEVKSLLQRIDEGNRSTGGLAFVTKAYGIAGCIKFLESYYLILVTKRRQIGCICGHAIYCIDESQMITIPHSSVQTDVATSKNELRYKKLLASVDLTKDFFYSYTYPIMQSLQQSVTSAGMKEMPYENLFVWNTFLTEPVRSRCHNTLWTVALVHGHFKQVKLSIFGREINVVLSSRRSRHFAGTRYLKRGVNDHGKVANDVETEQIVFEEEAGSWKGRMSAVVQMRGSIPLFWSQEASRLSPKPDIFVQRYDPTYEATKLHFDDLARRYGHPIIILNLIKTVEKRPREMMLRREYCRAVEYLNQNVPEEKKLRFIHWDFHKFAKSKSANVLGVLGKVAGEALDLTGFYYSGKPKVQKKRLIQLSRTSTARDGSLDIRASSGDLSRLRDGSLDIRASSGDLSRLSSNAEALSSTGFQDMRNQANKQEFLGDTPCYQTGVLRTNCIDCLDRTNVAQYAYGLAALGRQLHAMGLTDVLKIHPDSSIASALMEMYQSMGDALAHQYGGSAAHNTVFPERQGKWKATTQSREFLKSIKRYYSNAYTDDFWGIFNHKKENQLFGSWILITIFM

SEQ ID NO: 184694 - protein, 271 aa, Zea Mays
MLCKNDNCSKQAHENSIHCKLHSGGVNKGCMARGCTRGAHGGTPLCIGHGGGRRCVVPGCPNAACGQGRSDRCVRHGGGKRCKFEGCAKGAQGNTDHCIRHGGGRRCRFQGCTKSAQGRTDFCIKHGGGSRCRFQGCGASAKWGTDLCSVHRKSLLGGDNAIPEALAAPSEKRRRAKTPQREAKPSEVFQENVTTAATAGNSTQHTGFLLVAAPVANRDILTNGMAVTGQAAIAPQRIVAPMFMRSPTPSGSVAASAQRWEAGASRGMLGL

SEQ ID NO: 184695 - protein, 414 aa, Zea Mays
MAMSASSSSRALLRRIGGALLRRSFSSSSAASAGYHVAGGPSYMRGAVFWEPGRPLTLEEFRMPRPKAGELLIKTKACGVCHSDLHVLKGELPFSTPCVVGHEITGEVVDHGTHTPVEIINRFPVGSHVVGAFIMPCGNCFYCVKGQEDLCESFFAYNRAKGTLYDGETRLFLRGKPVYMYSMGGLAEYCVVPANALAVLPDSLPYTESAILGCAVFTAYGALRHAAEMRPGDSVAVIGVGGVGSSCLQIAKAFGASQVIAVDVLDEKLQNATTLGATHTVNAAKDDAVERIKEITDGRGVDVAIEALGKALTFSQCAKSVRDGGKAVMIGLAATNVMGEVDITRLVRRQVKIIGSYGARARQDLPQIVKLAESGAFNLQNTISRKCKFEEANGAYEDLNQGKIVGRAVVEIME

SEQ ID NO: 184696 - protein, 305 aa, Zea Mays
MAMSASSSSRALLRRIGGALLRRSFSSSSAASAGYHVAGGPSYMRGAVFWEPGRPLTLEEFRMPRPKAGELLIKTKACGVCHSDLHVLKGELPFSTPCVVGHEITGEVVDHGTHTPVEIINRFPVGSHVVGAFIMPCGNCFYCVKGQEDLCESFFAYNRAKGTLYDGETRLFLRGNGKPVYMYSMGGLAEYCVVPANALAVLPDSLPYTESAILGCAVFTAYGALRHAAEMRPGDSVAVIGVGGVGSSCLQIAKAFGASQVIAVDVLDEKLQNATTLGATHTVNAAKDDAVERIKGCRCGYRGTW

SEQ ID NO: 184697 - protein, 825 aa, Zea Mays
MDNLSPSTLLNSITCLGALTSDVSTVRPKPVQKYCKNVYDISSIVNPLLEDLCKSPEEQLNEVLRDLDTAVNEASGLIGNWHQTTGKICFGWQIESVISDIQGCSLQLCQLVHSLLPSLTARACTCIEDINYEHLFDLVKEVAMELAETGAVSSENLLKLSSLLSLSTNMELYMEAVSLENLRTRALRSENREELELAEQMIPLVNYMHDHLLREKQQLSINGVPIPPDFCCPLSLELMSDPVIVASGQTYERVYIKLWLDEGFTICPKTRQRLGHSNLIPNYTVKALIANWCESHDIRLPDPIKSLKLNFPSAASSLQDLSAAGGSPLHPTLVSRSNIPGSPEADVHLRNLNGASSPRSLANQNSHVHANRPGHEVSTSQTSENANGSAPDVSRLSLAGSETRESSMEAKRAGSIGQMSEHSTDEAFQSSNLDRNLQDNLASSSLNGSLPNSGQLDGECDNGVTRVPSDRTNYSSDASGEVTDGGAAPVASSVPQREHLIPARLGTRQFIRRQPSDRGFPRIISSSTMDTRSDLSAIENQVRKLIDDLKSDSIDVQRSAASDLRSLAKHNMENRIVIANCGAVNVLVGLLHSPDAKTQEHAVTALLNLSINDNNKIAIANADAVDPLIHVLETGNPEAKENSAATLFSLSVVEENKVRIGRSGAIKPLVDLLGNGTPRGKKDAATALFNLSILHENKARIVQADAVQHLVELMDPAAGMVDKAVAVLANLATIPEGRNAIGQARGIPALVEVVELGSARGKENAAAALLQLCTNSNRFCSIVLQEGAVPPLVALSQSGTPRAREKAQALLSYFRSQRHGNSARR

SEQ ID NO: 184698 - protein, 742 aa, Zea Mays
MKLQGWQIESVISDIQGCSLQLCQLVHSLLPSLTARACTCIEKLQDINYEHLFDLVKEVAMELAETGAVSSENLLKLSSLLSLSTNMELYMEAVSLENLRTRALRSENREELELAEQMIPLVNYMHDHLLREKQQLSINGVPIPPDFCCPLSLELMSDPVIVASGQTYERVYIKLWLDEGFTICPKTRQRLGHSNLIPNYTVKALIANWCESHDIRLPDPIKSLKLNFPSAASSLQDLSAAGGSPLHPTLVSRSNIPGSPEADVHLRNLNGASSPRSLANQNSHVHANRPGHEVSTSQTSENANGSAPDVSRLSLAGSETRESSMEAKRAGSIGQMSEHSTDEAFQSSNLDRNLQDNLASSSLNGSLPNSGQLDGECDNGVTRVPSDRTNYSSDASGEVTDGGAAPVASSVPQREHLIPARLGTRQFIRRQPSDRGFPRIISSSTMDTRSDLSAIENQVRKLIDDLKSDSIDVQRSAASDLRSLAKHNMENRIVIANCGAVNVLVGLLHSPDAKTQEHAVTALLNLSINDNNKIAIANADAVDPLIHVLETGNPEAKENSAATLFSLSVVEENKVRIGRSGAIKPLVDLLGNGTPRGKKDAATALFNLSILHENKARIVQADAVQHLVELMDPAAGMVDKAVAVLANLATIPEGRNAIGQARGIPALVEVVELGSARGKENAAAALLQLCTNSNRFCSIVLQEGAVPPLVALSQSGTPRAREKAQALLSYFRSQRHGNSARR

SEQ ID NO: 184699 - protein, 171 aa, Zea Mays
MVSFDKLSKYHEDPTTEELAKTLNCWSSMNYYITGCKYVLMPWKFNECYALFVIDHGKKHITFIDFTPTQDWCKHMPYKRVNTSYPVLQAMVMWGNGRRMEFVRDAKILRRNFVIDLLGYEDNSSTKLSISLQRNRLVYGCRYIVRFHIYQSCLHSCNSEVGQLLLRQQRC

SEQ ID NO: 184700 - protein, 123 aa, Zea Mays
MGRKRKELLSSAPWRTGEAAEDEDAARMSREGKVSVTSNPGETPTMSMPRSKRQDLDLTVDDFEEDEIDPELRYSFQRNSRFLKRVFSVDTLVKPLPPVMAYSVSRNINFFFRIFTQFWANWN

SEQ ID NO: 184701 - protein, 204 aa, Zea Mays
MLHSVLREPASFQEAHYMLGLSLVNSQRLSEGIKSLEKSLELGRGAHPASYMVEEIWQELSKAKYIEWESLSRDRTCQLQKLKVACKEALTSYNSLDNPAAGAPVEQLNELEEVFKKAAKTDTPAEVPDHLCCKITLDIFRDPVITPSGITYERAVLLDHLQTVGRFDPVTREALEPHQLVPNLAIKEAVHAFLSEHGWAYKIR

SEQ ID NO: 184702 - protein, 622 aa, Zea Mays
MDALQMRGKIILVDLAGSEKVEKTGAEGRVLDEAKTINKSLSALGNVINALTTGKQNHVPFRDSKLTRILQDSLGGNSRAALLCCCSPSPSNAAESLSTLRFGTRTKLIKAPPKLIPESVDNTKKPAVETHDQDDLRDRILSKLRLSLKEEDVDLLEELFVQEGIIFDASSVVDIDSVFRDTASEEISLLMQAVEELKETVEELTDENEKLRRSLQVAQEMTTQAQLAAAAAVAGAARSRTLLDFVPAVLFRPFGKLKIFVGSSTGQDAHVAPHPTVPGSHSPSRRAVSLSPQTPLLLSFSIHLSTVTMATATTSAYHCNAVLHLPRPPQFRRLLPPLPSLVTRRAASVGLGVARLGSRARARASSVPPPPPFFETVEEEEEEEEERGWSDAEAGFSDEAEDEQEWSGGNGAARGEDLGADAGEDLSGWARQWPRPRELFVCNLPRRCDVQDLLELFTPHGTVLSVEISRDAESGISRGTASVTMRSLAEARAAIDALDGFDMDGREVFVKLASDVISNRKNVNLAHITPTKDHIFETPHKVYVGNLAWSVQPQDLRELFTQCGTVVSTRLLTDRKGGRNRVYGFLSFSSAQELEEALKLDRTVFFGRDIVVKEAHVERQTR

SEQ ID NO: 184703 - protein, 280 aa, Zea Mays
MNLASSRSHCLYIFSVQYGCTSDERVTTGKIILVDLAGSEKVEKTGAEGRVLDEAKTINKSLSALGNVINALTTGKQNHVPFRDSKLTRILQDSLGGNSRAALLCCCSPSPSNAAESLSTLRFGTRTKLIKAPPKLIPESVDNTKKPAVETHDQDDLRDRILSKLRLSLKEEDVDLLEELFVQEGIIFDASSVVDIDSVFRDTASEEISLLMQAVEELKETVEELTDENEKLRRSLQVAQEMTTQAQLAAAAAVAGAARSRTLLDFVPAVLFRPFGFVPE

SEQ ID NO: 184704 - protein, 489 aa, Zea Mays
MSNVTVCVRFRPLSHKERKANGDNVCFKRLDSESFVLKDEREEDVVFSFDKVFYEDAQQSDVYNFLAVPIVSDAINGINGTIITYGQTGAGKTYSMEGPSILHCNEQKTGLVQRVVDELFICLGSSASTWTVKLSMVEIYLEKVRDLLDLSKDNLQIKESKTQGIYISGATEISILNSSDALENLSQGIANRAVGETQMNLASSRSHCLYIFSVQYGCTSDERVTTGKIILVDLAGSEKVEKTGAEGRVLDEAKTINKSLSALGNVINALTTGKQNHVPFRDSKLTRILQDSLGGNSRAALLCCCSPSPSNAAESLSTLRFGTRHASQPVSHLYRIVLIKAPPKLIPESVDNTKKPAVETHDQDDLRDRILSKLRLSLKEEDVDLLEELFVQEGIIFDASSVVDIDSVFRDTASEEISLLMQAVEELKETVEELTDENEKLRRSLQVAQEMTTQAQLAAAAAVAGAARSRTLLDFVPAVLFRPFGFVPE

SEQ ID NO: 184705 - protein, 439 aa, Zea Mays
MSNVTVCVRFRPLSHKERKANGDNVCFKRLDSESFVLKDEREEDVVFSFDKVFYEDAQQSDVYNFLAVPIVSDAINGINGTIITYGQTGAGKTYSMEVEIYLEKVRDLLDLSKDNLQIKESKTQGIYISGATEISILNSSDALENLSQGIANRAVGETQMNLASSRSHCLYIFSVQYGCTSDERVTTGKIILVDLAGSEKVEKTGAEGRVLDEAKTINKSLSALGNVINALTTGKQNHVPFRDSKLTRILQDSLGGNSRAALLCCCSPSPSNAAESLSTLRFGTRTKLIKAPPKLIPESVDNTKKPAVETHDQDDLRDRILSKLRLSLKEEDVDLLEELFVQEGIIFDASSVVDIDSVFRDTASEEISLLMQAVEELKETVEELTDENEKLRRSLQVAQEMTTQAQLAAAAAVAGAARSRTLLDFVPAVLFRPFGFVPE

SEQ ID NO: 184706 - protein, 478 aa, Zea Mays
MSNVTVCVRFRPLSHKERKANGDNVCFKRLDSESFVLKDEREEDVVFSFDKVFYEDAQQSDVYNFLAVPIVSDAINGINGTIITYGQTGAGKTYSMEGPSILHCNEQKTGLVQRVVDELFICLGSSASTWTVKLSMVEIYLEKVRDLLDLSKDNLQIKESKTQGIYISGATEISILNSSDALENLSQGIANRAVGETQMNLASSRSHCLYIFSVQYGCTSDERVTTGKIILVDLAGSEKVEKTGAEGRVLDEAKTINKSLSALGNVINALTTGKQNHVPFRDSKLTRILQDSLGGNSRAALLCCCSPSPSNAAESLSTLRFGTRTKLIKAPPKLIPESVDNTKKPAVETHDQDDLRDRILSKLRLSLKEEDVDLLEELFVQEGIIFDASSVVDIDSVFRDTASEEISLLMQAVEELKETVEELTDENEKLRRSLQVAQEMTTQAQLAAAAAVAGAARSRTLLDFVPAVLFRPFGFVPE

SEQ ID NO: 184707 - protein, 852 aa, Zea Mays
MSNVTVCVRFRPLSHKERKANGDNVCFKRLDSESFVLKDEREEDVVFSFDKVFYEDAQQSDVYNFLAVPIVSDAINGINGTIITYGQTGAGKTYSMEGPSILHCNEQKTGLVQRVVDELFICLGSSASTWTVKLSMVEIYLEKVRDLLDLSKDNLQIKESKTQGIYISGATEISILNSSDALENLSQGIANRAVGETQMNLASSRSHCLYIFSVQYGCTSDERVTTGKIILVDLAGSEKVEKTGAEGRVLDEAKTINKSLSALGNVINALTTGKQNHVPFRDSKLTRILQDSLGGNSRAALLCCCSPSPSNAAESLSTLRFGTRHASQPVSHLYRIVLIKAPPKLIPESVDNTKKPAVETHDQDDLRDRILSKLRLSLKEEDVDLLEELFVQEGIIFDASSVVDIDSVFRDTASEEISLLMQAVEELKETVEELTDENEKLRRSLQVAQEMTTQAQLAAAAAVAGAARSRTLLDFVPAVLFRPFGKLKIFVGSSTGQDAHVAPHPTVPGSHSPSRRAVSLSPQTPLLLSFSIHLSTVTMATATTSAYHCNAVLHLPRPPQFRRLLPPLPSLVTRRAASVGLGVARLGSRARARASSVPPPPPFFETVEEEEEEEEERGWSDAEAGFSDEAEDEQEWSGGNGAARGEDLGADAGEDLSGWARQWPRPRELFVCNLPRRCDVQDLLELFTPHGTVLSVEISRDAESGISRGTASVTMRSLAEARAAIDALDGFDMDGREVFVKLASDVISNRKNVNLAHITPTKDHIFETPHKVYVGNLAWSVQPQDLRELFTQCGTVVSTRLLTDRKGGRNRVYGFLSFSSAQELEEALKLDRTVFFGRDIVVKEAHVERQTR

SEQ ID NO: 184708 - protein, 802 aa, Zea Mays
MSNVTVCVRFRPLSHKERKANGDNVCFKRLDSESFVLKDEREEDVVFSFDKVFYEDAQQSDVYNFLAVPIVSDAINGINGTIITYGQTGAGKTYSMEVEIYLEKVRDLLDLSKDNLQIKESKTQGIYISGATEISILNSSDALENLSQGIANRAVGETQMNLASSRSHCLYIFSVQYGCTSDERVTTGKIILVDLAGSEKVEKTGAEGRVLDEAKTINKSLSALGNVINALTTGKQNHVPFRDSKLTRILQDSLGGNSRAALLCCCSPSPSNAAESLSTLRFGTRTKLIKAPPKLIPESVDNTKKPAVETHDQDDLRDRILSKLRLSLKEEDVDLLEELFVQEGIIFDASSVVDIDSVFRDTASEEISLLMQAVEELKETVEELTDENEKLRRSLQVAQEMTTQAQLAAAAAVAGAARSRTLLDFVPAVLFRPFGKLKIFVGSSTGQDAHVAPHPTVPGSHSPSRRAVSLSPQTPLLLSFSIHLSTVTMATATTSAYHCNAVLHLPRPPQFRRLLPPLPSLVTRRAASVGLGVARLGSRARARASSVPPPPPFFETVEEEEEEEEERGWSDAEAGFSDEAEDEQEWSGGNGAARGEDLGADAGEDLSGWARQWPRPRELFVCNLPRRCDVQDLLELFTPHGTVLSVEISRDAESGISRGTASVTMRSLAEARAAIDALDGFDMDGREVFVKLASDVISNRKNVNLAHITPTKDHIFETPHKVYVGNLAWSVQPQDLRELFTQCGTVVSTRLLTDRKGGRNRVYGFLSFSSAQELEEALKLDRTVFFGRDIVVKEAHVERQTR

SEQ ID NO: 184709 - protein, 643 aa, Zea Mays
MNLASSRSHCLYIFSVQYGCTSDERVTTGKIILVDLAGSEKVEKTGAEGRVLDEAKTINKSLSALGNVINALTTGKQNHVPFRDSKLTRILQDSLGGNSRAALLCCCSPSPSNAAESLSTLRFGTRTKLIKAPPKLIPESVDNTKKPAVETHDQDDLRDRILSKLRLSLKEEDVDLLEELFVQEGIIFDASSVVDIDSVFRDTASEEISLLMQAVEELKETVEELTDENEKLRRSLQVAQEMTTQAQLAAAAAVAGAARSRTLLDFVPAVLFRPFGKLKIFVGSSTGQDAHVAPHPTVPGSHSPSRRAVSLSPQTPLLLSFSIHLSTVTMATATTSAYHCNAVLHLPRPPQFRRLLPPLPSLVTRRAASVGLGVARLGSRARARASSVPPPPPFFETVEEEEEEEEERGWSDAEAGFSDEAEDEQEWSGGNGAARGEDLGADAGEDLSGWARQWPRPRELFVCNLPRRCDVQDLLELFTPHGTVLSVEISRDAESGISRGTASVTMRSLAEARAAIDALDGFDMDGREVFVKLASDVISNRKNVNLAHITPTKDHIFETPHKVYVGNLAWSVQPQDLRELFTQCGTVVSTRLLTDRKGGRNRVYGFLSFSSAQELEEALKLDRTVFFGRDIVVKEAHVERQTR

SEQ ID NO: 184710 - protein, 816 aa, Zea Mays
MSNVTVCVRFRPLSHKERKANGDNVCFKRLDSESFVLKDEREEDVVFSFDKVFYEDAQQSDVYNFLAVPIVSDAINGINGTIITYGQTGAGKTYSMEVEIYLEKVRDLLDLSKDNLQIKESKTQGIYISGATEISILNSSDALENLSQGIANRAVGETQMNLASSRSHCLYIFSVQYGCTSDERVTTGKIILVDLAGSEKVEKTGAEGRVLDEAKTINKSLSALGNVINALTTGKQNHVPFRDSKLTRILQDSLGGNSRAALLCCCSPSPSNAAESLSTLRFGTRHASQPVSHLYRIVLIKAPPKLIPESVDNTKKPAVETHDQDDLRDRILSKLRLSLKEEDVDLLEELFVQEGIIFDASSVVDIDSVFRDTASEEISLLMQAVEELKETVEEALQLTDENEKLRRSLQVAQEMTTQAQLAAAAAVAGAARSRTLLDFVPAVLFRPFGKLKIFVGSSTGQDAHVAPHPTVPGSHSPSRRAVSLSPQTPLLLSFSIHLSTVTMATATTSAYHCNAVLHLPRPPQFRRLLPPLPSLVTRRAASVGLGVARLGSRARARASSVPPPPPFFETVEEEEEEEEERGWSDAEAGFSDEAEDEQEWSGGNGAARGEDLGADAGEDLSGWARQWPRPRELFVCNLPRRCDVQDLLELFTPHGTVLSVEISRDAESGISRGTASVTMRSLAEARAAIDALDGFDMDGREVFVKLASDVISNRKNVNLAHITPTKDHIFETPHKVYVGNLAWSVQPQDLRELFTQCGTVVSTRLLTDRKGGRNRVYGFLSFSSAQELEEALKLDRTVFFGRDIVVKEAHVERQTR

SEQ ID NO: 184711 - protein, 516 aa, Zea Mays
MRCTEEDMEEFKSIVAYVIELATCDLNYDVRDRARLLSRLLPCYMTHQGSSHQPQNGDIYKELANHIFNGKLQPTSHPASNYRIYLPGSLSQVVLHAAPGYAPLPKPQSMELNHNVTAAIRGKAKLSGSDSDAESGSSTYESSSVYDSESEGAGLSDRDTVESHQAQEDNQDAPLVQIYDASIQQGQAGQNTEENLADLISTDLTELMSKSALESWLDEAPAEPVVQNLTQTSSARVSFTNRNFERKPKLHTLLDPSGSNGLSVLYAFSPEVSPRSRLLVCVDLYFENVTTQQLTDITIESEEASSSVDFIDQTSEGYSGVPTIVPVEGIHSLAPQQMAKLVLQVHFHHHILPLKLSVFCNGKRHPAKLHPDIAYFVRPLPMDLNTFLCKENQLRGMFEYARRCAFKDHLQKLGHEDSAEHIDKNLQVAQSVASKILSNANIHLVSMDMPVTFSVDDASGLCWRFSGEILSTSKPCLITILAEGRASGPLDLAVKVNSEDTVFALNLLNRVVAIID

SEQ ID NO: 184712 - protein, 591 aa, Zea Mays
MFGLQASGAAASWVVGRMGTDAHLYDDPDDASIPELLDSRFDADKVDALKRLLALIAQGVDVAHLFPQVVKNVASQSLEVKKLVYLYLLHYADKRQNEALLSINIFQKDLSDINPLVRAWALRTMAGIRLHVVAPLVLVAIKKCARDPSAYVRKCAAYALCKLCDLIPDENAALEEIVDTLFSDNSPGVVGAAAVAFKSVCPSCLPLVSKHFRRLCETLPDIEEWTQIVLIEILLRYVIARHGLVKDSLLFASDLPTEIHGVTDSDAVASVPTQSDSIVNGVSDTISSIMLFRHYIEQCSGSSDREGNNLELSSVTANNNDDVTILLKCTSPLLWSRNSGVVLAAASVHWIMAPIGDMKKIVGPILFTLRSSPDAAYVMLGNIVVFVKTMPSLFAPFYEDFFVNTSDPYQTRALKLEILTTIATESSIPAIFEEFQDYIKDPDRKFVADTVAAIALCAQKLPSIATSCLEGLLALVFYESFISNSVHLDGEDAVLVQAILSIKAIVKMDPVSHEKVIVRLVRGLDKLKEPAARSLIIWMFGEYSFMGDLTTKIVPPVLKYLAWSFVAEVVETKLQILNSSAKKKTWKNSKA

SEQ ID NO: 184713 - protein, 71 aa, Zea Mays
MKSRRTGDEVITDEERGGGGSANRRLEGEGTGSFGDDAEDEVVVLLADGGEDVAEVGDGDGAGAVLVEDAE

SEQ ID NO: 184714 - protein, 255 aa, Zea Mays
MQGGRGGRQGLFGFGDPFVGFGSFGQPGNIMSGFFGGANPFDDPFFTNPFGGMMQPSFSTPFSGMMQPSFMNPFGSMMQPSLLGSSMFASHGNLNGGTFGSQTHLNQGMSNASGFIQQASESSRPKGPIIKELSSDDEDKPEDDKEDGKKNGNFRKHPRESREPCVEDPDEEEEEDNKRPKHRQFGRELSRSGTSRLQPQTFMFQSSTVTYGGPNGACYTSSTTRKTGANGMSLVGLKNHGKEMPGRICLAGILE

SEQ ID NO: 184715 - protein, 272 aa, Zea Mays
MQGGRGGRQGLFGFGDPFVGFGSFGQPGNIMSGFFGGANPFDDPFFTNPFGGMMQPSFSTPFSGMMQPSFMNPFGSMMQPSLLGSSMFASHGNLNGGTFGSQTHLNQGMSNASGFIQQASESSRPKGPIIKELSSDDEDKPEDDKEDGKKNGNFRKHPRESREPCVEDPDEEEEEDNKRPKHRQFGRELSRSGTSRLQPQTFMFQSSTVTYGGPNGACYTSSTTRKTGANGVSIYHHLMNVFLHLPQFIPSPDPTRGSFGTGSPPFFCIFVG

SEQ ID NO: 184716 - protein, 562 aa, Zea Mays
MHPPTHMRARAPIGNSGPDSLSYFIPLHPLLGVWTMHGERERERESLLLLPDRSAGAMEGGGEHHHPLSVFLRDARLAFRWDELGQEIMRIAVPGALALMADPVASLVDTAFIGHIGPVELGAVGVSIAVFNQVSRIAVFPLVSVTTSFVAEEDAMSNGRDNDKIHQQNERNVSVSEMDELIPPEGASASTSISSFETDSCEVSVEQKRKNIPSVSTALLLGGVLGLLETLLLVLSAKPILGYMGVKPDSAMMKPALQYLVLRSLGAPAVLLSLAIQGVFRGFKDTKTPLYATVAGDAINIVLDPIFMFVFQYGVSGAAIAHVISQYFIASILLWRLRLHVDLLPPSFKHLQFGRFLKNGFLLLARVIAATCCVTLSASMAARLGSTPMAAFQICLQTWLACSLLADGLAFAGQAILASAFARKDYPKATATASRILQLALVLGLLLSILLGVGLRIGSRLFTSDQGVLHHIYIGIPFVCLTQPINALAFVFDGINYGASDFGYAAYSMVLVAVVSIICILTLESYGGFIGIWIALVIYMSLRMFAGFWSCSVAASRMLTMV

SEQ ID NO: 184717 - protein, 441 aa, Zea Mays
MHPPTHMRARAPIGNSGPDSLSYFIPLHPLLGVWTMHGERERERESLLLLPDRSAGAMEGGGEHHHPLSVFLRDARLAFRWDELGQEIMRIAVPGALALMADPVASLVDTAFIGHIGPVELGAVGVSIAVFNQVSRIAVFPLVSVTTSFVAEEDAMSNGRDNDKIHQQNERNVSVSEMDELIPPEGASASTSISSFETDSCEVSVEQKRKNIPSVSTALLLGGVLGLLETLLLVLSAKPILGYMGVKPDSAMMKPALQYLVLRSLGAPAVLLSLAIQGVFRGFKDTKTPLYATVAGDAINIVLDPIFMFVFQYGVSGAAIAHVISQYFIASILLWRLRLHVDLLPPSFKHLQFGRFLKNGFLLLARVIAATCCVTLSASMAARLGSTPMAAFQICLQTWLACSLLADGLAFAGQMHLLSFGLFLINRDHTSTGHTCKCICS

SEQ ID NO: 184718 - protein, 389 aa, Zea Mays
MHPPTHMRARAPIGNSGPDSLSYFIPLHPLLGVWTMHGERERERESLLLLPDRSAGAMEGGGEHHHPLSVFLRDARLAFRWDELGQEIMRIAVPGALALMADPVASLVDTAFIGHIGPVELGAVGVSIAVFNQVSRIAVFPLVSVTTSFVAEEDAMSNGRDNDKIHQQNERNVSVSEMDELIPPEGASASTSISSFETDSCEVSVEQKRKNIPSVSTALLLGGVLGLLETLLLVLSAKPILGYMGVKPDSAMMKPALQYLVLRSLGAPAVLLSLAIQGVFRGFKDTKTPLYATVAGDAINIVLDPIFMFVFQYGVSGAAIAHVISQFSATCTSYCRNLLCDTIRFNGRTARFNSNGCIPDLLANLVGLLTSCRWIGFCWTSHTCKCICS

SEQ ID NO: 184719 - protein, 258 aa, Zea Mays
MVLVVPPSLMLYHMYGGTFCRYFIASILLWRLRLHVDLLPPSFKHLQFGRFLKNGFLLLARVIAATCCVTLSASMAARLGSTPMAAFQICLQTWLACSLLADGLAFAGQAILASAFARKDYPKATATASRILQLALVLGLLLSILLGVGLRIGSRLFTSDQGVLHHIYIGIPFVCLTQPINALAFVFDGINYGASDFGYAAYSMVLVAVVSIICILTLESYGGFIGIWIALVIYMSLRMFAGFWRIGTAQGPWAYLRG

SEQ ID NO: 184720 - protein, 386 aa, Zea Mays
MDELIPPEGASASTSISSFETDSCEVSVEQKRKNIPSVSTALLLGGVLGLLETLLLVLSAKPILGYMGVKPDSAMMKPALQYLVLRSLGAPAVLLSLAIQGVFRGFKDTKTPLYATVAGDAINIVLDPIFMFVFQYGVSGAAIAHVISQYFIASILLWRLRLHVDLLPPSFKHLQFGRFLKNGFLLLARVIAATCCVTLSASMAARLGSTPMAAFQICLQTWLACSLLADGLAFAGQAILASAFARKDYPKATATASRILQLALVLGLLLSILLGVGLRIGSRLFTSDQGVLHHIYIGIPFVCLTQPINALAFVFDGINYGASDFGYAAYSMVLVAVVSIICILTLESYGGFIGIWIALVIYMSLRMFAGFWRIGTAQGPWAYLRG

SEQ ID NO: 184721 - protein, 578 aa, Zea Mays
MIDDEANFGNILDASEEVQVTAKFRPKERPKPRKTALSSRSAAPNPTEETGDRKVGTFNQVNSSKELTCQERTSLMCPSTESVDIIAGSQGILDTPLEDALAVPQGSLPGASAAGRTSQYGEHNDDPSKLATHQENLVVSDINVPPNSSCGKAIDDIVEFEDMCDVQIEEERVTKFQPKAQTKLLKEIAKSRKTNQKVETSTVDVVTQNGKGNNIQTRLHGNQVQDPKSHESVQIPDSEELLATDNSKGCNLAKLNNVLEESVQEETIAKFRSDLQPKPRKASSHVAAIKINVAAVAPIVGVCDSNNDMYREPKDQETITGPVVWSPQAVHADVDLDNHNEPINPPIDGTQSMIGEVPSTAFTGREKGKSKSVSFALSDASGVATPIDTNSEMGNIGDSCSDKLTDENLSNSSRHIAEKHSITKDQYSNGQDHEREPLDHAVQQQPKSDVGERASSMKRRCRKKVQKVGTPNHTVDDYFGEDCVEPSLAEEDNNTGDDYTTGNNHKARKKSRGGVEESQQQKVQKNKSKVSSRGRKRTLKDETAEKPEKKLTHRIRQRITKDKTHEAKRITSQVVTRS

SEQ ID NO: 184722 - protein, 138 aa, Zea Mays
MIQQLFPDKTRHQVRQKFKSEERKNPLLVHDAITHRSGDNLYFKKVIKQLNIEDVVLPDIKSTQKQDGASSERGPGNENVLDDLYGEENSSNWLNEEHDVQMADVEEEHGEQMDDVEEEHDLGNDGGDDDLGDVFAWY

SEQ ID NO: 184723 - protein, 60 aa, Zea Mays
MSLIQQDALPATPRAPSLSPLVSSNLCAYSTVQELLQAAVVVVVVIGPPGLLTAHCWSSR

SEQ ID NO: 184724 - protein, 414 aa, Zea Mays
MATQARENHRHSFTTKDERSGEGAEDQAIDDWLPITSSRNAKWWYSAFHNVTAMVGAGVLSLPYAMSKLGWGPGIAVLMLSWVVTLYTMWQMVEMHEMVPGKRFDRYHELGQHAFGERLGLWIVVPQQLIVEVGGDIVFMVTGGRSLKKLHDVVVCDAAGSSPTSTPSPASPVSIAAAVMSLSYSTIAWGASVHKGKLPDVDYEVLAAAATASEKALSYMAALGDVAFAYAGHNVVLEIQATIPSTPETPSKKPMWRGVVVAYAMVAACYFPVSLLGYWAFGNQVDDNVLVTLSKPRWLIALANAMVVVHVIGSYQIFAMPVFDMMETVLVKKLHFPPGLALRLIARSTYVAFTTFIAITIPFFGGLLGFFGGFAFAPTTYFACIVLGVVLMVLAPIGALRQIILSAKTYRFYS

SEQ ID NO: 184725 - protein, 408 aa, Zea Mays
MPSGGTPRSTTSPPWSAPACSAFLTPCPSSADGGDARDGPREAVRPVPRARAARVRRAAGPLDRRAAAAHRRGGRGHRVHGHRRQVAEEAPRRGRLRRCRQLPNFNSISGVSGLHRRRCHVTQLLDHSLGSVGAQGQAARRGLRGSGGGGDGVGEGVELHGGAGGRGVRVRGAQRGSGDPGHHPVHAGDPVQEAHVEGRRGRLRHGRRLLLPRLATRVLGLRQPGRRQRPRHAQQAPVAHRPRQRHGRRPCHWQLPDFRDAGVRHDGDGPGEETAFPARPCPPSHCPEHLCRVHDVHSHYHPLLRRAAWFLRRVRLCADNLFPSLRHVACNLQAQKVQSLMVRQLGLHCSWSGPDGPGANRSTPADHPVCQDVPILLVNKLATACSATAGCVSSVVVRTNQIEEDSLL

SEQ ID NO: 184726 - protein, 449 aa, Zea Mays
MAAVQPSVEMTTQQGPPAASYSPARDGGGGRSAEDEEKEKAAAIDNWLPISATRNAKWWYSAFHNVTAMVGAGVLGLPYAMSQLGWGAGITIMLLSWVITLYTLWQMVEMHEMVPGKRFDRYHELGQHAFGDRLGLWIVVPQQLVVEVGVNIVYMVTGGTSLQKFHDVLVCGDAACEGGRKIRLTYFIMIFASCHFVLAQLPNFDSISGVSLAAAVMSLSYSTIAWGASVSKGRVPDVDYGLRATTPPGKVFGFLGALGTVAFAYAGHNVVLEIQATIPSTPEKPSKKPMWKGVVVAYLVVALCYFPVSFVGYWAFGDSVDGDILVTLNRPRWLIALANMMVVIHVIGSYQIYAMPVFDMIETVLVKKLRFPPGLTLRLIARTVYVAFTMFIAITFPFFDGLLSFFGGFAFAPTTYFICIILGVLLMVLAPIGGLRQIIISAKTYKFYQ

SEQ ID NO: 184727 - protein, 372 aa, Zea Mays
MRPARPPTMEMQPPPTAMQGRRSPRPLEESIESWLPISSSRNAKWWYSAFHNVTAMVGAGVLSLPYAMSQLGWEVGVTVLVLLWAITLYTLWQMVEMHECVPGKRFDRYHELGQHAFGERLGLWIVVPQQLVVEVGVNIVYMVTGGTSLKKFHDTVCGDSCTDIKLTYFIMIFASCHFVLSQLPSFHSISGVSLAAAVMSLCYSTIAWVASAHKGRSPDVHYGLRATTAPGKVFGFFGALGDVAFAYAGHNVVLEIQATIPSTPERPSKKPMWKGAIVAYAIVAACYFPASLVGYWAFGNQVNDNVLVSLSKPKWLIALANMMVVVHVIGSYQIFAMPVFDMIEAVLVMKFRFRPSLMLRLISRSAYGLQCS

SEQ ID NO: 184728 - protein, 473 aa, Zea Mays
MGQLFSGQVALAPKGRRAASDAPAGGEGGWSGQDEKPAADDDWLPINARRNAKWWYAAFHNVTAMVGAGVLTLPYAMSELGWGVGVTVLVLSWVITVYTLWQMVEMHECVPGKRFDRYHELGQHAFGEKLGLWIVVPQQLVVEVGLNIVYMITGGQSLQKFHDMVCHGRCRRIKLPYFIMVFASVHFVLSQLPDFHSISSVSLAAAVMSVGYSAIAWTASAAQGKAAEAEADYSLRATTTPGKVFGFLGALGDVAFTYAGHNVVLEIQATIPSTPGKPSKKPMWKGVIVAYVVIVACYLPVVLVGYWAFGNGVDENILITLNRPRWLIAAANMMVVVHVVGSYQVYAMPVFDMIETVLVRKYWFTPGFRLRLIARTVYVALTMFVAITFPFFSELLSFFGGFAYAPTSYFLPCIMWLIIYKPRRFSLSWFTNWICIVIGVLLMVLSPIGGLRQMILKIKTYKFYQDYSGLSHN

SEQ ID NO: 184729 - protein, 535 aa, Zea Mays
MATASVTFKSREDHRKQLELEEARKAGLAPAEVDEDGNEINPHIPQYMSSAPWYLNAEKPSLKHQRKWKSDPNYTKSWYDRGAKLFQANKYRKGACENCGAMTHDKKSCMERPRNVGAKWTNVNIAPDEKVESFELDYDGKRDRWNGYDPSTYTRVIADYEAREEARKKYLKEQQLKKLEEKDTEKDDENAGSEDDEEDGLRIDEAKVDESAQMDFAKVEKRVRTTGGGSTGTVRNLRIREDTAKYLLNLDVNSAYYDPKTRSMREDPLPDADPNDKFYVGDNQNRLSGQALEFKQLNIHAWEAFEKGQDIHMQAAPSQAELLYKSFKVKKEMLKSEHKDKIMEKYGNAASEDAIPRELLLGQSEREIEYDRTGRIIKGQDVSLPKSKYEEDVFINNHTSVWGSWWKDHQWGYKCCKQTIKNSYCTGLAGIEAAEASADLMKANMARKEAAEDEPVQHEEKRLATWGTDVPQDLVLNEKKLQESLKKETARRKEEKDERKRKYNVKFNDEVTAEDMEAYRMKRIHHDDPMKDFLN

SEQ ID NO: 184730 - protein, 249 aa, Zea Mays
MATASVTFKSREDHRKQLELEEARKAGLAPAEVDEDGNEINPHIPQYMSSAPWYLNAEKPSLKHQRKWKSDPNYTKSWYDRGAKLFQANKYRKGACENCGAMTHDKKSCMERPRNVGAKWTNVNIAPDEKVESFELDYDGKRDRWNGYDPSTYTRVIADYEAREEARKKYLKEQQLKKLEEKDTEKDDENAGSEDDEEDGLRIDEAKVDESAQMDFAKVEKRVRTTGGGSTGTVRYVLHCYSENRSCSS

SEQ ID NO: 184731 - protein, 286 aa, Zea Mays
MGGFEDDEPPSKRARASSVESASLPDCFLFSKSANPLGSTMARPLPSQGKEAMVGSKGVIKKEEFVRIISKTLYSLGYEKSGAVLEEESGITLHNPMVNLFREQVIDGNWDNAVVTLNKIGLQDVNIMKSAAFLILEQKFFELLRNDNVMGAMKTLRREITPLGVNRKRVHELSTCMISCSPQQLFLGFSKLGIDSSSSRFKLLEELQKVLPPTVMVPERRLENLVEQALTVQRDACYFHNSVDGLSLYIDHHCGKDQLPSRTLQVKKALAPAAVFAWSAKALHKR

SEQ ID NO: 184732 - protein, 280 aa, Zea Mays
MMVAWSSDDCQLLTCGQEEAIRRWDVKSGKCLHVYEHPGIGLRSCAWFRDGKQILSGLADQTFCIWDLDGKEVDCWKGQRSATTSDFAVAKDGNLIISLSRDNAILLFDRETKHERIIEEGSTITSFSLSEDGDFLLVNLVSEEIHLWNIRNDPVRVNRYNGHKHSRFVIRSCFGGSEQAFIASGSEDSQVYIWHRATGDLIETLAGHSGTVNCVSWNPVNPHMLASASDDHTVRIWGAKVSLKRKDVGSSNCNSNGFHHSNGNAHGNGFAHQCNGNSTK

SEQ ID NO: 184733 - protein, 543 aa, Zea Mays
MGGFEDDEPPSKRARASSVESASLPDCFLFSKSANPLGSTMARPLPSQGKEAMVGSKGVIKKEEFVRIISKTLYSLGYEKSGAVLEEESGITLHNPMVNLFREQVIDGNWDNAVVTLNKIGLQDVNIMKSAAFLILEQKFFELLRNDNVMGAMKTLRREITPLGVNRKRVHELSTCMISCSPQQLFLGFSKLGIDSSSSRFKLLEELQKVLHAHHDEVWFVQFSNNGKYLASASNDKSAIIWEVNEDGELLLRHTLSGHQKSVMMVAWSSDDCQLLTCGQEEAIRRWDVKSGKCLHVYEHPGIGLRSCAWFRDGKQILSGLADQTFCIWDLDGKEVDCWKGQRSATTSDFAVAKDGNLIISLSRDNAILLFDRETKHERIIEEGSTITSFSLSEDGDFLLVNLVSEEIHLWNIRNDPVRVNRYNGHKHSRFVIRSCFGGSEQAFIASGSEDSQVYIWHRATGDLIETLAGHSGTVNCVSWNPVNPHMLASASDDHTVRIWGAKVSLKRKDVGSSNCNSNGFHHSNGNAHGNGFAHQCNGNSTK

SEQ ID NO: 184734 - protein, 80 aa, Zea Mays
MDQDVQRQRDTKGVSCLGTIARFPSHTRRSPASLLALPLSLGSKENFASTGHKIGEHKIQTTCSVHFFLIIVAGSGKSPE

SEQ ID NO: 184735 - protein, 56 aa, Zea Mays
MLLTCHKKRKDLSRGKGAMEGLVVASNGFSKKHMIQITIAAGYQGRVVFGDYCQVP

SEQ ID NO: 184736 - protein, 56 aa, Zea Mays
MLLTCHKKRKDLSRGKGAMEGLVVASNGFSKKHMIQITIVSTTNYATKYTETSSGS

SEQ ID NO: 184737 - protein, 194 aa, Zea Mays
MGGYENGESTAAAALADGGVILGVDGGTTNTVCVCLPAAMTPPESPATVPVLARAVAGCSNRNSVGENAALETLEQVMTQALALANTDRSAVRAVCLAVSGVNHPSDQLRMLEWIRDLFPDNAKNYVENDAVAALASGTMGKLHGCVLIAGTGCIAYGVTEDGKVARAAGAGPVLGDWGPDSSYKSIRWSWATN

SEQ ID NO: 184738 - protein, 271 aa, Zea Mays
MTQALALANTDRSAVRAVCLAVSGVNHPSDQLRMLEWIRDLFPDNAKNYVENDAVAALASGTMGKLHGCVLIAGTGCIAYGVTEDGKVARAAGAGPVLGDWGSGYGIAAQALTAVIKAYDGRGPQTRLTRDILEKLDLSSPDEIIGWTYADPSWARIAALVPVVVSSAEDGDEVANKILHDSVQELADTVIAVVQRLRLCGEDGKDMFPLVLVGGVLEGNKKWDISGEVIKCISKVFPGTDPIWPEVEPAIGAALLAWSHHHKGLKLENGS

SEQ ID NO: 184739 - protein, 209 aa, Zea Mays
MGKLHGCVLIAGTGCIAYGVTEDGKVARAAGAGPVLGDWGSGYGIAAQALTAVIKAYDGRGPQTRLTRDILEKLDLSSPDEIIGWTYADPSWARIAALVPVVVSSAEDGDEVANKILHDSVQELADTVIAVVQRLRLCGEDGKDMFPLVLVGGVLEGNKKWDISGEVIKCISKVFPGTDPIWPEVEPAIGAALLAWSHHHKGLKLENGS

SEQ ID NO: 184740 - protein, 279 aa, Zea Mays
MTTNQMIAAFATATMWTPSATSTANCVRRKSSSGGNSKSNGTMFLREYPIPRNSSAVCIYDTRGWSNDLEKNFKMLHQWMTKGISHGETTMWDDDEGNKIGNMKPLGRQYSFLRYKIRKVNFVLFVVDGVAVLESMDDSNKGYTEILRQTFMYPFLSIGDDKPVVVVTHGDRLSIQQRVHVQAELAELLDIPAQQIYDIPGSDDDQTDMVVLDMLHYCVRHAEQNLPVKLNYHLEVLGHETLNKMAEQLMGLDAVIEVAIIFLCILVLLLRFSDKLVQP

SEQ ID NO: 184741 - protein, 376 aa, Zea Mays
MLCEGEGPKLNPTSPSRAPISHPPARAETQARAKSKVRIQGGRRRPHPPPSTPSSPSSPSESFPPEFVECVAVSPVSDDDESDDCCVCDGDDVDSIRYFNRQLREAKEFIRRYKPGDWIEGVGSAKAGHFVLPEVTTLLLVGPRGSGKSTLVNRITRVFDKDDDPFAPDRAQVSCNSKSNGTMFLREYPIPRNSSAVCIYDTRGWSNDLEKNFKMLHQWMTKGISHGETTMWDDDEGNKIGNMKPLGRQYSFLRYKIRKVNFVLFVVDGVAVLESMDDSNKGYTEILRQTFMYPFLSIGDDKPVVVVTHGDRLSIQQRVHVQAELAELLDIPAQQIYDIPGSDDDQTDMVVLDMLHYCVRHAEQNLPVKLNYHLEV

SEQ ID NO: 184742 - protein, 216 aa, Zea Mays
MRSLSQVRAQEVDAQAGDRARLCPGCIGGRSSRRWWRSRPVLQGLLPWPPPWRTSPAAGSLQVQASSSSSSPPWARNPFPLASPPSAAPFFPKQGAAARPQQRAATLSARARDLPSRRSPWPARAPAAFPPASSGFPLGSPTWPPFSPSAGAWELCPLCPENAELEHNSLLPSMACHSSSSWRPTPCRQAAAPPAPSMAPSSYARPGSIGSCVPHG

SEQ ID NO: 184743 - protein, 50 aa, Zea Mays
MVFSYDDASRSNSHKEKLFSLLVFYLAITKWVLQILPPLKIISSPRFKKN

SEQ ID NO: 184744 - protein, 53 aa, Zea Mays
MSTTGRGRYSVLRIFKGRRGRTGHRAMCGALPAAGPYLRLNRFQGWRAVKQKR

SEQ ID NO: 184745 - protein, 58 aa, Zea Mays
MDWDDVDMAFFLDAFVESRPNGLFPVKPRESLSKSFTLAVGVALPTGDIPAAPRSEVP

SEQ ID NO: 184746 - protein, 179 aa, Zea Mays
MDSPRGAALSLSLTEENVQLLFGRGVSPTNEMTAPRCEEEDWSLACIGQDDRVTFGTSGNCNPSEYVDWDSIEVEDRWTEEGRQNVTSEQALYIQLGLHNEDVFESAQREEESARHVRWSNRDFLDGEASAAIPCSDSVVDEERIVYDMNNPVKKKTFLNFPSGNFPSHHRAKLRKKPS

SEQ ID NO: 184747 - protein, 55 aa, Zea Mays
MFMHLKSTNPKPPWSFGRQTVSQSTKWYFLVAQPPCQSSLFLYMSIFFRTRLGAG

SEQ ID NO: 184748 - protein, 126 aa, Zea Mays
MEPCGRRRWARRWRTAGGGRRRGRRACASSTPGCTRRRSRSPSSGEPRSRTTTTARAPTPGRGSSRRTWTTASTRSCRRPPTPTATRTSAGAGRACCIGTRTRQQREERKNNKLVAIIGGWFGIWQ

SEQ ID NO: 184749 - protein, 654 aa, Zea Mays
MCELMEELLEHSLEASANPMKVVEYVQKESPLIAVVLKAHMHCEACAEGIRKRILNMKGVQSVEPDLKASEVAVMSKKVRRVEAVVAELECRNSELFGEKGELEEKLVAAKEVLARLTAMTREQEARVFARRRESDLVKEKEAVAKALDAEKAEVARLRLKIEELEKCSGEKDGDIRKMKPAYFANYAHMGEEKGTGRRIGTGVRRDGLWFIGHEESALRAVAERDVKEILLLHCRLGHISFETLRRLHPAMFKGVDKSRLVCDACELGKHTRSIYPSIGLRSCEPFTMIHSDVWGPCSVTSVNGAKSFVTFIDCCTRMTWIYILKHKNEVFQCFQDFHKLVANQFNARVRIIRTDNGTEYVNNEFRSYISDQGIIHQTTCPGTPPQNGVAQRKNRHLLEVARSLMFRMNVPKYLWSEAVMTATYLINRMPSRILDMKSPAELLLGNQNFRVPPKVFGCVCFVKDHRPMASKLDPQAVKCIFVGYASTQKGYKCWDPIGRRLFVSMDVTFREKEPYYTRKVDLDNFLEDFSPVNGRDWREGENDSGQDDDCGQDSDLVSRTSGGVIVGGMVPPEMREVITTEIVSNDERSGGGDQDDPTVNSQEEIKDDEAVIVGTIPCSIGAEVNKKQGEQRPIVYYRRRAKKQGEQPLPEQT

SEQ ID NO: 184750 - protein, 128 aa, Zea Mays
MVGYEICLQLWLTISLLNDALALAGQALLASEYAKGNYKPARVVLYKVLQVGGVIGFLLAASLFVGFGSLSLLFTDDPAVLDVAHSRAWFFVGAVSSIFLLVAAPKFGLDGIWAGLTLFMSLRAVAGF

SEQ ID NO: 184751 - protein, 57 aa, Zea Mays
MTTTEARACCPPCEAWAPTAICPARDSRRRAAPRPRYPPPSSSVRQNLLFVPAHLKP

SEQ ID NO: 184752 - protein, 59 aa, Zea Mays
MCCLSTIPPSDANLTAWVGASGLHFPSRICIGILMPNPLLNDSSCRHILLCLGTSSIYC

SEQ ID NO: 184753 - protein, 60 aa, Zea Mays
MTKDVGTNMEKKMSMIETRRRLLVNTMARKHSMKLRKHSMNLMPVVRKHTLAIRISLMIM

SEQ ID NO: 184754 - protein, 72 aa, Zea Mays
MKGEGERREPRREFRFFNDEARRGGPRCFPIPRGSRPRPRLHRAGDWSIAVGSKGTVTPRPSVGNRIYADEQ

SEQ ID NO: 184755 - protein, 458 aa, Zea Mays
MAAMVCSAVVSETVSKIVSSLLAKDDGKSSAAENIERLEMAHIKMESALHMAEKWQVTDVPLLRWRSKLKRAAEECDGALRRCKQRALEEEEIRQSSFPKRIAHATKSFISSFPAAGASRDETSSGSSDVRRFERFADSSHEFLKFVEVGGTPWKYTFFNPLIGHLLAGKSMKYHAVHMNSSRGLYLGFMLRLSESTDILGVIIRCLQSVTPRLKPTAECVKRELIQLPTQDFSWLPYGLHTKNEYWNNVHCSLTQWYRPNPLCCNEHKNNNNLITSSVIGSTFPEEDKTNLSSAAQHGGTGFQDSDFPPVKVGVLIIPHDSPEDMEPGAETYALEVIAEKEKGMVVHTNACLQDLDEKLLPKAINYLNQNPESKEYQMCFKSRHGTAHLYLEKTSAQMQKGRTSKSKTTKLQARKKRVIPFDSVEIWKQASRDYLKLWVVRASSTLRSLFRSWAGHT

SEQ ID NO: 184756 - protein, 161 aa, Zea Mays
MKMRGEASKASSGSGSGSSEDGERTGPVPSPARRAPPIRIDVAMGSFSACRRHEICPRVSFGSRCPTAVRPPTHRRRSGPLRPLSAAWRHPSSPPPPSPTSPGSSTHCSSPSSCARRSRTGDCGVLVEDARDELKLLALCTKADRFSPYVAWECLIFFLAA

SEQ ID NO: 184757 - protein, 60 aa, Zea Mays
MGTPKLLLLSLKNMRRWCTILSTPSSPTPSLRRLACCHSCVGGTNWLWRRTKTRSRNRTQ

SEQ ID NO: 184758 - protein, 75 aa, Zea Mays
MCFGFKKCTIADFKLRKAMPKTFCELSLAFISLLLPEIVMDCKRVNLDWQKINISLNATTLCLMYCTYQYSDNKI

SEQ ID NO: 184759 - protein, 138 aa, Zea Mays
MDTDKAPHFDGTNYPYWSVRIACHLEAVGLDVWRMTMEATKPHAKPEKLTKAERKEAKLNAIACDAIFGALSLDVFNRVGTLKSAHEIWHMLKDLHDGTSDVKEQRLSLASRAFESFEMLPNELANDMYSRLNIIVNE

SEQ ID NO: 184760 - protein, 147 aa, Zea Mays
MPSDIEVYIADHKGPDPSKPEELCSQACTDRLAEYGQEMVRRHEKDYDRRKAPIDPMVVYATGGRKSHGRYSMFNGVIDSREVRSQRSGSSSERSGARTHRQSEHELEVARVQEEIRQRDAFQRHNMSTLPHSWRSSRPCFKNTQDI

SEQ ID NO: 184761 - protein, 123 aa, Zea Mays
MADVVMYNDGGTATDWDLPTNEIISLRKRIKNIEYIVSETNKSPLSKHSSSSTKNEIDDKESSSTKNSGNVRSTKQKEIDYVYRSIEKKVKVFGRDKVHEDIRCFIMDRLPMHQAPTPVNLIL

SEQ ID NO: 184762 - protein, 840 aa, Zea Mays
MTKRERKDPGRMTSLGSLTKQPNLSWVPPGMDRSSACRIAIRVGAYWEQHRYEYHISRDVLLIRDRDLICFMDLVADLRAEIALETARKLSLHYWDKIEARYKEVDCDATLLHALSMYWEFRRLKLAATVLDEPCIESQHSAVTYTQQNEMPISLVSNANENEVAVPSSSIHVEKEQFAAGTSDQVASNLIHAANSEGAANLEGAANSEGAANSEGVANSEDVANSEGGNAWGQYDEDEYVGADDEKATYKELFSDIEESGSEYIPDSDDEDHDDCVVDDNGDPLFVTTTDLENPNIAVGVRFEDGPTFKKAIRQWAILHEVEIGAHYSESSRYRGFCKAKKCNWRIHASQLPDGKTWQVKKMSKRHYCRSRSKMEKNCMANQYWVRDKVVPMLRENPNLGAGALVKKLQEKYLIQVSYCVAWKGKELALDELMGKWEDSFDHIYAFKAAIEKESPGSVVEIQTEKVGEKIRFCKMFVAFKACIDGFLQGCRPYLGIDSTVLTGRWKGQLASAVAIDGHNWMFPVALGLFESESKDSWKWFMEKLQTAIGSPHGLVISTDAGKGIDSALTNAFNNGVEHRECVRHLFKNFQKRFHGEVFERNLWPAARAYRRTVHDKHYNIMKIASPAAIKWLEDTHKHLWARCYFSTASKCDYVTNNIAETFNCWIKDEKSLPPVELIDRIRQKILEKFFVRKNLADKLTGTILPSVMKQLHDAGRGLVGYVVHKGPDHTAEVSGVHKDLTPWRHTIDLVNRECSCKKWQLTGLPCTHALSVIGCFRNLKLEDYVDSYYSVEKFKTAYVGKIPTLTDKTEWEQPEVGYKVWPPILKRAAGSQGQEGSLE

SEQ ID NO: 184763 - protein, 192 aa, Zea Mays
MEDEAAAAQAQTQAPPVFVVRPRSRELLPPPSSNYEAWDLSDSESAPASSWATLPNRYTVAPRSVGAQGQARSRQPGRAASASRATTGRGMPARYGRGYWRWPAMDSGSSGDPIRGDVLGTAANALISSFQPNPAQSREITALRPTLDATDPPFHRLSSSSPVKMIPQSQSSSLQHLQHVEKRIVRVLELAP

SEQ ID NO: 184764 - protein, 58 aa, Zea Mays
MQICHSILPSALMQTCADGVGTWNPTCNWVRALISETITFTKGITSALIPSLDSISAP

SEQ ID NO: 184765 - protein, 119 aa, Zea Mays
MLMHRPQHEFPHALRPAHVLRVVGGKASLCSILVRAQPPCAAVGCGRGIQASVPASLEAGSGVCGWDRTTHIGVCGGRIEVGTTGDGVRGQLKSGEPGRGGRLGRRFRGAMSRTGVRDQ

SEQ ID NO: 184766 - protein, 235 aa, Zea Mays
MARGGGDRSREDDPFSDGGTTGTDSDESSPRGVGARGPGSTSNPILTRLAVSRNPSPLAAATAAPGVCLLRFAWESAAGSLVGAAVGYGADLGRWGWTPCGLGKGLVTMKGIKGSFADAASSAKIFAVLAGVQSLVACSLRKLRGKDDGVAGCCTGLALSFPGAPQTLIQSCLTFGTFSYIIEKLNKQQPALALPPATGVMDPKAGQSVLPPFTLPPLDAMDEFCSVLVVLMILP

SEQ ID NO: 184767 - protein, 563 aa, Zea Mays
MSGSGDRRGGGPPDSGWETMGKKSKKPGQAGGRQWAPWSSTNVTPNTARPAWGGSGSSHPSGTSWAQAPDHGAATRGNPRPPSQTSRPVLAPPLANGWQWQSRPRPSGSEVKKDDAPPSGSVPEVENVDGNNTSDDDDDDDDDLSDDISDDYDSDASEKSFETRKTNKWFKEFFEVLNTLSLEQINEQTRQWHCPACKNGPGAIDWYKGLQPLVSHARTKGSTRVKLHRELAALLEEELSRRGTSVLPAGEQFGKWKGLQESTDREIVWPPMVIVMNTFLEKDEDDKWKGMGNQELLDYFGEYEASKARHAYGPSGHRDRNSWHLRKVRFVPGGKRQLYGFLANKEDMEAFNKHCHGKSRLKYEMRSYNEMVVIQMKQMSEDNQQLNYLKNKMVKTEQRSKAVEESLGVVTQKLRETIEENIFVRSKAKEKHMEYEEEMKSQEEIFHGLIEDIHKATEDKEKQFEKLLQEERSKARRFDVDSGTMKDRQLRKEYVQKFIDCQVKDVAEFEVERDELIKVHEDKKLKLKKEYMDLELELEKEFDAALTGLMEKHKPDTFEASSS

SEQ ID NO: 184768 - protein, 567 aa, Zea Mays
MSGSGDRRGGGPPGSHSGWETMGKKSKKPGQAGGRQWAPWSSTNVTPNTARPAWGGSGSSHPSGTSWAQAPDHGAATRGNPRPPSQTSRPVLAPPLANGWQWQSRPRPSGSEVKKDDAPPSGSVPEVENVDGNNTSDDDDDDDDDLSDDISDDYDSDASEKSFETRKTNKWFKEFFEVLNTLSLEQINEQTRQWHCPACKNGPGAIDWYKGLQPLVSHARTKGSTRVKLHRELAALLEEELSRRGTSVLPAGEQFGKWKGLQESTDREIVWPPMVIVMNTFLEKDEDDKWKGMGNQELLDYFGEYEASKARHAYGPSGHRGTDRNSWHLRKVRFVPGGKRQLYGFLANKEDMEAFNKHCHGKSRLKYEMRSYNEMVVIQMKQMSEDNQQLNYLKNKMVKTEQRSKAVEESLGVVTQKLRETIEENIFVRSKAKEKHMEYEEEMKSQEEIFHGLIEDIHKATEDKEKQFEKLLQEERSKARRFDVDSGTMKDRQLRKEYVQKFIDCQVKDVAEFEVERDELIKVHEDKKLKLKKEYMDLELELEKEFDAALTGLMEKHKPDTFEASSS

SEQ ID NO: 184769 - protein, 157 aa, Zea Mays
MGRQLESLSRGLGINIPIQITEGNKRPEPPIQAAKFASEGGITLRQHIPIFNHWKEYKKRENEPIIRNYIGKVTANFTVDSESKTVEDACLDMLKSGQRQMRYRLKQKYFNGIPANQVRTTSPIPSMSDNDWRKLVEKWSTPNHKVLAISRRFLHLY

SEQ ID NO: 184770 - protein, 361 aa, Zea Mays
MYCSSFYSAIKRVNCFHRDGYGAAGCNPSGSTYMVVFGLFQLLLSQLPSLHNIAWLSVVAVATSLGYSFISLGLCSAKWASHGGHVRGTLAGAAAVAGRADDDKQAAFNVLLALGNIAFSYTFADVLIEIQDTLRSPPAENRTMKRASAYGLAITTVFYLALGCTGYAAFGDHAPGNILTGFAFYEPFWLVDAANVCVVLHLVGAYQVFAQPIFARLESCVACRWPDAKLINATYYVRVPPCLLLLRTSSSSSPPPTLAVAPLKLVLRTIVIMFTTLVAMLVPFFNAVLGLIGALGFWPLSVYFPVSMHMARLNIRRGEIRWWMLQAMSFVCLLISVAASIGSVHDIVHNLKAAAPFNTAN

SEQ ID NO: 184771 - protein, 355 aa, Zea Mays
MIAIKRVNCFHRDGYGAAGCNPSGSTYMVVFGLFQLLLSQLPSLHNIAWLSVVAVATSLGYSFISLGLCSAKWASHGGHVRGTLAGAAAVAGRADDDKQAAFNVLLALGNIAFSYTFADVLIEIQDTLRSPPAENRTMKRASAYGLAITTVFYLALGCTGYAAFGDHAPGNILTGFAFYEPFWLVDAANVCVVLHLVGAYQVFAQPIFARLESCVACRWPDAKLINATYYVRVPPCLLLLRTSSSSSPPPTLAVAPLKLVLRTIVIMFTTLVAMLVPFFNAVLGLIGALGFWPLSVYFPVSMHMARLNIRRGEIRWWMLQAMSFVCLLISVAASIGSVHDIVHNLKAAAPFNTAN

SEQ ID NO: 184772 - protein, 1075 aa, Zea Mays
MSIAWLPSTNPAAGPLAIAEAVPISISLVQFFSPECTMSALPPAEELDASHQKKRRRRKKHREQVEAIAASSEPPPPPASPESKPKSTIPVAPETLTSAAVRESPRPLGNPESKSESPLLVAPETLASAVMAAAAVRLVKERERKNQVVPPASPLMEEPVWKEEKQRKKRKHVGAALVVPSPPTPDAAQNLRMEAKMMAEGATVRKKQRRLKAGQEQSGEPPFSIDVHPQGGEEATDDGGVGVMVTQCVKRSKSKNSRVLKTQQTLPQARLPPRGHPSSGSSLLTGKETSKAAWTATSNTKQPCPASESTSDSQEEARIEGKEKPEKKMTREMAVRESTRHLAILESMSASSVPVAPETPTSAAMTAATVMQDKECKRENQEALPAAPLIEDPVPKVEKRHKKRKVAQITQMENKVMTEGATVRKKHRRQKVKQEQSGQTPFLNDVYSKAGEEAAAGGVMGSQCVKRIDRSKNSKVLKKQQTLPQGFFPPIANPDFIDQDPNYCSPFGAFFAQFAYKPERRQDGNGSPLPSTTGRTARLPPRGHPLSGSSLLTAKEVSKAARTTTLNTKQPCPASESTSDSQEEARIEGKEKPEKKMTREMAARESPRHLAILESMSASSVPVAPETLTSAMTAATVMQDKERKRENQEALPAAPLIEDPVPKVEKRHKKRKDREAAMIIPSVPTAAVAQITQMEKKVMTEGATVRKKHRRRKVEQEQSGETPFLNDVYSRAGEEAAAGGVMGRQCVKRINRSKNSKVLKKQQTLPQGFFPPIANPDFIDQDPNYCSPFGAFFAQFAYKPERRQDGNGSPLPSTTGRTARLPPRGHPSSGSSLLTAKEVSKAARTTTLNTKQACPASASISSSQEGVRVKGKKKPEEKTTMEKKPRKPPILLSPAEKWSDKYRRLPLDQLVPPPRSPHKLLQEKYASDPWKVIVICMLLNLTQGKQVRKKVKGFFKRYPDAQTAYTADPEKMAEYLAPLGLQRVKTNRIQKFSKAYVGEEWTYITELCGVGKYAADAYAIFCAGRANEVVPKDHKLVDYWNYVCFELPSIQKSQEAGVTELGNLVAKVQEVAVSC

SEQ ID NO: 184773 - protein, 845 aa, Zea Mays
MSIAWLPSTNPAAGPLAIAEAVPISISLVQFFSPECTMSALPPAEELDASHQKKRRRRKKHREQVEAIAASSEPPPPPASPESKPKSTIPVAPETLTSAAVRESPRPLGNPESKSESPLLVAPETLASAVMAAAAVRLVKERERKNQVVPPASPLMEEPVWKEEKQRKKRKHVGAALVVPSPPTPDAAQNLRMEAKMMAEGATVRKKQRRLKAGQEQSGEPPFSIDVHPQGGEEATAAAGGVMGSQCVKRIDRSKNSKVLKKQQTLPQGFFPPIANPDFIDQDPNYCSPFGAFFAQFAYKPERRQDGNGSPLPSTTGRTARLPPRGHPLSGSSLLTAKEVSKAARTTTLNTKQPCPASESTSDSQEEARIEGKEKPEKKMTREMAARESPRHLAILESMSASSVPVAPETLTSAMTAATVMQDKERKRENQEALPAAPLIEDPVPKVEKRHKKRKDREAAMIIPSVPTAAVAQITQMEKKVMTEGATVRKKHRRRKVEQEQSGETPFLNDVYSRAGEEAAAGGVMGRQCVKRINRSKNSKVLKKQQTLPQGFFPPIANPDFIDQDPNYCSPFGAFFAQFAYKPERRQDGNGSPLPSTTGRTARLPPRGHPSSGSSLLTAKEVSKAARTTTLNTKQACPASASISSSQEGVRVKGKKKPEEKTTMEKKPRKPPILLSPAEKWSDKYRRLPLDQLVPPPRSPHKLLQEKYASDPWKVIVICMLLNLTQGKQVRKKVKGFFKRYPDAQTAYTADPEKMAEYLAPLGLQRVKTNRIQKFSKAYVGEEWTYITELCGVGKANEVVPKDHKLVDYWNYVCFELPSIQKSQEAGVTELGNLVAKVQEVAVSC

SEQ ID NO: 184774 - protein, 1103 aa, Zea Mays
MSIAWLPSTNPAAGPLAIAEAVPISISLVQFFSPECTMSALPPAEELDASHQKKRRRRKKHREQVEAIAASSEPPPPPASPESKPKSTIPVAPETLTSAAVRESPRPLGNPESKSESPLLVAPETLASAVMAAAAVRLVKERERKNQVVPPASPLMEEPVWKEEKQRKKRKHVGAALVVPSPPTPDAAQNLRMEAKMMAEGATVRKKQRRLKAGQEQSGEPPFSIDVHPQGGEEATDDGGVGVMVTQCVKRSKSKNSRVLKTQQTLPQGFFPPMANPNSIDQDPNYSSPFGAFFAQFAYKPANIADRPARLPPRGHPSSGSSLLTGKETSKAAWTATSNTKQPCPASESTSDSQEEARIEGKEKPEKKMTREMAVRESTRHLAILESMSASSVPVAPETPTSAAMTAATVMQDKECKRENQEALPAAPLIEDPVPKVEKRHKKRKVAQITQMENKVMTEGATVRKKHRRQKVKQEQSGQTPFLNDVYSKAGEEAAAGGVMGSQCVKRIDRSKNSKVLKKQQTLPQGFFPPIANPDFIDQDPNYCSPFGAFFAQFAYKPERRQDGNGSPLPSTTGRTARLPPRGHPLSGSSLLTAKEVSKAARTTTLNTKQPCPASESTSDSQEEARIEGKEKPEKKMTREMAARESPRHLAILESMSASSVPVAPETLTSAMTAATVMQDKERKRENQEALPAAPLIEDPVPKVEKRHKKRKDREAAMIIPSVPTAAVAQITQMEKKVMTEGATVRKKHRRRKVEQEQSGETPFLNDVYSRAGEEAAAGGVMGRQCVKRINRSKNSKVLKKQQTLPQGFFPPIANPDFIDQDPNYCSPFGAFFAQFAYKPERRQDGNGSPLPSTTGRTARLPPRGHPSSGSSLLTAKEVSKAARTTTLNTKQACPASASISSSQEGVRVKGKKKPEEKTTMEKKPRKPPILLSPAEKWSDKYRRLPLDQLVPPPRSPHKLLQEKYASDPWKVIVICMLLNLTQGKQVRKKVKGFFKRYPDAQTAYTADPEKMAEYLAPLGLQRVKTNRIQKFSKAYVGEEWTYITELCGVGKYAADAYAIFCAGRANEVVPKDHKLVDYWNYVCFELPSIQLCVCCRNRRRLE

SEQ ID NO: 184775 - protein, 479 aa, Zea Mays
MTREMAARESPRHLAILESMSASSVPVAPETLTSAMTAATVMQDKERKRENQEALPAAPLIEDPVPKVEKRHKKRKDREAAMIIPSVPTAAVAQITQMEKKVMTEGATVRKKHRRRKVEQEQSGETPFLNDVYSRAGEEAAAGGVMGRQCVKRINRSKNSKVLKKQQTLPQGFFPPIANPDFIDQDPNYCSPFGAFFAQFAYKPERRQDGNGSPLPSTTGRTARLPPRGHPSSGSSLLTAKEVSKAARTTTLNTKQACPASASISSSQEGVRVKGKKKPEEKTTMEKKPRKPPILLSPAEKWSDKYRRLPLDQLVPPPRSPHKLLQEKYASDPWKVIVICMLLNLTQGKQVRKKVKGFFKRYPDAQTAYTADPEKMAEYLAPLGLQRVKTNRIQKFSKAYVGEEWTYITELCGVGKYAADAYAIFCAGRANEVVPKDHKLVDYWNYVCFELPSIQKSQEAGVTELGNLVAKVQEVAVSC

SEQ ID NO: 184776 - protein, 256 aa, Zea Mays
MGHNAGRTPLIDISNTSVTGDQIGSNSLGPIDDANERKRQRDRERYATMSIEQKNEKNRKHREARQRNTGLPLKSESSRGPIKNTPLAGNSIERKRQRDRERRATMSVEQRNEYNNKRRQMRRRNKGQNVMPDVSGDGDNKVNVDLDDDSDWLHRNETFQTNNYVATTDLLSPGSVHESVGVIGEPSIGVREYRLERLRLYNQTPKRKEAKIEYMRKRRVLQADTLNVASIAMEDPTYTPEVVHPATEPSTVTTCD

SEQ ID NO: 184777 - protein, 65 aa, Zea Mays
MMIATGCIGTRHSRQTTMSQRQTFCHQAVCMNLLVSLGNRVSALGSIGLNALGCIIRHQSEKRQR

SEQ ID NO: 184778 - protein, 175 aa, Zea Mays
MSSSPLITAAASAAVVALAVANRVLYKLALVPLKAYPFFLAQLTTFGYVAVYFSMLYTRYRTGLVTRDMLALPKHRFVAIGLLEALGVFAGMSAGAMLPGPAIPILSQSFLVWQLIFSALLLGRTYSARQVIGCFLVVSGVILAVARCKVNLASTHDRFISISRWCIYSEGSCFH

SEQ ID NO: 184779 - protein, 300 aa, Zea Mays
MSSSPLITAAASAAVVALAVANRVLYKLALVPLKAYPFFLAQLTTFGYVAVYFSMLYTRYRTGLVTRDMLALPKHRFVAIGLLEALGVFAGMSAGAMLPGPAIPILSQSFLVWQLIFSALLLGRTYSARQVIGCFLVVSGVILAVASGADDGQLLSDVKLIWPALMIASSAFHAGASILKEAVFIDGAKRLKGKRPDIFVVNSFGSGFQAVFVFLLLPFLSNLRGIKFAELPAYLNGGAECFLNVAESPIDCGGAPFLPLLFIVVNMAFNVSLLNLVKMSSAIVASLTATSAGPLLFFDP

SEQ ID NO: 184780 - protein, 179 aa, Zea Mays
MIASSAFHAGASILKEAVFIDGAKRLKGKRPDIFVVNSFGSGFQAVFVFLLLPFLSNLRGIKFAELPAYLNGGAECFLNVAESPIDCGGAPFLPLLFIVVNMAFNVSLLNLVKMSSAIVASLTATSAVPISIYILSLPLPYIPHGTELSTSFIIGAVILLMGLILYNLPQSSLKQLKAD

SEQ ID NO: 184781 - protein, 57 aa, Zea Mays
MNFATDQVYIGRTHLPFFESFTRSLLKQGRSTSIAYAVSNQSSQHLSTSLHLRYSTP

SEQ ID NO: 184782 - protein, 258 aa, Zea Mays
MGSIPAAAAGPGTELEDLPEDALLCILVLLAPPDAAAAACSCRRLAAAASSPALPLALALRLGLPPPPPSHPLLPAAPCPADARRLLRSLHRLRRLLGLWRRLPSGSGYASSSLSSPSLAAFEWAPRATLAASFLAPSAHGDVGVSKSPFVTLSIEESGDTVAVVGEVSVCVNFVGNNHIVVEAVVGEDEEFEMVSGSPPEEIYAHFANRRSPGAGRRRRGKQGRKGGGMEAEHFVRIADTEPTKARPLQGLWKTLNP

SEQ ID NO: 184783 - protein, 65 aa, Zea Mays
MNSISQGKHSNMEKFPRSKKQGLDCLQFVFFLLFLFVWILYIFFSIVMHPLAKYHLKQKMDQAKS

SEQ ID NO: 184784 - protein, 135 aa, Zea Mays
MNDAEFAIGLHPNNPELRNQYSEIKALHMEKMAKKVPVLAKRVVPGIDKTVDVTSHPPTISQKDTVMEVDSPLSSRFNEDRASAGGRSNGGSGVIINGNTIHVFISVSFLTIIIPMICGFCVVIPWQARVHLSIK

SEQ ID NO: 184785 - protein, 286 aa, Zea Mays
MEDLYSIHPGISRHGAAATSEASGVAGGPGSPPPPPPPAADLTELVKAQIAGHPRYPSLLSAYIDCRKVGAPSEVATLLEEIGRERCAAASAGGEETYCRLLERYKEELSRPFDEAASFLSSVRTQLSSLCGGAASLSDEMVESSEDEPCSGDTDATTDPGQEHSSRLADRELKEMLLKKYSGCLSRLRSEFLKKRKKGKLPKDARSALMDWWNTHYRWPYPTEEDKVRLAAMTGLDPKQINNWFINQRKRHWKPSEDMRFALMEGGVSGSSSGTTLYFDTGTIGP

SEQ ID NO: 184786 - protein, 168 aa, Zea Mays
MEDLYSIHPGISRHGAAATSEASGVAGGPGSPPPPPPPAADLTELVKAQIAGHPRYPSLLSAYIDCRKVGAPSEVATLLEEIGRERRRTAGCWSGTRRSCRGRSTRRRPSSAASGRSSAPSAAAPPRSPMKWWSPLRTSHAQATQTRRQTQGRSTARAWPTASSRRCC

SEQ ID NO: 184787 - protein, 401 aa, Zea Mays
MAFTVTMLAWSVVEHEAPLAAAGELRNALAAVRWGADYLARAHAAAETLYVQVGDGDSDHSCWQRPEDMDTPRTAYSVDASRPGSDVAAETAAALAAASVAFRQLDAAYSAMLLGHAEQLFSFAKNHRGLYQNSVPGAAKFYASSGDEDEMLWAAVWLFIATGGEDYKAFIAGDGNVGGAQTFFSWDNKFVGAQALVAKLVLQGKLADAGNAAALKSQLEQFLCGVLQHNASDGRLSPGGVLWLEPWNNLQFVTSAAFVVAAHSDHLAGAAASSLRCGAATLPPSQLLAFARSQADYILGANPERMSYMVGYGARFPEQVHHRGASVPSIKSSPGKITCKGGFAYYSRDTPNPNVLVGAIVGGPDGNDRYDDSRPNYKQTEPSTVTVAPMVGVLARLSKQN

SEQ ID NO: 184788 - protein, 59 aa, Zea Mays
MGSRSVILCWAEKPGLGPCGVFFFSFPFSFLFYFLLSFLSFQISNFNFNLNFVAHLYSD

SEQ ID NO: 184789 - protein, 99 aa, Zea Mays
MAGQPLIARRSHKTTTDPPGTAANLNRAPILDFWEVQGAKPKVSQDTDHWRLECGFIPKKPRDSLVRLPGRMGTVDFRPSRSDPEARNGSQPRQIDKRA

SEQ ID NO: 184790 - protein, 726 aa, Zea Mays
MTAIHSAHQHGLHIQNLDHKLNIDNQFEALKCYEMIDRDCRWINATFQSVPTSMGTNMKVDDLVQIESKRASGLVVKGFQVAPPNWVRSSSGLCPVRHPSAGRCRVDGDDPATDGSDQLTQANPLSPGDVLISKDGAFALGFFSAGNYNKSLYVGIWYNKVPEHTVVWVANRDSPVIAPSRAKLAITGKPELVLSDSQGRIRWTTTNSAAAGGADAFAVLLNSGNFVLQTPTGETIWQSFDYPTDTLLLTMRLLLNHKGQVPTRIISWKSPDDPSTGNFSYGIGPNWNLQFFTWYGTLPYSRSNALNDASMSSGMYLSSGASIVYQAIVDTGNRLYYIYTVSEGSPYTRIWLDYTGKMRTQSWNSNTSSWMLVFERPHSSCDLYAQCGPFGFCDSTGDVPTCRCPEGFEPIDGVNYSRGCRRKEALRCGKEDSFVTLPAMKVPDKFLYLRNRSFDQCAAECSRNCSCVAYAYDTLSLGDSNGDTSRCLVWTGDLIDMEKASFHGNLYLRIAGSPVKKKKKSHLTKILLPIIAFVLPLTFTALVWTCKRRGRRQKKKVQKRVMLEYLRSPDEMGDKNIEFPFISFEDIAAATDHFSDSNMLGKGGFGKVYKGVLGGTKEVAVKRLSKGSVQGMEEFKNEAVLIAKLQHKNLVKLIGCCIYEDERLLVYEYLPNKSLDYFLFDSSKKSVLQWTTRHGTCGKMGNQNKWWTHLLWRVIALLMKFRDASK

SEQ ID NO: 184791 - protein, 70 aa, Zea Mays
MLRQREEEEEQESGERGRGGGHAGRVRRLAAGLQAGRGRSEEHGVAVDAGRRGRRRRRRDRVRRPGPPRA

SEQ ID NO: 184792 - protein, 1287 aa, Zea Mays
MTPNTVTNSTKDVLEADGKTFNNEFSIKLDQLGDDPINGLTNILVELMQHNDSCSGDSNGPTSTCKLLQLKESISKEIEKTELQIDSLEGELKSVNTEAVTTLESSPTGVTHTENLSPSGGTSKVPGSAEICDTFDMIKEPGELIVSPKVPVVQDADVKGVDMMEVETAPVRNAKTVPSEESAVTPGVAEGKACAAADLSSLIASEEAGSQNDIDNDRPKTSLCHADSMKIKVSDELPVKQWTYCDHMSDLHSSFTSANNDIAKEMNEVLFKSLPAGTSALDLLASSDLLSQRKIDLIVKERLGVRKTRLRLKEQILTMKFKAYRHLWKEDVRLLSAKKQRLKSNKRIDQNNRTSQIGSQRQRFSNRSRLAMPAGNLSTFSTPEMSDVARKLFSESQIKRCRNYLKMPALIIDEKEKEHLRFLTKNGLVVDPVLVEKERIMINPWTQDEKEIFMEMLAKFGKDFSKISSFITHKTTADCVEFYYKHHKSDSFREVKKLLDLHQQLPASNYLGAKSGQKWNPESNAASLDMLGVASAEAAHDLEYANKVEKISVKSLIRTAYGSNVSFVTKKSSDKECIDNVPLHERESVAADVLAGICGTPSPDGMGSCITSSADPGLKISMKRVEHVLSQENDKNVNEEESLSDQECEFDPVDWNDDEKSIFIEAMNNYGKDFSRISSCVKSKSYEQCKVFFSKARKSLGLDLIHQGAADVSMPASDTNGGRSDTDEACAVEMDSAICRKQSCSKIVQDVCPTEGAILGPDSVLISKQTEGDISNRCIVDVKIEEDDKEADKNCSNVDDKRSSDSTHQAGPININCPESTDKLQGTDDAVDQVNMHSSVLNSSNEHAMAMHSEVRSSLHSVDVLQTDKAEGTGTDPSQVEECSHHAVYTPMTAGNSGSSAFLTSDSGIKDNVHISNMSGASTVSPAFTSNYQHSLPGDMPLSKPKPLVTSLTPKDLMPVQFSSVLPDPTAFRFEGIKPNFEDSSGNKVSSALGAKDICKYPAFKDPSDNEHDTLFRNIDGYMNNHLTTELPVFSQRTASGTVSTSQTKFQNGRSSSVCLPNSSEGIQWPRKPEEVPEDSLRPCARNAKTEGGEKQKRPGDVKLFGQILSHQPTLPSSGSLCNGSQSKPPSPKIDKTSVRLTNNPRDLVVFSSRPGVSPHVGLEERSVRSYGHLDGSTIQPEPLLVMAKCQRSLASVPFYSAKNSTVGVFPDYQQPSMQPHQLDPKPLEMFSDSQKRNGLELVSGFGGAGILVSNVSDHVAALKARYGPGSKIMGSDADPWKDIGSR

SEQ ID NO: 184793 - protein, 1318 aa, Zea Mays
MTPNTVTNSTKDVLEADGKTFNNEFSIKLDQLGDDPINGLTNILVELMQHNDSCSGDSNGPTSTCKLLQLKESISKEIEKTELQIDSLEGELKSVNTEAVTTLESSPTGVTHTENLSPSGGTSKVPGSAEICDTFDMIKEPGELIVSPKVPVVQDADVKGVDMMEVETAPVRNAKTVPSEESAVTPGVAEGKACAAADLSSLIASEEAGSQNDIDNDRPKTSLCHADSMKIKVSDELPVKQWTYCDHMSDLHSSFTSANNDIAKEMNEVLFKSLPAGTSALDLLASSDLLSQRKIDLIVKERLGVRKTRLRLKEQILTMKFKAYRHLWKEDVRLLSAKKQRLKSNKRIDQNNRTSQIGSQRQRFSNRSRLAMPAGNLSTFSTPEMSDVARKLFSESQIKRCRNYLKMPALIIDEKEKEHLRFLTKNGLVVDPVLVEKERIMINPWTQDEKEIFMEMLAKFGKDFSKISSFITHKTTADCVEFYYKHHKSDSFREVKKLLDLHQQLPASNYLGAKSGQKWNPESNAASLDMLGVASAEAAHDLEYANKVEKISVKSLIRTAYGSNVSFVTKKSSDKECIDNVPLHERESVAADVLAGICGTPSPDGMGSCITSSADPGLKISMKRVEHVLSQENDKNVNEEESLSDQECEFDPVDWNDDEKSIFIEAMNNYGKDFSRISSCVKSKSYEQCKVFFSKARKSLGLDLIHQGAADVSMPASDTNGGRSDTDEACAVEMDSAICRKQSCSKIVQDVCPTEGAILGPDSVLISKQTEGDISNRCIVDVKIEEDDKEADKNCSNVDDKRSSDSTHQAGPININCPESTDKLQGTDDAVDQVNMHSSVLNSSNEHAMAMHSEVRSSLHSVDVLQTDKAEGTGTDPSQVEECSHHAVYTPMTAGNSGSSAFLTSDSGIKDNVHISNMSGASTVSPAFTSNYQHSLPGDMPLSKPKPLVTSLTPKDLMPVQFSSVLPDPTAFRFEGIKPNFEDSSGNKVSSALGAKDICKYPAFKDPSDNEHDTLFRNIDGYMNNHLTTELPVFSQRTASGTVSTSQTKFQNGRSSSVCLPNSSEGIQWPRKPEEVPEDSLRPCARNAKTEGGEKQKRPGDVKLFGQILSHQPTLPSSGSLCNGSQSKPPSPKIDKTSVRLTNNPRDLVVFSSRPGVSPHVGLEERSVRSYGHLDGSTIQPEPLLVMAKCQRSLASVPFYSAKNSTVGVFPDYQQPSMQPHQLDPKPLEMFSDSQKRNGLELVSGFGGAGILVSNVSDHVAALKARYGPGSKIMGSDADPWKDIGSSTIPFGSLTCQQRPSATVGSLEVITRCFVSRV

SEQ ID NO: 184794 - protein, 1151 aa, Zea Mays
MIKEPGELIVSPKVPVVQDADVKGVDMMEVETAPVRNAKTVPSEESAVTPGVAEGKACAAADLSSLIASEEAGSQNDIDNDRPKTSLCHADSMKIKVSDELPVKQWTYCDHMSDLHSSFTSANNDIAKEMNEVLFKSLPAGTSALDLLASSDLLSQRKIDLIVKERLGVRKTRLRLKEQILTMKFKAYRHLWKEDVRLLSAKKQRLKSNKRIDQNNRTSQIGSQRQRFSNRSRLAMPAGNLSTFSTPEMSDVARKLFSESQIKRCRNYLKMPALIIDEKEKEHLRFLTKNGLVVDPVLVEKERIMINPWTQDEKEIFMEMLAKFGKDFSKISSFITHKTTADCVEFYYKHHKSDSFREVKKLLDLHQQLPASNYLGAKSGQKWNPESNAASLDMLGVASAEAAHDLEYANKVEKISVKSLIRTAYGSNVSFVTKKSSDKECIDNVPLHERESVAADVLAGICGTPSPDGMGSCITSSADPGLKISMKRVEHVLSQENDKNVNEEESLSDQECEFDPVDWNDDEKSIFIEAMNNYGKDFSRISSCVKSKSYEQCKVFFSKARKSLGLDLIHQGAADVSMPASDTNGGRSDTDEACAVEMDSAICRKQSCSKIVQDVCPTEGAILGPDSVLISKQTEGDISNRCIVDVKIEEDDKEADKNCSNVDDKRSSDSTHQAGPININCPESTDKLQGTDDAVDQVNMHSSVLNSSNEHAMAMHSEVRSSLHSVDVLQTDKAEGTGTDPSQVEECSHHAVYTPMTAGNSGSSAFLTSDSGIKDNVHISNMSGASTVSPAFTSNYQHSLPGDMPLSKPKPLVTSLTPKDLMPVQFSSVLPDPTAFRFEGIKPNFEDSSGNKVSSALGAKDICKYPAFKDPSDNEHDTLFRNIDGYMNNHLTTELPVFSQRTASGTVSTSQTKFQNGRSSSVCLPNSSEGIQWPRKPEEVPEDSLRPCARNAKTEGGEKQKRPGDVKLFGQILSHQPTLPSSGSLCNGSQSKPPSPKIDKTSVRLTNNPRDLVVFSSRPGVSPHVGLEERSVRSYGHLDGSTIQPEPLLVMAKCQRSLASVPFYSAKNSTVGVFPDYQQPSMQPHQLDPKPLEMFSDSQKRNGLELVSGFGGAGILVSNVSDHVAALKARYGPGSKIMGSDADPWKDIGSR

SEQ ID NO: 184795 - protein, 257 aa, Zea Mays
MSEPNSGSDVVSMKCKAEKVDGGYVLNGNKMWCTNGPSAQTLVVYAKTDLAAGSKGITAFIIEKGMPGFSTAQKLDKLGMRGSDTCELVFENCFVPCENVLGEEGKGVYVMMSGLDLERLVLAAGPIGLMQACLDVVLPYVRQREQFGRPIGEFQFIQGKMADMYTSLQSSRSFVYSVARDCDNGKVDRKDCAGVILFAAENATQVALQAIQCLGGNGYINEYPTGRLLRDAKLFEIGAGTSEVRRMIIGRELFKED

SEQ ID NO: 184796 - protein, 185 aa, Zea Mays
MRGKEDDTRRYSYNSPPLHYPLRSLSALLRIRPAPTGDAAVAPGAPPPRGARRRRGAAPRHVLPPLRRHAGAVQGERAQVRAGGHRAARRGHRRLQPLPAGRGPVEAHGRLQPPRPHRARGVRRDGARVHVPLHRHGGDHQGIRRRRPLLRRALQPLHQPARPARKPGAEAQVSAQVGSISGHWR

SEQ ID NO: 184797 - protein, 142 aa, Zea Mays
MSLNTVLPTQPRARLRCRDRHRPARNRQGEVGLWWRSATTSSSRSAMMGSDTASHDLVTVGAALVPPHGRFSLSWEAALAGGACERSRSGGPQDLRRPLRPDNLDLYIWSVLFHSFPPSQPQLRTSHRRPRGGRSARAPWDL

SEQ ID NO: 184798 - protein, 108 aa, Zea Mays
MSLNTVLPTQPRARLRCRDRHRPARNRQGEVGLWWRSATTSSSRSAMMGSDTASHDLVTVGAALVPPHGRFSLSWEAALAGGACERSRSGGPQDLRRPLRPDNLDLYI

SEQ ID NO: 184799 - protein, 64 aa, Zea Mays
MHLKEFSNINCLTAKGQVKLIYQQLVDRLQDYRHRNSNLTHQKVLRQQLSYIYAKFTYFRINFS

SEQ ID NO: 184800 - protein, 252 aa, Zea Mays
MHQHHASRSRSPCPSSSAAARPRTEDFPVDIVSDEEMALIDAALAAAAAGARPLLSAAARRAAVPLSRAACSATDGLAAGDIEDAPPRSRLARFRERRALAVTDITATEWCEKQMEFVLERGKPEKTAAMRVGSDRHAQLEQEVVERVDVAIRSAEELWAVKFMNFIVGTNQLLFEGITREIPVIGVVEGSWISGIIDEIQMATVGVSLQPMLVDTKTRSTRTVPSEAQKRNGRFAPYICFPNHFTVCSPEE

SEQ ID NO: 184801 - protein, 223 aa, Zea Mays
MFSVIVMKLNLTTGIIPSLNVSAGLLGFFFVRMWTAAAERMGFLRQPFTRQENTVIQTCVVSAYGITFSGGFGSYLFEMSEKIAKQATTVYHGGTNFGRTGASYVLTGYYDEAPMDEYGMYKEPKFGHLRDLAQRNKVISKSIPLGQHSSEILGHWYEAHIFELPEEKLCLSFLSNNNTGEDGTVIFRGDKHYVPSRSVSIIWGYRGGGEPNTKTSAHARAVF

SEQ ID NO: 184802 - protein, 82 aa, Zea Mays
MLRLRWRAVLPPLPLPPLPGLLRRLPPHRRALSSSSGSIPLPPPVMEASYKFGPYKIDAREVFHATPLSYAMVNLRPLLPGG

SEQ ID NO: 184803 - protein, 83 aa, Zea Mays
MQSKYGNVRSPPRSHFISPGLLRQQHAKRSYPNPNTGIGTNNESSSRKRAMKAMGNVNQPKVAYDNLEDECVNLESKKWGLKI

SEQ ID NO: 184804 - protein, 184 aa, Zea Mays
MNQDAPTSKRDYFEDRRDCARASNAEDLMNATKNGVLNSHTRRDDYEEGRDSARAPNSENYEEGRDCTRASNAKNIVNATKKAQIQEQMLSDPSLSNAQLMDKCFPSKRQDHIIGYGGGVKARHLRSPSVSKAELLEKLKQSEDEKRAMLEENRELREENRATNSRGSRKISFINVSWVSGRRM

SEQ ID NO: 184805 - protein, 511 aa, Zea Mays
MELDLNVAEVAPEKPSAALEASDSGSSGSSVLNAEAASAGGGGPAPGEEGSSSTPAVLEFSILRSDSDAAGADADDGDATPSPPRHHQQQLVTRELFPAPQHWAELGFFRAGPQQQPDIRVLPHPHPYPPPPPPAQPQQAKKSRRGPRSRSSQYRGVTFYRRTGRWESHIWDCGKQVYLGGFDTAHAAARAYDRAAIKFRGVDADINFNLSDYDDDMKQMKSLSKEEFVHALRRQSTGFSRGSSKYRGVTLHKCGRWEARMGQFLGKKYIYLGLFDSEVEAARVEYRLDIRFSLPFRDPRAYDKAAIKCNGREAVTNFEPSTYDGELLLTAEASAEVADDVDLNLSISQPASSQSPKRDKNCLGPQLHHHHGRPFDGSAVLKKTKIDAPSELSSAGRPHRSFLPHLVAAEHLPPRSHPFFITHHESDASRRDPSWAAAAAWKVTAAAPPPPTTTLLPLPLPSTSSAAASSGFSNTATTAAAAPSAASSRRFDPPPPSSSSSSSHHHHHHRR

SEQ ID NO: 184806 - protein, 479 aa, Zea Mays
MELDLNVAEVAPEKPSAALEASDSGSSGSSVLNAEAASAGGGGPAPGEEGSSSTPAVLEFSILRSDSDAAGADADDGDATPSPPRHHQQQLVTRELFPAPQHWAELGFFRAGPQQQPDIRVLPHPHPYPPPPPPAQPQQAKKSRRGPRSRSSQYRGVTFYRRTGRWESHIWDCGKQVYLGGFDTAHAAARAYDRAAIKFRGVDADINFNLSDYDDDMKQMKSLSKEEFVHALRRQSTGFSRGSSKYRGVTLHKCGRWEARMGQFLGKKAYDKAAIKCNGREAVTNFEPSTYDGELLLTAEASAEVADDVDLNLSISQPASSQSPKRDKNCLGPQLHHHHGRPFDGSAVLKKTKIDAPSELSSAGRPHRSFLPHLVAAEHLPPRSHPFFITHHESDASRRDPSWAAAAAWKVTAAAPPPPTTTLLPLPLPSTSSAAASSGFSNTATTAAAAPSAASSRRFDPPPPSSSSSSSHHHHHHRR

SEQ ID NO: 184807 - protein, 430 aa, Zea Mays
MELDLNVAEVAPEKPSAALEASDSGSSGSSVLNAEAASAGGGGPAPGEEGSSSTPAVLEFSILRSDSDAAGADADDGDATPSPPRHHQQQLVTRELFPAPQHWAELGFFRAGPQQQPDIRVLPHPHPYPPPPPPAQPQQAKKSRRGPRSRSSQYRGVTFYRRTGRWESHIWDCGKQVYLGGFDTAHAAARAYDRAAIKFRGVDADINFNLSDYDDDMKQMKSLSKEEFVHALRRQSTGFSRGSSKYRGVTLHKCGRWEARMGQFLGKKYIYLGLFDSEVEAARAYDKAAIKCNGREAVTNFEPSTYDGELLLTAEASAEVADDVDLNLSISQPASSQSPKRDKNCLGPQLHHHHGRPFDGSAVLKKTKIDAPSELSSAGRPHRSFLPHLVAAEHLPPRSHPFFITHHEVRRHYTVLNHLQRFVKLARLAS

SEQ ID NO: 184808 - protein, 79 aa, Zea Mays
MEGDRSCTSSSYHHPVAVAAAVDVVRCSIIRILQYRHDSCRRPIGRLLPPVRPAATVVVLLLEPSPPPPPPLRIEEATL

SEQ ID NO: 184809 - protein, 1003 aa, Zea Mays
MPLSDEETKSNTPVVISCNDRRREVAATQIIANKQIDRTFAFDKVFGPSSKQKDLFEQSISPIVNEVLEGYNCTIFAYGQTGTGKTYTMEGGGTRKTKNGELPTDAGVIPRAVRQIFDILESQCAEYSMKVTFLELYNEEITDLLAPEEPKFPVLEDKTKKPIALMEDGKGFVFVRGLEEEVVYSAGEIYKILDKGSAKRRTAETLLNKQSSRSHSIFSITIHIKELTHEGEEMIKIGKLNLVDLAGSENISRSGARDGRAREAGEINKSLLTLGRVINALVEHSGHVPYRDSKLTRLLRDSLGGKTKTCIIATISPSVYCLEETLSTLDYAHRAKNIKNKPEVNQRMMKSAVIKDLYYEIDRLKQEVFAAREKNGIYIPRERYLQEEAEKKAMTEKIERLGADMEARDKQLVELKELYDAEQRLSAELGEELGKTRKDLEDTKRALHDLEEQYKEAKSTIKEKEYVIFNLLKSEKSLVDCAYNLRAELENAAADVSGLFSKIERKDRIEDGNRSMVQRFRSQLTHQLDALHKTVSSSVMQQEDHLNEMEHDMQSFVSSKDEAAQGLREGVQKLKVLHGSGITALDELAGEIDMNSRTTFERLNSQIQSHTSALENCFGGIASEADNLLDELQRSLSKQEERLAHFAVKQREGHLRAVEASRSISKITAGFFHSLDVHASRLTSILEDTHSVQDQQLLDLEKKFEECAANEEKQLLEKVAEMLASSNARKKKLVQTAVGSLRESAVNRTSHLQKEISTAQDLTSSVREKWGFYMEETEKNYAEDTKAVDSGRSCLAEVLVECKAKATVGAQQWKNAEDSLFSLGKGNVESVDSIVRTGTEANELLRSKLSSAASATLEDIDVANEALLSSIDSSLKLDRDACANIGAVLTPCHGEMRELKGEHHHKVVEISESAGKCLEEEYLVDEPSCSTPRRRRIDLPGVESIEELRTPGYAELLKSFREARGSWKLANGDVTGHLPEAAQDPASSPPPAVGSRTPLVGRN

SEQ ID NO: 184810 - protein, 656 aa, Zea Mays
MMKSAVIKDLYYEIDRLKQEVFAAREKNGIYIPRERYLQEEAEKKAMTEKIERLGADMEARDKQLVELKELYDAEQRLSAELGEELGKTRKDLEDTKRALHDLEEQYKEAKSTIKEKEYVIFNLLKSEKSLVDCAYNLRAELENAAADVSGLFSKIERKDRIEDGNRSMVQRFRSQLTHQLDALHKTVSSSVMQQEDHLNEMEHDMQSFVSSKDEAAQGLREGVQKLKVLHGSGITALDELAGEIDMNSRTTFERLNSQIQSHTSALENCFGGIASEADNLLDELQRSLSKQEERLAHFAVKQREGHLRAVEASRSISKITAGFFHSLDVHASRLTSILEDTHSVQDQQLLDLEKKFEECAANEEKQLLEKVAEMLASSNARKKKLVQTAVGSLRESAVNRTSHLQKEISTAQDLTSSVREKWGFYMEETEKNYAEDTKAVDSGRSCLAEVLVECKAKATVGAQQWKNAEDSLFSLGKGNVESVDSIVRTGTEANELLRSKLSSAASATLEDIDVANEALLSSIDSSLKLDRDACANIGAVLTPCHGEMRELKGEHHHKVVEISESAGKCLEEEYLVDEPSCSTPRRRRIDLPGVESIEELRTPGYAELLKSFREARGSWKLANGDVTGHLPEAAQDPASSPPPAVGSRTPLVGRN

SEQ ID NO: 184811 - protein, 915 aa, Zea Mays
MEGGGTRKTKNGELPTDAGVIPRAVRQIFDILESQCAEYSMKVTFLELYNEEITDLLAPEEPKFPVLEDKTKKPIALMEDGKGFVFVRGLEEEVVYSAGEIYKILDKGSAKRRTAETLLNKQSSRSHSIFSITIHIKELTHEGEEMIKIGKLNLVDLAGSENISRSGARDGRAREAGEINKSLLTLGRVINALVEHSGHVPYRDSKLTRLLRDSLGGKTKTCIIATISPSVYCLEETLSTLDYAHRAKNIKNKPEVNQRMMKSAVIKDLYYEIDRLKQEVFAAREKNGIYIPRERYLQEEAEKKAMTEKIERLGADMEARDKQLVELKELYDAEQRLSAELGEELGKTRKDLEDTKRALHDLEEQYKEAKSTIKEKEYVIFNLLKSEKSLVDCAYNLRAELENAAADVSGLFSKIERKDRIEDGNRSMVQRFRSQLTHQLDALHKTVSSSVMQQEDHLNEMEHDMQSFVSSKDEAAQGLREGVQKLKVLHGSGITALDELAGEIDMNSRTTFERLNSQIQSHTSALENCFGGIASEADNLLDELQRSLSKQEERLAHFAVKQREGHLRAVEASRSISKITAGFFHSLDVHASRLTSILEDTHSVQDQQLLDLEKKFEECAANEEKQLLEKVAEMLASSNARKKKLVQTAVGSLRESAVNRTSHLQKEISTAQDLTSSVREKWGFYMEETEKNYAEDTKAVDSGRSCLAEVLVECKAKATVGAQQWKNAEDSLFSLGKGNVESVDSIVRTGTEANELLRSKLSSAASATLEDIDVANEALLSSIDSSLKLDRDACANIGAVLTPCHGEMRELKGEHHHKVVEISESAGKCLEEEYLVDEPSCSTPRRRRIDLPGVESIEELRTPGYAELLKSFREARGSWKLANGDVTGHLPEAAQDPASSPPPAVGSRTPLVGRN

SEQ ID NO: 184812 - protein, 60 aa, Zea Mays
MLQWLFRRRIPIWLSLETVVGFLKLVQLCKGLVVLPCLASSVEVYGVCTTLWQMGKTTCG

SEQ ID NO: 184813 - protein, 78 aa, Zea Mays
MEGTSLPLLELAAAELAVPVLELAVVAVTMLELAVATIPVAVTTVTIASKGPMSTVSAMAMRKLVCSISGSGRGSTSR

SEQ ID NO: 184814 - protein, 149 aa, Zea Mays
MLLASSDLLVAQLCQDSPRPVFPPQLLVLLARSSSPSAMALAVCPSAGRSSLLALQLDLAARPPARCSPARFSLRRARSVIPCCDPAVELPCSASLFPCCCSCDGVRPLGHVGMCSRSLPLNPGWSMLQLAVESPAPLYEVGLCRTSGA

SEQ ID NO: 184815 - protein, 329 aa, Zea Mays
MPRYDDRYGGTRLYVGRLAPRTRSRDLEYLFGKYGRIREVELKRDYAFIEFSEHRDADEARYQLDGRDVDGSRIVVEFAKGVPRGPGGSREYMGRGPPPGTGRCFNCGMDGHWARDCKAGDWKNKCYRCGERGHIERNCQNSPRSVSYSRSPSPRRGRGRSPSYSRSRSRSRSRSYSRSRSLSGSPRGGRRDRDDRRSRSLSYSRSPMRSPPAKEKERSPTPGGSRSPRSRSPQDQVMSPPPKDNGDRNGSDRGDSPRGRENSRSRSRSRSPSGGNRSPAANGRSPSPRGDRTPSPMADRSPSPKGNGNNDGGDDDTGRGGSPTGSKSP

SEQ ID NO: 184816 - protein, 117 aa, Zea Mays
MARGVHGKRHHPDVHVTPRPSYLQLFFEFQRVGRLCDSMDRSTTTSDPVALGHPPTTTLSNPCVMHFMIFFMSTTAFYAFHLRIFMMMNMSSNIYATSAIILRANLMVFMLISTTYL

SEQ ID NO: 184817 - protein, 132 aa, Zea Mays
MARGVHGKRHHPDVHVTPRPSYLQLFFEFQRVGRLCDSMDRSTTTSDPVALGHPPTTTLSNPCVMHFMIFFMSTTAFYAFHLRIFMMMNMSSNIYATSAIILRANLMVFMLISTTYLSYQHLSLWLIFYGQN

SEQ ID NO: 184818 - protein, 176 aa, Zea Mays
MAENPAPSSPLVTSPDAAAPPLPAEFTKLTFRSLYIRRTGPGSREMTVDGRPSDQLGRRFVSDFPIYDGRGSGAHLVARLQGVTVQIGSSHQLVSIVFEAERLKGSTLLTNGVITDGSDEWAIYGGTGVFAMATGVIRRRFLAGSNDGNSDELTSIEVFCPAFGSAQQQPNKQLDA

SEQ ID NO: 184819 - protein, 224 aa, Zea Mays
MTTLGHRMIKKQFNKTPRAGWQIDCLEQREFDSVVVKLQIFTNVFRVDYSPPDGFGFEVLDENILPVQDDMPMFDYNVEEQVNDFVAAAIEQDARKIEFLVGRRSSLGLFTTSLEDPMAIAQHHDAVSGIAKQHTTDDYSKCLALGASKNESINGINIVSCYPLQYTTLKPLADRVIVKINSSEEKTTGGILLPTTAQSRPQGGKVVAIGKGMIIGDNKVDVNI

SEQ ID NO: 184820 - protein, 156 aa, Zea Mays
MTTLGHRMIKKQFNKTPRAGWQIDCLEQREFDSVVVKLQIFTNVFRVDYSPPDGFGFEVLDENILPVQDDMPMFDYNVEEQVNDFVAAAIEQDARKIEFLVGRRSSLGLFTTSLEDPMAIAQHHDAVSGIAKQHTTDDYSKCLALGASKNESINGI

SEQ ID NO: 184821 - protein, 105 aa, Zea Mays
MTTLGHRMIKKQFNKTPRAGWQIDCLEQREFDSVVVKLQIFTNVFRVDYSPPDGFGFEVLDENILPVQDDMPMFDYNVEEQVNDFVAAAIEQNLGSGIWTNLSIA

SEQ ID NO: 184822 - protein, 278 aa, Zea Mays
MDKLIYRVNKDARKIEFLVGRRSSLGLFTTSLEDPMAIAQHHDAVSGIAKQHTTDDYSKCLALGASKNESINGINIVSCYPLQYTTLKPLADRVIVKINSSEEKTTGGILLPTTAQSRPQGGKKYVKEKCRTTQKINSRTGCFNKSLSMRMACNITCPSIEIGGYGDALLNLIYASPSSQFEELSLECELDATGNHSRVKDAQVHGSPIPESNGRLSTTAQTKMMSTVSEDAILVGSSFRYQSSLGNNNKRVGLFDMGDGSSEPAAEDNNQMHQISRC

SEQ ID NO: 184823 - protein, 290 aa, Zea Mays
MPMFDYNVEEQVNDFVAAAIEQDARKIEFLVGRRSSLGLFTTSLEDPMAIAQHHDAVSGIAKQHTTDDYSKCLALGASKNESINGINIVSCYPLQYTTLKPLADRVIVKINSSEEKTTGGILLPTTAQSRPQGGKKYVKEKCRTTQKINSRTGCFNKSLSMRMACNITCPSIEIGGYGDALLNLIYASPSSQFEELSLECELDATGNHSRVKDAQVHGSPIPESNGRLSTTAQTKMMSTVSEDAILVGSSFRYQSSLGNNNKRVGLFDMGDGSSEPAAEDNNQMHQISRC

SEQ ID NO: 184824 - protein, 154 aa, Zea Mays
MPMFDYNVEEQVNDFVAAAIEQDARKIEFLVGRRSSLGLFTTSLEDPMAIAQHHDAVSGIAKQHTTDDYSKCLALGASKNESINGINIVSCYPLQYTTLKPLADRVIVKINSSEEKTTGGILLPTTAQSRPQGGKVVAIGKGMIIGDNKVDVNI

SEQ ID NO: 184825 - protein, 146 aa, Zea Mays
MRMACNITCPSIEIGGYGDALLNLIYASPSSQFEELSLECELDATGNHSRVKDAQVHGSPIPESNGRLSTTAQTKMMSTVSEDAILVGSSFRWKRKLTYFITMKPEDVYQSSLGNNNKRVGLFDMGDGSSEPAAEDNNQMHQISRC

SEQ ID NO: 184826 - protein, 248 aa, Zea Mays
MRMACNITCPSIEIGGYGDALLNLIYASPSSQFEELSLECELDATGNHSRVKDAQVHGSPIPESNGRLSTTAQTKMMSTVSEDAILVGSSFRYQSSLGNNNKRVGLFDMGDGSSEPAAEDNNQMHQVYHGFYSAYDNTTLLYEILKSIKWARKTYVNRPVNVVGHSIGGDLASFCALDLFVSIFNVLDLLYQISIYALQITCTCFVIPSHVLLIYQMVGFIDISTFFTYIRWLASLISLHFLHVKFGS

SEQ ID NO: 184827 - protein, 218 aa, Zea Mays
MRMACNITCPSIEIGGYGDALLNLIYASPSSQFEELSLECELDATGNHSRVKDAQVHGSPIPESNGRLSTTAQTKMMSTVSEDAILVGSSFRWKRKLTYFITMKPEDVYQSSLGNNNKRVGLFDMGDGSSEPAAEDNNQMHQVYHGFYSAYDNTTLLYEILKSIKWARKTYVNRPVNVVGHSIGGDLASFCALDLFDVELMTFGQPRLGNPAFVVCLG

SEQ ID NO: 184828 - protein, 109 aa, Zea Mays
MGGLSTLRSKRGRDPQGPNWVLSRRCHRDVVPKGLRQSSWQKPSCAEDRLRALDAEHFGQSTTIDLVCGHLRVPRSGELSAQISRMTLIVGCICELEVRPLDEDSIERD

SEQ ID NO: 184829 - protein, 64 aa, Zea Mays
MHRALRGIMPSFSLKKVQRSGNVKNQSPYYLCMSLNVKNVNRVFQGFKWEVIYYLIWRVQSHIQ

SEQ ID NO: 184830 - protein, 82 aa, Zea Mays
MPLLQPGRPSWVLISISQLLSSLVLALPCSQDSREPSTSPTRPAMAPLPQVSHWSSPNPLPSPSPSTSPMVELTPVGAPYDA

SEQ ID NO: 184831 - protein, 63 aa, Zea Mays
MVELTPRNRRFLRREESRVARARCLMEWMNQRSLLLLRNPSLFSVGTLIDHVMWRTRAGLIPR

SEQ ID NO: 184832 - protein, 55 aa, Zea Mays
MLQYNINKVKWERYVKCLVIIKSLIKYPIKSVIPECEIAKKYLKKIASHFTRSSK

SEQ ID NO: 184833 - protein, 537 aa, Zea Mays
MTLNIDIQRKVGSIKSQLEIAKELLHRWEIERDERALADDEEWLRRKLKLHCLGLASLVRTIARLRSRILYIQKGDANTSFFHQQARYRKKKNFIPKLHVGDQVVTSQEDKQKAVSDFYENILGRAEERSYTLDLDELAIHNHDLSALDDPFLEEEVWAVVKDLPPDKAPGPDGFTGRFYKSCWNIIKGDVLRSLDVIQRGHVFKFRLLNTAYISLLPKKMDAVEVKDFRPISLIHSFAKLVAKLMATRLAPLLPSLVSVNQSAFVRGRRIHDNFMLVQQIVKLLHKKKEPHILLKLDISKAFDSVSWSFLLEVLRKMGFGQCWRDLLCLLLSTSSTQILVNGEPGDIIIHRRGLRQGDPLSPMLFILVMDTLNSLINYATSLGLLQPIAVQQVRHHVSFYADDVVVFLRPHILDLVSVRRILDLFGHASGLRTNLVKSSVSPIHCSDDELALSVETLSCSVKAFPCTYLGLPLTTCKPSKEVLLAFVDKVADYLPGWKASLLNRAGRLVLVKVVLTAVPIYWLIALGSPEMVHQGC

SEQ ID NO: 184834 - protein, 67 aa, Zea Mays
MEWMNRRSLLLLRNPSLFSVGTFGLESKSQCEEAQGKRRMEQSRSCAQGSFDMMTKKGNRLKGEKAI

SEQ ID NO: 184835 - protein, 51 aa, Zea Mays
MEWMNRRSLLLLRNPSLFSVGTFGLESKSQCEEAQGKRRMEQSRSCAQGSF

SEQ ID NO: 184836 - protein, 136 aa, Zea Mays
MAADRVPPHLLQPAALLVLPSCDVELALDDRPCPSSLICVQGFPSHGAWSSSLDSMPSAPVELVLAPASSLDGGALPFLQQASVPLSIIFSAWFLASSPCSSARPGPVPFFHSSAAPMVIYKSLCCFTSLVNTLLM

SEQ ID NO: 184837 - protein, 149 aa, Zea Mays
MAADRVPPHLLQPAALLVLPSCDVELALDDRPCPSSLICVQGFPSHGAWSSSLDSMPSAPVELVLAPASSLDGGALPFLQQASVPLSIIFSAWFLASSPCSSARPGPVPFFHSCGKHQSLPTPTSLSYGRCPSLVSGGRPPLLLPWFVN

SEQ ID NO: 184838 - protein, 164 aa, Zea Mays
MAADRVPPHLLQPAALLVLPSCDVELALDDRPCPSSLICVQGFPSHGAWSSSLDSMPSAPVELVLAPASSLDGGALPFLQQASVPLSIIFSAWFLASSPCSSARPGPVPFFHSCGKHQSLPTPTSLSYGRCPSLVSGGRPPLLLPWWRRRLSSTLLRCSMKCLN

SEQ ID NO: 184839 - protein, 157 aa, Zea Mays
MAADRVPPHLLQPAALLVLPSCDVELALDDRPCPSSLICVQGFPSHGAWSSSLDSMPSAPVELVLAPASSLDGGALPFLQQASVPLSIIFSAWFLASSPCSSARPGPVPFFHSCGKHQSLPTPTSLSYGRCPSLVSGGRPPLLLPCKISGELGGGEG

SEQ ID NO: 184840 - protein, 222 aa, Zea Mays
MAAVEVCVKAATGKPDTLGDCPFSQRVLLTLEEKKVPYEVKLVDLDNKPEWFLKISPEGKVPVFNGGDGECIADSDVITQTIEEKFPTPSLVTPVEYASVGSKIFPAFITFLKSKDASDGSEKALLDELQALDEHLKAHGPYINGENVSAADLSLGPKLFHLQVALEHFKGWKIPENLTNVHAYTKALFSRESFVKTKPSEEHVIAGWAPKVNACHICSLDT

SEQ ID NO: 184841 - protein, 62 aa, Zea Mays
MLVMVPRRRFWMSCRHWMSISKLMAPTSTGRTYQQLILAWGQSSSTSRSHWSISKAGRSQKT

SEQ ID NO: 184842 - protein, 187 aa, Zea Mays
MAAVEVCVKAATGKPDTLGDCPFSQRVLLTLEEKKVPYEVKLVDLDNKPEWFLKISPEGKVPVFNGGDGECIADSDVITQTIEEKFPTPSLVTPVEYASVGSKIFPAFITFLKSKDASDGSEKALLDELQALDEHLKAHGPYINGENVSAADLSLGPKLFHLQVALEHFKGWKIPENLTNVHAYTKP

SEQ ID NO: 184843 - protein, 400 aa, Zea Mays
MELFEDWRYGLSAQEFSQLCVFNYDTKNVEVHNAPWHIQDEPRFAFRGLLLDTSRHYLPVDVIKQVIDSMSFAKLNVLHWHIIDEQSFPLEVPTYPNLWKGSYSKWERYTVEDAHDIVNYAKKRGINVMAEIDVPGHAESWGNGYPKLWPSPICTEPLDVSSDFTFEVIFGILSDMRKIFPFGLFHLGGDEVYTGCWNTTPHVRQWMDERKMTTKDAYKYFVLKAQELAIKLNWTPVNWEETFNSFEENLNPLTVVHNWLGPGVCPKVVAKGFRCIMSNQGVWYLDHLDVPWEDVYSGEPLAGISDREQQKLVLGGEVCMWGETADTSDVLQTIWPRAAAAAERLWSQLEAISAQDVETTVLSRLHRFRCLLNHRGVAAAPVTNYYARRPPVGPGSCFVQ

SEQ ID NO: 184844 - protein, 285 aa, Zea Mays
MPPNRPAYLLSALLLAAAAAAVGARRHASPAANATFAGEPVYLWPLPKSVSSGSRTLTVDPDLALDPQGLGGRSPAVAEAFQRYRGLVFAPWAHAARAGRARYDVTRLTVVVASANDTLALGVDESYAIYVAAAGGVDSIVGGAIIEANTIYGAIRGLETFSQLCVFNYDTKNVEVHNAPWHIQDEPRFAFRGLLLDTSRHYLPVDVIKQVIDSMSFAKLNVLHWHIIDEQSFPLEVPTYPNLWKGSYSKWERYTVEDAHDIVNYAKKRGINVMAEIDVPGHAES

SEQ ID NO: 184845 - protein, 311 aa, Zea Mays
MSNPFHWRCQHIQTFGKVHTPNGSATPWKMHMILSSINVMAEIDVPGHAESWGNGYPKLWPSPICTEPLDVSSDFTFEVIFGILSDMRKIFPFGLFHLGGDEVYTGCWNTTPHVRQWMDERKMTTKDAYKYFVLKAQELAIKLNWTPVNWEETFNSFEENLNPLTVVHNWLGPGVCPKVVAKGFRCIMSNQGVWYLDHLDVPWEDVYSGEPLAGISDREQQKLVLGGEVCMWGETADTSDVLQTIWPRAAAAAERLWSQLEAISAQDVETTVLSRLHRFRCLLNHRGVAAAPVTNYYARRPPVGPGSCFVQ

SEQ ID NO: 184846 - protein, 761 aa, Zea Mays
MATPDDGPAPAGPGVRKFWRSASWSEPREPLPDAAAGPGAAGGRSRRVPPPPPLTPRSMSSKARSCLPPLQPLAITRRSLDEWPRAGSDDVGEWPNPTTPGASKAGGGPSSARPGEGLRLDLSSLRSQGRKDQIAFFDKECSKVADHVYLGGDAVAKNRDILRKNGITHVLNCVGFVCPEYFKSDLVYRTLWLQDSPTEDITSILYDVFDYFEDVREQGGRVFVHCCQGVSRSTSLVIAYLMWREGQSFDDAFQFVKAARGIANPNMGFACQLLQCQKRVHAIPLSPNSVLRMYRMAPHSQYAPLHLVPKMLNDPSPAALDSRGAFIVHVLLSIYVWVGMKCDPVMEKDAKAAAFQVVRYEKVQGHIKVVREGLEPQEFWDAFSSTLPNSDTNTKISKDQIDSASKSNPGSRIIESYDADFELVYKAITGGVVPAFSTSGAGDETHLPARESSWSLLRHKFISRSLARVYSDSALIRDFDPRVDRVQHLAAEASTSPPFLSPSSFSSDSSASSKYNSDSPSLSPTTSSPPSFGLSPASSNLPQALVPSSRSPLSQSSNAGASKPSGLESIRHPSKTSSIAERRGGFTLLKLPSLQKDLVLPPRVPSSIRRTDEALDKSCTNGVKRPTGDFRSEKCTDNSSSLHSETRLTERTDSNSEACSNVQLLVYQWPSMEKLTTFARKDLDSNSVLIFVTSNAIRREAVKMVYVWVGGEIESSKSVNAVDWQQVTGDFLHRKGLSDALPIKVFKEHETENLLELLNFS

SEQ ID NO: 184847 - protein, 184 aa, Zea Mays
MHPFLALEKLASKAHVWVRNPPGSLDKLEGVIEALAFPPHQVGDDQRRGARHPLAAMHKHAATLLPDILKVIKHVVQDAGDVLGGAVLQPEGAVDKVRLEVLRADEAHTVENVGDAVLPEDVAVLGDGVAAEVYMVGDLGALLVKEGDLVLASLRAERGEVEPEPLPWQQCTNTRPPCSLMSSK

SEQ ID NO: 184848 - protein, 78 aa, Zea Mays
MEAWKVFRRILRIAFLAISARLGKWWTGTGTRKMVVNGGQAGGDCRRPGKTLSHTYLTINSREVTRSRRELLAEWEAG

SEQ ID NO: 184849 - protein, 56 aa, Zea Mays
MEAWKGTGTRKMVVNGGQAGGDCRRPGKTLSHTYLTINSREVTRSRRELLAEWEAG

SEQ ID NO: 184850 - protein, 598 aa, Zea Mays
MVLARKKLKLKLHTLLPAGKAAEEEHGEDVEAVKERLASSKRLRPKRERRPKKKLSLPEVVRQTEEEIREEVERRREERRKEKKEKRRIRRLMEAEAAEPETQQVEGEIGEADSAAGSESDQPVEAKDREQSIKKVYVGGIPYYSSEDDIRSFFEACGSITMIDCMNFPESGKFRGIAILTFKTDAAAQRALAMDGADMGGFYLKIQPYKHNREKEDFAPKLIEGYNRIYVGNLPWDITDDDLKKFFSECKISSIRFGTDKETGGFKGYAHVDFSDSASLAAALKLDQKVIKERPVRIRCAVPKKDNQKVNDNGNSDHLKSKTRTCYECGTPGHFSSSCPNKKDSEARKCYECGTPGHLSSACPNKKDSEVRKCYECGTAGHLSSACPNKKDSDEKEDNSNSTIAASKKRRTCYECGIPGHLSSNCPNKKDPEFISDEKNTNVDSAPASSKKRRTCYECGTPGHLSSACPNKRTSESVLNNREPADAKPATTIKPEETKAGDESNSVASKKRRKCYECGISGHLSSACPSKKAAEPVCNEEKPGNHSNAVLPVVSDEKKASEDAKSAPAKKKKRRTCYECGIAGHLSSECPNKAAAVC

SEQ ID NO: 184851 - protein, 488 aa, Zea Mays
MQLAKTVVVSDNHVVAEHREQSIKKVYVGGIPYYSSEDDIRSFFEACGSITMIDCMNFPESGKFRGIAILTFKTDAAAQRALAMDGADMGGFYLKIQPYKHNREKEDFAPKLIEGYNRIYVGNLPWDITDDDLKKFFSECKISSIRFGTDKETGGFKGYAHVDFSDSASLAAALKLDQKVIKERPVRIRCAVPKKDNQKVNDNGNSDHLKSKTRTCYECGTPGHFSSSCPNKKDSEARKCYECGTPGHLSSACPNKKDSEVRKCYECGTAGHLSSACPNKKDSDEKEDNSNSTIAASKKRRTCYECGIPGHLSSNCPNKKDPEFISDEKNTNVDSAPASSKKRRTCYECGTPGHLSSACPNKRTSESVLNNREPADAKPATTIKPEETKAGDESNSVASKKRRKCYECGISGHLSSACPSKKAAEPVCNEEKPGNHSNAVLPVVSDEKKASEDAKSAPAKKKKRRTCYECGIAGHLSSECPNKAAAVC

SEQ ID NO: 184852 - protein, 74 aa, Zea Mays
MGCLCGRSDGEVSSSRCRSEEACFFLMLATRQQQQQQSSPAKHICMFILVRLDIVCTVQTADTTIQLLTNSILV

SEQ ID NO: 184853 - protein, 214 aa, Zea Mays
MAPAVEAVKETGTFQKVPALNERILSSMSRRSVAAHPWHDLEIGPGAPTIFNCVIEIPRGSKVKYELDKKTGLIKVDRVLYSSVVYPHNYGFIPRTLCEDSDPLDVLVIMQEPVIPGCFLRAKAIGLMPMIDQGEADDKIIAVCADDPEYRHYNDIKELPPHRLAEIRRFFEDYKKNENKEVAVNDFLPASAAYEAIQHSRDLYATYIVEGLRR

SEQ ID NO: 184854 - protein, 239 aa, Zea Mays
MDGGSCGLEGASVVTSTTSTGIPLLPEKHCALFDEACGAMAGSNGPEGVPVVTSADDPPTRADIPFVCNSVDETCEATGGGSAPLEGQICTGFSKLISLEVKKGLQKCATFPPSSGQPQQEDCSCCHVGDELTCAPAYGRSVSLPPTLKLVSAMKGGREKNGVASSPSENRHVKWAPDVYDPPVTSVCHSVTNSYQRRSKHRKKEKNKQKKRQKGKSKKNQQQSSAQNPSAPQVPGIGR

SEQ ID NO: 184855 - protein, 207 aa, Zea Mays
MGQVHYTKIKAIPEGEPVMLGAFPVANHLASILFDSGASHTFINRTFVLKHQLSLVVVENGYSIQSPGGRLHTKEMVYQIPIKLVGHIFPTNMLVLPGQDIDVILGMNWLRQHGAVIDALQRTIQLDSPNGNYKLLIRLPTLKRAVERVCAATVKEVKDIPVVREFPDVFPEDLPGLPPERDVEFVIELQPGTAPISRRSYRMAPRS

SEQ ID NO: 184856 - protein, 312 aa, Zea Mays
MGGALPDGGGGGGGGGQVGGPAKPMSMAERARLARIPLPEPGLKCPRCDSTNTKFCYFNNYSLTQPRHFCRACRRYWTRGGALRNVPVGGGYRRHAKRAKPKQQQQQHAAAGTGAATGAMQQPPAGSMASSAAACTATTTMTTNALHAGPGGGMLPMLPPLLRLADFDAMSLGSSFSGISSMGKPGSIGAACYPHSVGGLEQWRVQQMQSFPFLHAMDQGPLGPPLAMAMAAPGGMFQLGLDTTSDNSRGGGGGGEDGSSAGEALHMMQATKRESYPAAPRAMYGDQQHNHLAAAGGYTSYSTNAAAGNHLL

SEQ ID NO: 184857 - protein, 56 aa, Zea Mays
MAGAVDRILFTGRRYYIYTPRRRPPPLDSRAPSPGRASSVAAAAGAAAAGAAAAGA

SEQ ID NO: 184858 - protein, 133 aa, Zea Mays
MLSYNFRCQCRIQIPFFEIEISIPLYGHRPNVATYFLHPKCSQISLLTLQQSQTKPIIQLWLHQREPRNRGLMSLVRVLPMMMKRANLFMLATCHHLLLRLILKMSSRDLVGLFLTLLLLEAERFAVNLSFDS

SEQ ID NO: 184859 - protein, 871 aa, Zea Mays
MVTEMAARGGEAAAFGAEADRGDFEVFRSGSAPPTVEGALGAAAAAADLLVDDDLRADPAYQSYYYSNAHLNPRLPPPLLSKEDWRSSHHRLRSAAFGGIGDGRRQQQPAAQGTVGLPGIDLARQRSFSTVFQEDSYQRDMDRQTASHNSSESLCSSGIQYGLNRGPGTIGGLHSSNSLRSLDEIPNNDLPSNTFASLLGSSLSRSASPDPELVRRAPSPSLPPIGVKVGNTDKMNGGSSSFRRSSSAIGGSDDLVAALSGMNLSSRAMSGQTMDQSQLYQDVDNVQKFLFDRQGDQPNGNQQHYMRRPEHGQSKLSDGYSANLANSSTMRNQINSGSFTSFDSLSLGSGFPSPRIGSRSPGGTVSSRQNLAGMSNMLNYNGIGSPTASPSLQTSIDPAYIQYLAQIAATWDDPLMDRSHLGSSYMDLLGTQKANLGPLLQSQKQYGYCGNLGFNLGGYAGSPLTSPVLPSSPIAPGSPLRHGDRNMRFPPGMRNFGNSFGSWNSGMSGKMDANLMPSLLEEFKSNKSKSYELSEIAGHVVEFSADQYGSRFIQQKLETASTEEKDMVFSEIMPQALTLMTDVFGNYVVQKFFEHGSTAQIKELAGQLIGRVLALSLQMYGCRVIQKAIEVVDLDLQTKMVAELEGHVMRCVRDQNGNHVIQKCIECIPQHAIEFIVSTFYGQVVMLSTHPYGCRVIQRVLEHCDDPKTQQIMMDEILQSVCLLAQDQYGNYVVQHVLEHGKPHERSAIIEKLIGQVVQMSQQKFASNVIEKCLAFGNPVERQVLIGEMLGSTSESEPLEVMMKDQFANYVVQKVLETCDDQQREMILTRIKTHLNTLKKYTYGKHIVARVEKLVAAGEKRLGLQPACTAA

SEQ ID NO: 184860 - protein, 834 aa, Zea Mays
MVTEMAARGGEAAAFGAEADRGDFEVFRSGSAPPTVEGALGAAAAAADLLVDDDLRADPAYQSYYYSNAHLNPRLPPPLLSKEDWRSSHHRLRSAAFGGIGDGRRQQQPAAQGTVGLPGIDLARQRSFSTVFQEDSYQRDMDRQTASHNSSESLCSSGIQYGLNRGPGTIGGLHSSNSLRSLDEIPNNDLPSNTFASLLGSSLSRSASPDPELVRRAPSPSLPPIGVKVGNTDKMNGGSSSFRRSSSAIGGSDDLVAALSGMNLSSRAMSGQTMDQSQLYQDVDNVQKFLFDRQGDQPNGNQQHYMRRPEHGQSKLSDGYSANLANSSTMRNQINSGSFTSFDSLSLGSGFPSPRIGSRSPGGTVSSRQNLAGMSNMLNYNGIGSPTASPSLQTSIDPAYIQYLAQIAATWDDPLMDRSHLGSSYMDLLGTQKANLGPLLQSQKQYGYCGNLGFNLGGYAGSPLTSPVLPSSPIAPGSPLRHGDRNMRFPPGMRNFGNSFGSWNSGMSGKMDANLMPSLLEEFKSNKSKSYELSEIAGHVVEFSADQYGSRFIQQKLETASTEEKDMVFSEIMPQALTLMTDVFGNYVVQKFFEHGSTAQIKELAGQLIGRVLALSLQMYGCRVIQKAIEVVDLDLQTKMVAELEGHVMRCVRDQNGNHVIQKCIECIPQHAIEFIVSTFYGQVVMLSTHPYGCRVIQHVLEHGKPHERSAIIEKLIGQVVQMSQQKFASNVIEKCLAFGNPVERQVLIGEMLGSTSESEPLEVMMKDQFANYVVQKVLETCDDQQREMILTRIKTHLNTLKKYTYGKHIVARVEKLVAAGEKRLGLQPACTAA

SEQ ID NO: 184861 - protein, 872 aa, Zea Mays
MVTEMAARGGEAAAFGAEADRGDFEVFRSGSAPPTVEGALGAAAAAADLLVDDDLRADPAYQSYYYSNAHLNPRLPPPLLSKEDWRSSHHRLRSAAFGGIGDGRRQQQPAAQGTVGLPGIDLARQRSFSTVFQEDSYQRDMDRQTASHNSSESLCSSGIQYGLNRGPGTIGGLHSSNSLRSLDEIPNNDLPSNTFASLLGSSLSRSASPDPELVRRAPSPSLPPIGVKVGNTDKMNGGSSSFRRSSSAIGGSDDLVAALSGMNLSSRAMSGQTMDQSQLYQDVDNVQKFLFDRQGDQPNGNQQHYMRRPEHGQSKLSDGYSANLANSSTMRNQINSGSFTSFDSLSLGSGFPSPRIGSRSPGGTVSSRQNLAGMSNMLNYNGIGSPTASPSLQTSIDPAYIQYLAQIAATWDDPLMDRSHLGSSYMDLLGSPLRHGDRNMRFPPGMRNFGNSFGSWNSGMSGKMDANLMPSLLEEFKSNKSKSYELSEIAGHVVEFSADQYGSRFIQQKLETASTEEKDMVFSEIMPQALTLMTDVFGNYVVQKFFEHGSTAQIKELAGQLIGRVLALSLQMYGCRVIQKAIEVVDLDLQTKMVAELEGHVMRCVRDQNGNHVIQKCIECIPQHAIEFIVSTFYGQVVMLSTHPYGCRVIQRVLEHCDDPKTQQIMMDEILQSVCLLAQDQYGNYVVQYCCLFHVAMCCAAVWNRKQQERCEYCCLSHVAMCCAAVWNRKQQERCEHVLEHGKPHERSAIIEKLIGQVVQMSQQKFASNVIEKCLAFGNPVERQVLIGEMLGSTSESEPLEVMMKDQFANYVVQKVLETCDDQQREMILTRIKTHLNTLKKYTYGKHIVARVEKLVAAGEKRLGLQPACTAA

SEQ ID NO: 184862 - protein, 90 aa, Zea Mays
MSHIHNQINRKYIPSLKMSSVVLGATGRENKTSWPEVVGMSIKEAREIILKDMPNANIQVLPVGSLVTQDFRPDRVRIFVDIVAQTPTVG

SEQ ID NO: 184863 - protein, 108 aa, Zea Mays
MSPSRSLFSLTPTRGSQSMSDLNDGAATRRRAESLHGSLESRGDRIFGLSTIPSLFNALIKMCLAIETFDTLELGAAALMQRLLSASDQQADVLSLLAGGKEDHTGVK

SEQ ID NO: 184864 - protein, 111 aa, Zea Mays
MVASTGSTGTGRWLSGLTVSGSDRMKDGATDDGVGEIHEQASGSGSASISVELGTASRRAAMGTEAKARVLRCRRVRTRRSPMTMAWCAGVEENRDATMRSLAGGETRPRR

SEQ ID NO: 184865 - protein, 157 aa, Zea Mays
MLDDAINSTYITFAKNTRINITYITIDSFIKTNNKNRESAHHNQLDSIFARTTTGTGRWLSGLTVSGSDRMKDGATDDGVGEIHEQASGSGSASISVELGTASRRAAMGTEAKARVLRCRRVRTRRSPMTMAWCAGVEENRDATMRSLAGGETRPRR

SEQ ID NO: 184866 - protein, 87 aa, Zea Mays
MGLVGGRRSQRAQHLYRLPQRGLKEKRGKVRPIDRGAAAPPASEEWRIRSEARGLNPAAGRDAGPRRASSSVPSNGSCPCPEHRQDG

SEQ ID NO: 184867 - protein, 619 aa, Zea Mays
MARGMRKCIIQSQEEYLVEEPIGETSHRPRDAAYDHHPSARERQKESDNDHHKKDTTSFETTSGVYPSPDDADIEDSVEGQTNEAISRGPNKLKHVWNLQKGKRIVVNCNELGQPIGEEAGVLGKFLGMVARNGCLCSLSFKDWRLLIGKKDRNNEQKNKQDVLKQVKMRFLYPARMEKWILRTIGERWRQHKSNLKSLHFDAHRSKENNLKNVPKGVLDDQWVALVNNWFTTKSQDISEANRINCAKRKATHTSGTKSFARNREDMREQDPEKKYPHRAVLYINTHKSNITKNTNPHVVALKELLVQEPSLADTSHGKVAWKGDALSQILGEEKPGHIHGLGLVPNPDQVFGGSTSRHLKHLNLTSLDATSSEDVVSLRLQVEKLIDRVQKQDDTILNLRNTLELQKSHHECLDEPLSASKDLQPTMNQKINLLDELNSTMADEIKHDGYEELQAQCKKSKIQEKGKPPMPRGGLQGGRVSTSLNVKNRSNAAKVMNQDTARNSSNHEPYKNKGSLENYLPSTKDDQSTSKRKVGSHIFLKSWRNQNKKVALGTIIGCDPKQQVGGDPLGKEFWKVRLGLVLVRDEPLIRPYNNFVVLGDIDNDPIAWPSSCIEKAAL

SEQ ID NO: 184868 - protein, 490 aa, Zea Mays
MRFLYPARMEKWILRTIGERWRQHKSNLKSLHFDAHRSKENNLKNVPKGVLDDQWVALVNNWFTTKSQDISEANRINCAKRKATHTSGTKSFARNREDMREQDPEKKYPHRAVLYINTHKSNITKNTNPHVVALKELLVQEPSLADTSHGKVAWKGDALSQILGEEKPGHIHGLGLVPNPDQVFGGSTSRHLKHLNLTSLDATSSEDVVSLRLQVEKLIDRVQKQDDTILNLRNTLELQKSHHECLDEPLSASKDLQPTMNQKINLLDELNSTMADEIKHDGYEELQAQCKKSKIQEKGKPPMPRGGLQGGRVSTSLNVKNRSNAAKVMNQDTARNSSNHEPYKNKGSLENYLPSTKDDQSTSKRKRVYGQFQSEEFWTLDENHETIKPLRGDTLQPSRISTGLKVGSHIFLKSWRNQNKKVALGTIIGCDPKQQVGGDPLGKEFWKVRLGLVLVRDEPLIRPYNNFVVLGDIDNDPIAWPSSCIEKAAL

SEQ ID NO: 184869 - protein, 589 aa, Zea Mays
MARGMRKCIIQSQEEYLVEEPIGETSHRPRDAAYDHHPSARERQKESDNGNEFNDLDHHKKDTTSFETTSGVYPSPDDADIEDSVEGQTNEAISRGPNKLKHVWNLQKGKRIVVNCNELGQPIGEEAGVLGKFLGMVARNGCLCSLSFKDWRLLIGKKDRNNEQKNKQDVLKQVKMRFLYPARMEKWILRTIGERWRQHKSNLKSLHFDAHRSKENNLKNVPKGVLDDQWVALVNNWFTTKSQDISEANRINCAKRKATHTSGTKSFARNREDMREQDPEKKYPHRAVLYINTHKSNITKNTNPHVVALKELLVQEPSLADTSHGKVAWKGDALSQILGEEKPGHIHGLGLVPNPDQVFGGSTSRHLKHLNLTSLDATSSEDVVSLRLQVEKLIDRVQKQDDTILNLRNTLELQKSHHECLDEPLSASKDLQPTMNQKINLLDELNSTMADEIKHDGYEELQAQCKKSKIQEKGKPPMPRGGLQGGRVSTSLNVKNRSNAAKVMNQDTARNSSNHEPYKNKGSLENYLPSTKDDQSTSKRKVGSHIFLKSWRNQNKKVALGTIIGCDPKQQVGGDPLGKEFWKIEKAAL

SEQ ID NO: 184870 - protein, 491 aa, Zea Mays
MVARNGCLCSLSFKDWRLLIGKKDRNNEQKNKQDVLKQVKMRFLYPARMEKWILRTIGERWRQHKSNLKSLHFDAHRSKENNLKNVPKGVLDDQWVALVNNWFTTKSQDISEANRINCAKRKATHTSGTKSFARNREDMREQDPEKKYPHRAVLYINTHKSNITKNTNPHVVALKELLVQEPSLADTSHGKVAWKGDALSQILGEEKPGHIHGLGLVPNPDQVFGGSTSRHLKHLNLTSLDATSSEDVVSLRLQVEKLIDRVQKQDDTILNLRNTLELQKSHHECLDEPLSASKDLQPTMNQKINLLDELNSTMADEIKHDGYEELQAQCKKSKIQEKGKPPMPRGGLQGGRVSTSLNVKNRSNAAKVMNQDTARNSSNHEPYKNKGSLENYLPSTKDDQSTSKRKVGSHIFLKSWRNQNKKVALGTIIGCDPKQQVGGDPLGKEFWKVRLGLVLVRDEPLIRPYNNFVVLGDIDNDPIAWPSSCIEKAAL

SEQ ID NO: 184871 - protein, 77 aa, Zea Mays
MASTQLTCSRFQLPRSRSDTDAHHVSNAKHHSFDLGKNPPLRHRPPPLSLACSSRSMCMGLNGWNKSSSMLRSWEFM

SEQ ID NO: 184872 - protein, 135 aa, Zea Mays
MSSPSAISTELLQAAASELLQRRRGFRPCRPAEERRFAASHSMKGREEKRWEYLVGARCRRRGQRKPQHPGLGRRRRQLWSESEESKRAGMQRTEGERGNAGGAVVCGLQPREDCQTQMRLRRDLFCAGLQFDGV

SEQ ID NO: 184873 - protein, 646 aa, Zea Mays
MLMKGPSSDVLRASISSAPSTSSHGSAQDECDSLGDVYVWDCGVKHAALVMKNGEVFTWGEDSGGRLGHGTREDCVRPRLVESLTVSNVDFVACGEFHTCAVTTTGELYTWGDGTYNVGLLGHGNDVGHWIPKRISGALEGLQVAYVSCGTWHTALITSMGQLFTFGDGSFGVLGHGDLKSVSYPREVESLSGLKTIAVACGVWHTAAIVEVIVTRSSSSVKLSAGKLFTWGDGDKHRLGHGDKETRLKPTCVATLIDHDFYRVACGHSLTVALTTSGQVLSMGNAVYGQLGNPHSDGRIPCLVEDKIVGEQVLQIACGSYHVAVLTNRSEVFTWGKGANGRLGHGDTEDRKVPTLVEALKDRAVRYIACGANFTAAICQYKWVSGADQSQCSSCRQPFGFTRKRRNCYNCGLVHCNSCTSRKALRASLAPSPGKPYRVCDSCFLKLNNASDPNAANRRKDPVPYQPVESNGDAKVGKASLPSNMEMIRNLDIKAAWQGKKTDGLSFLRNPQVSSLLQLSDIALSGGLGMNRSAPRAVHISAARSVTTSRAVSPFSRKPSPPRSTTPVPTAHGLSFSKSATDNIVKANELLNQEVERLRAQVDNLRNRCELQELELQKSAKKVLEAMTLVAEESAKSKAAKEVNQA

SEQ ID NO: 184874 - protein, 663 aa, Zea Mays
MLMKGPSSDVLRASISSAPSTSSHGSAQDECDSLGDVIDILLPKPLESNLVLDVYHVDCGVKHAALVMKNGEVFTWGEDSGGRLGHGTREDCVRPRLVESLTVSNVDFVACGEFHTCAVTTTGELYTWGDGTYNVGLLGHGNDVGHWIPKRISGALEGLQVAYVSCGTWHTALITSMGQLFTFGDGSFGVLGHGDLKSVSYPREVESLSGLKTIAVACGVWHTAAIVEVIVTRSSSSVKLSAGKLFTWGDGDKHRLGHGDKETRLKPTCVATLIDHDFYRVACGHSLTVALTTSGQVLSMGNAVYGQLGNPHSDGRIPCLVEDKIVGEQVLQIACGSYHVAVLTNRSEVFTWGKGANGRLGHGDTEDRKVPTLVEALKDRAVRYIACGANFTAAICQYKWVSGADQSQCSSCRQPFGFTRKRRNCYNCGLVHCNSCTSRKALRASLAPSPGKPYRVCDSCFLKLNNASDPNAANRRKDPVPYQPVESNGDAKVGKASLPSNMEMIRNLDIKAAWQGKKTDGLSFLRNPQVSSLLQLSDIALSGGLGMNRSAPRAVHISAARSVTTSRAVSPFSRKPSPPRSTTPVPTAHGLSFSKSATDNIVKANELLNQEVERLRAQVDNLRNRCELQELELQKSAKKVLEAMTLVAEESAKSKAAKEVNQA

SEQ ID NO: 184875 - protein, 79 aa, Zea Mays
MVRHSRLLIWAVRFLSCSQGSTIPVRRRHFTQESLRNIRINPAVLALGALCLRKIYVEAPMFSVNGELSPENKKSKEFI

SEQ ID NO: 184876 - protein, 119 aa, Zea Mays
MHCMRKNKLPQKKMVQALCHCRPYTRTRTSQEKQNKATRPRSRSRQSSSGFHRKVDHYTKLLILCIIIILFHLIDNTSIQRYARCLDQQLCTFLNQALQAATPFCSNLPMKSSERSHGR

SEQ ID NO: 184877 - protein, 115 aa, Zea Mays
MTTSIEYDYLFKLLLIGDSSVGKSCLLLRFADDSYVDTYISTIGVDFKIRTIDLDGKTVKLQIWDTAGQERFRTITSSYYRGAHGIIIVYDVTDMESFNNIKQWLSEIDRILQIH

SEQ ID NO: 184878 - protein, 150 aa, Zea Mays
MTTSIEYDYLFKLLLIGDSSVGKSCLLLRFADDSYVDTYISTIGVDFKIRTIDLDGKTVKLQIWDTAGQERFRTITSSYYRGAHGIIIVYDVTDMESFNNIKQWLSEIDRYASDNVCKLLVGNKCDLVDSKVVDTEKAKVSFCLCFSLKH

SEQ ID NO: 184879 - protein, 197 aa, Zea Mays
MTTSIEYDYLFKLLLIGDSSVGKSCLLLRFADDSYVDTYISTIGVDFKIRTIDLDGKTVKLQIWDTAGQERFRTITSSYYRGAHGIIIVYDVTDMESFNNIKQWLSEIDRYASDNVCKLLVGNKCDLVDSKDFADSLGIPFIETSAKESINVEEAFLTMSSEIKKRMATQPTVERRPTVHVHMKGQPIQQKSSCCSS

SEQ ID NO: 184880 - protein, 141 aa, Zea Mays
MTTSIEYDYLFKLLLIGDSSVGKSCLLLRFADDSYVDTYISTIGVDFKIRTIDLDGKTVKLQIWDTAGQERFRTITSSYYRGAHGIIIVYDVTDMESFNNIKQWLSEIDRYASDNVCKLLVGNKCDLVDSKVVDTEKAKIH

SEQ ID NO: 184881 - protein, 1088 aa, Zea Mays
MVRKKRTGPGESSGETSGAPGQGSSQRPQATQQGARGGGQHQVRGGYPGHGVPPSEHPGGGPPEYQPRGYQGRGVPPLLPGGGPPEPQPRGYQGHGGYQGRGGPPSQHPGGGPSPGSQPRGYQGRGGLRPRGGVPQPYRGGHVGGSVGPIVPSGPSRPVPELHQAPDVQHQAPVVAAPSPPGAGSSSQPGMAEVSTGQVQQLVIHDQSSASQVSQVAPASSKAVRFPLRPGKGTHGSRCIVKANHFFAELPDKDLHQYDVSITPVVPSRGVNRAVMKELVNLHRHSHLDGRLPAYDGRKSLYTAGALPFTSKTFEITLQDEENSLGGGQRHQRGQRVFQVVIKFAARADLHHLAMFLAGRQPDAPQEAIQVLDIVLREFPTARYCPVGRSFYSPNLGRRQQLGEGLETWRGFYQSIRPTQMGLSLNIDMSSTAFIEPLPVIDFVAQLLDRDISVRPLSDSDRVKIKKALRGVKVEVTHRGNMRRKYRISGLTSQATRELSFPIDDRGTVKTVVQYFLETYGFNIQHTTLPCLQVGNQQRINYLPMEVCKIVEGQRYSKRLNEKQITALLKVTCQRPQEREKAILQEFGIKIDERLASVEARVLPPPRLKYHDSGRERDVLPRVGQWNMMNKKMVNGGRVSSWACINFSRNVQDGAARSFCHDLALMCQVSGMDFALEPVLPPVYARPEHVERALKRLYQDAMSILRPQGRELDLLMVILPDNNGSLYGDLKRICETDLGLVSQCCLTKHVFKANKHQYLANVALKINVKVGGRNTVLVDALARRIPLVSDVATIIFGADVTHPHPGEDSSPSIAAVVASQDWPEVTKYAGLVSAQTHRQELIQDLFNVRQDPQRGAVSGGMIRELLISFWRATGQKPKRIIFYRDGVSEGQFYQVLLYELDAIRKACASLESDYQPPVTFVVVQKRHHTRLFVNNHNDQRAADRSGNILPGTVVDSKICHPTEFDFYLCSHAGIQGTSRPAHYHVLWDENKFTADGLQTLTNNLCYTYARCTRSVSIVPPAYYAHLAAFRARFYMEPDTSDSGSVASGATTSRGPPPGARNTRAGAANVAVRPLPALKENVKRVMFYC

SEQ ID NO: 184882 - protein, 748 aa, Zea Mays
MFLAGRQPDAPQEAIQVLDIVLREFPTARYCPVGRSFYSPNLGRRQQLGEGLETWRGFYQSIRPTQMGLSLNIDMSSTAFIEPLPVIDFVAQLLDRDISVRPLSDSDRVKIKKALRGVKVEVTHRGNMRRKYRISGLTSQATRELSFPIDDRGTVKTVVQYFLETYGFNIQHTTLPCLQVGNQQRINYLPMEVCKIVEGQRYSKRLNEKQITALLKVTCQRPQEREKAILQTVHHNAYSEDPYAQEFGIKIDERLASVEARVLPPPRLKYHDSGRERDVLPRVGQWNMMNKKMVNGGRVSSWACINFSRNVQDGAARSFCHDLALMCQVSGMDFALEPVLPPVYARPEHVERALKRLYQDAMSILRPQGRELDLLMVILPDNNGSLYGDLKRICETDLGLVSQCCLTKHVFKANKHQYLANVALKINVKVGGRNTVLVDALARRIPLVSDVATIIFGADVTHPHPGEDSSPSIAAVVASQDWPEVTKYAGLVSAQTHRQELIQDLFNVRQDPQRGAVSGGMIRELLISFWRATGQKPKRIIFYRDGVSEGQFYQVLLYELDAIRKACASLESDYQPPVTFVVVQKRHHTRLFVNNHNDQRAADRSGNILPGTVVDSKICHPTEFDFYLCSHAGIQGTSRPAHYHVLWDENKFTADGLQTLTNNLCYTYARCTRSVSIVPPAYYAHLAAFRARFYMEPDTSDSGSVASGATTSRGPPPGARNTRAGAANVAVRPLPALKENVKRVMFYC

SEQ ID NO: 184883 - protein, 789 aa, Zea Mays
MGVCLHMMEGRVFIQLEHCHLLRRHSKLLCKMKKTVLVEDKDTKAGRQPDAPQEAIQVLDIVLREFPTARYCPVGRSFYSPNLGRRQQLGEGLETWRGFYQSIRPTQMGLSLNIDMSSTAFIEPLPVIDFVAQLLDRDISVRPLSDSDRVKIKKALRGVKVEVTHRGNMRRKYRISGLTSQATRELSFPIDDRGTVKTVVQYFLETYGFNIQHTTLPCLQVGNQQRINYLPMEVCKIVEGQRYSKRLNEKQITALLKVTCQRPQEREKAILQTVHHNAYSEDPYAQEFGIKIDERLASVEARVLPPPRLKYHDSGRERDVLPRVGQWNMMNKKMVNGGRVSSWACINFSRNVQDGAARSFCHDLALMCQVSGMDFALEPVLPPVYARPEHVERALKRLYQDAMSILRPQGRELDLLMVILPDNNGSLYGDLKRICETDLGLVSQCCLTKHVFKANKHQYLANVALKINVKVGGRNTVLVDALARRIPLVSDVATIIFGADVTHPHPGEDSSPSIAAVVASQDWPEVTKYAGLVSAQTHRQELIQDLFNVRQDPQRGAVSGGMIRELLISFWRATGQKPKRIIFYRDGVSEGQFYQVLLYELDAIRKACASLESDYQPPVTFVVVQKRHHTRLFVNNHNDQRAADRSGNILPGTVVDSKICHPTEFDFYLCSHAGIQGTSRPAHYHVLWDENKFTADGLQTLTNNLCYTYARCTRSVSIVPPAYYAHLAAFRARFYMEPDTSDSGSVASGATTSRGPPPGARNTRAGAANVAVRPLPALKENVKRVMFYC

SEQ ID NO: 184884 - protein, 329 aa, Zea Mays
MVIWSCSSCLHGFIPRAAWRRHYPLLSPRPPASPPPIHHFSSARRSTKKSAPKAPMGSSIPAAKALIDSSREPFYVIRKGDVIGVYKNLSDCQAQASKSVLHPSVTVYKGYSLRKETEEYLAARGFRNAVCSIGAADASDELFGDLVPCPFQQPDENTQSILKMSQGQEMETRSSEHPKVADLEPLPDSELSCILEFDGACKGNPGKSGAGVIIRRLDGSVIAVLREGLGIMTNNAAEYRALILGLNYASKKGFKYIRCQGDSKLVCNQVQGAWRARSDNMSILCDIAKELKETFLTFQINHVLREFNSDADVQANFGCQLAEKTRHGA

SEQ ID NO: 184885 - protein, 267 aa, Zea Mays
MVIWSCSSCLHGFIPRAAWRRHYPLLSPRPPASPPPIHHFSSARRSTKKSAPKAPMGSSIPAAKALIDSSREPFYVIRKGDVIGVYKNLSDCQAQASKSVLHPSVTVYKGYSLRKETEEYLAARGFRNAVCSIGAADASDELFGDLVPCPFQQPDENTQSILKMSQGQEMETRSSEHPKVADLEPLPDSELSCILEFDGACKGNPGKSGAGVIIRRLDGSVIAVLREGLGIMTNNAAEYRALILGLNYASKKGFKYIRCQGSRCLAC

SEQ ID NO: 184886 - protein, 283 aa, Zea Mays
MVIWSCSSCLHGFIPRAAWRRHYPLLSPRPPASPPPIHHFSSARRSTKKSAPKAPMGSSIPAAKALIDSSREPFYVIRKGDVIGVYKNLSDCQAQASKSVLHPSVTVYKGYSLRKETEEYLAARGFRNAVCSIGAADASDELFGDLVPCPFQQPDENTQSILKMSQGQEMETRSSEHPKVADLEPLPDSELSCILEFDGACKGNPGKSGAGVIIRRLDGSVVQGAWRARSDNMSILCDIAKELKETFLTFQINHVLREFNSDADVQANFGCQLAVDEVQELSV

SEQ ID NO: 184887 - protein, 176 aa, Zea Mays
MSQGQEMETRSSEHPKVADLEPLPDSELSCILEFDGACKGNPGKSGAGVIIRRLDGSVIAVLREGLGIMTNNAAEYRALILGLNYASKKGFKYIRCQGDSKLVCNQVQGAWRARSDNMSILCDIAKELKETFLTFQINHVLREFNSDADVQANFGCQLAGIDLAFELLATKQIPDD

SEQ ID NO: 184888 - protein, 850 aa, Zea Mays
MLNLGNLVDQQENAPGIPSISWGDVLSTSRSSLGLSTGGTAFVEPPSADQHVQDYGDCFSSSSFTEVFGRKSARLMASGVYGQSAGANDSGYDGDEPLGSMKEMEAQTIGDLLPDDDDLMSGIIDGFEYTGLSNQDDADEDIFYTGGGLELEHDDSNNVDKFRDVSFKIQLSEKHSIDKHHSRALIVKNINPGIEGSDLRALFQQYGDVQTFDTSCKSHGIVTVSYYDIRAAQDAVRAVHNKPLGLMKLDVQFSLPKENVPNKDPNNGTLVVSLIDSSISSHDLLQKFSVYGDVKEIYKSPTSCNKKFVEFYDIRAAQEALNDLNKGEISCSQIKVEHSFSGGAGSCFAEQYSGEQKQNAVAHQLKNSPPGTIGKLDTKSWDSSTVHNLYSPVRPQHDKSQHGFSVNPPQKLSSPIRIESTQQHSNQTAFGEHSGSLGHGNFGGGLQAFHPHSLPECHNGICNGYNSMTLNARNSNFRFTEGIDYNNHKVDHSDLHGHSSDQNEAIRVAGIGSCPLHGHHYTWSNSNGFPQSPSAPMMWPNFQQPVHMHCYPAMPPHIRRSAAHPMDQHHLGSAPNSVGGFANAHSFHPGSLESVGFPGSPQLYPSDLSVFASARGNYRETMFSAISAGFPSIQQILHATNGRNPMMHVSTSYDATNDRIRSRRHDGNAAQSENKKQFELDLDRIAKGEDSRTTLMIKNIPNKYTSKLLLAVIDENHRGTYDFIYLPIDFKNKCNVGYAFINMTDPQQIVPFYKTFNGKKWEKFNSEKVASLAYARIQGRNALIAHFQNSSLMNEEKWCRPMLFHKDGPNAGDQEPFPVGNNVRSRSGRNRPLSSGSETTKEASPSTSPN

SEQ ID NO: 184889 - protein, 133 aa, Zea Mays
MRMLQVRSAAKHKTGPFAETVFCGCRALPLYGANPTYDIVDLILSKNDPDVDTDSSSQAAFFCGSPPARTNNPVIHDPQFGKKAPSFSPLGSSSGKMAAGRAEVGSPSCRSSSPKMRIEGFACGNKEPPHCFA

SEQ ID NO: 184890 - protein, 747 aa, Zea Mays
MADPDDLGRRLAAVAVSESPTAAAAALESSNNNLFQVMRAVEDAEATIRQQLEENSRLKDELMLKTRELHRIRSEATDQASSHGIRIHQDRALGAHTDTSSTAPIRTTATAAEAFEWGAGDAGINHKYLEANQANGIPRKSPSAPDSAFPSQLSTPSSRSLSPTRHHKETDYDSRLNLSGQGALPVSDLNSNVVIWKQDLLVKVKEQGEEIAQLRRHLSDYSVKEAQILNEKHVLEKRIAYMRMAFDQQQQDLVDAASKALSYRQDIIEENIRLTYALQAAHQERSTFVSSLLPLLSEYNLQPPVLDAQSIVSNLKVLFKHLQEKLIITEEKLKESQYQITPWHAESSNNTSAAAQSPSHPPGNALIKANLDIVPQQAYSHVHSPVSSPVQTRRDWDLLGNENRQVIRSEVATTSAEHDNVGRTSPSTSHNMKDAPQRTDHDSRAVRFNIESKDQNPSFKDLIKSDASESLEGAEAQIPQELSAQQDSGGSPNLTSGLDDANPPYPYLPTVLEEPSSSFSEVAEDDPLPAIEGLRITGEAFPGRELQASGYSIHGTTSCNFEWVRHLDDGSINFIEGARQPTYLVSADDVDFVLAIEVQPLDDKKRKGEIVKVYANDQRKITCDPETKEHIKKILSLGHVSYEVLLPVRFLDMWEPAILAIKREGYSVKCNGQRGVVVMEKFQQAMTINIPFGRPTEFSILSADGAEYNLKPAENAPSRDAIVLILRLFRMKAVEKSKGKRKGIFFK

SEQ ID NO: 184891 - protein, 634 aa, Zea Mays
MADPDDLGRRLAAVAVSESPTAAAAALESSNNNLFQVMRAVEDAEATIRQQLEENSRLKDELMLKTRELHRIRSEATDQASSHGIRIHQDRALGAHTDTSSTAPIRTTATAAEAFEWGAGDAGINHKYLEANQANGIPRKSPSAPDSAFPSQLSTPSSRSLSPTRHHKETDYDSRLNLSGQGALPVSDLNSNVVIWKQDLLVKVKEQGEEIAQLRRHLSDYSVKEAQILNEKHVLEKRIAYMRMAFDQQQQDLVDAASKALSYRQDIIEENIRLTYALQAAHQERSTFVSSLLPLLSEYNLQPPVLDAQSIVSNLKVLFKHLQEKLIITEEKLKESQYQITPWHAESSNNTSAAAQSPSHPPGNALIKANLDIVPQQAYSHVHSPVSSPVQTRRDWDLLGNENRQVIRSEVATTSAEHDNVGRTSPSTSSHNMKDAPQRTDHDSRAVRFNIESKDQNPSFKDLIKSDASESLEGAEAQIPQELSAQQDSGGSPNLTSGLDDANPPYPYLPTVLEEPSSSFSEVAEDDPLPAIEGLRITGEAFPGRELQASGYSIHGTTSCNFEWVRHLDDGSINFIEGARQPTYLVSADDVDFVLAIEVQPLDDKKRKGEIVKVYANDQRKITCGEFLRVLFFK

SEQ ID NO: 184892 - protein, 705 aa, Zea Mays
MADPDDLGRRLAAVAVSESPTAAAAALESSNNNLFQVMRAVEDAEATIRQQLEENSRLKDELMLKTRELHRIRSEATDQASSHGIRIHQDRALGAHTDTSSTAPIRTTATAAEAFEWGAGDAGINHKYLEANQANGIPRKSPSAPDSAFPSQLSTPSSRSLSPTRHHKETDYDSRLNLSGQGALPVSDLNSNVVIWKQDLLVKVKEQGEEIAQLRRHLSDYSVKEAQILNEKHVLEKRIAYMRMAFDQQQQDLVDAASKALSYRQDIIEENIRLTYALQAAHQERSTFVSSLLPLLSEYNLQPPVLDAQSIVSNLKVLFKHLQEKLIITEEKLKESQYQITPWHAESSNNTSAAAQSPSHPPGNALIKANLDIVPQQAYSHVHSPVSSPVQTRRDWDLLGNENRQVIRSEVATTSAEHDNVGRTSPSTSSHNMKDAPQRTDHDSRAVRFNIESKDQNPSFKDLIKSDASESLEGAEAQIPQELSAQQDSGGSPNLTSGLDDANPPYPYLPTVLEEPSSSFSEVAEDDPLPAIEGLRITGEAFPGRELQASGYSIHGTTSCNFEWVRHLDDGSINFIEGARQPTYLVSADDVDFVLAIEVQPLDDKKRKGEIVKVYANDQRKITCDPETKEHIKKILSLGHVSYEVLLPVRFLDMWEPAILAIKREGYSVKCNGQRGVVVMEKFQQAMTITRCHCSNTKAIQDEGC

SEQ ID NO: 184893 - protein, 436 aa, Zea Mays
MADPDDLGRRLAAVAVSESPTAAAAALESSNNNLFQVMRAVEDAEATIRQQLEENSRLKDELMLKTRELHRIRSEATDQASSHGIRIHQDRALGAHTDTSSTAPIRTTATAAEAFEWGAGDAGINHKYLEANQANGIPRKSPSAPDSAFPSQLSTPSSRSLSPTRHHKETDYDSRLNLSGQGALPVSDLNSNVVIWKQDLLVKVKEQGEEIAQLRRHLSDYSVKEAQILNEKHVLEKRIAYMRMAFDQQQQDLVDAASKALSYRQDIIEENIRLTYALQAAHQERSTFVSSLLPLLSEYNLQPPVLDAQSIVSNLKVLFKHLQEKLIITELKESQYQITPWHAESSNNTSAAAQSPSHPPGNALIKANLDIVPQQAYSHVHSPVSSPVQTRRDWDLLGNENRQVIRSEVATTSAEHDNVGRTSPSTRLLVVTSKIQ

SEQ ID NO: 184894 - protein, 711 aa, Zea Mays
MADPDDLGRRLAAVAVSESPTAAAAALESSNNNLFQVMRAVEDAEATIRQQLEENSRLKDELMLKTRELHRIRSEATDQASSHGIRIHQDRALGAHTDTSSTAPIRTTATAAEAFEWGAGDAGINHKYLEANQANGIPRKSPSAPDSAFPSQLSTPSSRSLSPTRHHKETDYDSRLNLSGQGALPVSDLNSNVVIWKQDLLVKVKEQGEEIAQLRRHLSDYSVKEAQILNEKHVLEKRIAYMRMAFDQQQQDLVDAASKALSYRQDIIEENIRLTYALQVLFKHLQEKLIITEEKLKESQYQITPWHAESSNNTSAAAQSPSHPPGNALIKANLDIVPQQAYSHVHSPVSSPVQTRRDWDLLGNENRQVIRSEVATTSAEHDNVGRTSPSTSSHNMKDAPQRTDHDSRAVRFNIESKDQNPSFKDLIKSDASESLEGAEAQIPQELSAQQDSGGSPNLTSGLDDANPPYPYLPTVLEEPSSSFSEVAEDDPLPAIEGLRITGEAFPGRELQASGYSIHGTTSCNFEWVRHLDDGSINFIEGARQPTYLVSADDVDFVLAIEVQPLDDKKRKGEIVKVYANDQRKITCDPETKEHIKKILSLGHVSYEVLLPVRFLDMWEPAILAIKREGYSVKCNGQRGVVVMEKFQQAMTINIPFGRPTEFSILSADGAEYNLKPAENAPSRDAIVLILRLFRMKAVEKSKGKRKGIFFK

SEQ ID NO: 184895 - protein, 316 aa, Zea Mays
MKDAPQRTDHDSRAVRFNIESKDQNPSFKDLIKSDASESLEGAEAQIPQELSAQQDSGGSPNLTSGLDDANPPYPYLPTVLEEPSSSFSEVAEDDPLPAIEGLRITGEAFPGRELQASGYSIHGTTSCNFEWVRHLDDGSINFIEGARQPTYLVSADDVDFVLAIEVQPLDDKKRKGEIVKVYANDQRKITCDPETKEHIKKILSLGHVSYEVLLPVRFLDMWEPAILAIKREGYSVKCNGQRGVVVMEKFQQAMTINIPFGRPTEFSILSADGAEYNLKPAENAPSRDAIVLILRLFRMKAVEKSKGKRKGIFFK

SEQ ID NO: 184896 - protein, 1054 aa, Zea Mays
MARRPPPSPPPPAQGNGSGSGSLTTRDALAYLKAVKDKFQEKRHTYEQFIQVMRDFKSDRLDSTGVIARVKTIFHGYPDLILGFNAFLPKEHAIRPLDLREDKKPVDYPRAISLVNRIKSRFQQEEHVYKSFLGILNKYRMHNKPIQDVYNEVTALLHGHPDLLEEFSHFLPDTPMPPPQAGTTTKVRHDDNNAIMHSVTRAQTVQVNQQIIESPVFNSKSQTVQRGRDFPSTADWDTSADRLDLEHDIQKSCIEKEKIRDACPRQHRRGYKRNEKNDEYENEDLDVEQCGHKSQRKMEGTGDDTPGDATLSSFNCSHAQEFQFCEKLKAHLEPEAYQEFLKCLHIYNQDIITRNELKRLVKDILQHYPDLVNGFNDFLGHCENIDGFLEGTFNKRQTSRMVRPVEKERYKENEGDSDPEKERYKESKNSERVLTFNSKEGAAHEASTFPSKEKYNLCKPISELDLSNCQRCTPSYRLLPKNYPVPSASNRTDTEASVLNDRWVSVTSGSEDYSFKHMRKNQYEESLFRCEDDMFELDMLLESVTVAIERVEKLVERMEGNSLKPDSSISLDEHLTSLNMRCIERLYGDHGLDVIDVLRKNVGVTLPVILTRLKQKQEEWSRCQSDFNKVWAEVYSKNYHKSLDHRSFYFKQQDTKNLNTKALLSQIKEISEKNRKGDDVLLAIAAGNRWPLVANMSFVYLDMDIHEDLYQIIKYSCGELCNSSDQVNKVMRIWTTFLEPLLGIHHRAHGAEDADMVKSKRRTREVGLACGGKTNNAAAKGGNGSKSAGAESVAEFMGRNETIPSMKSIKHDRITSLYGVGVHPFSAYSVSHNNLRPETEEGELSPNGDFKEEHFCVFEDEAVDGTSKQNEGSTSRSPQGRPKNYLKFSGKDHSGAENEGNKRAQRSAEDSENASEADEDISGSESAGDEESSHEDQEEEEDDMDLDTKAKNDCRAEVNREAQGLDGGTSLSFSECLQSTVKPISKYVSTALPNHEKKLSHIFYGNDSFYVLFRLHQIFYERILSAKTNCSTSDNNWKASRHINSPDQYSSFKH

SEQ ID NO: 184897 - protein, 662 aa, Zea Mays
MARRPPPSPPPPAQGNGSGSGSLTTRDALAYLKAVKDKFQEKRHTYEQFIQVMRDFKSDRLDSTGVIARVKTIFHGYPDLILGFNAFLPKEHAIRPLDLREDKKPVDYPRAISLVNRIKSRFQQEEHVYKSFLGILNKYRMHNKPIQDVYNEVTALLHGHPDLLEEFSHFLPDTPMPPPQAGTTTKVRHDDNNAIMHSVTRAQTVQVNQQIIESPVFNSKSQTVQRGRDFPSTADWDTSADRLDLEHDIQKSCIEKEKIRDACPRQHRRGYKRNEKNDEYENEDLDVEQCGHKSQRKMEGTGDDTPGDATLSSFNCSHAQEFQFCEKLKAHLEPEAYQEFLKCLHIYNQDIITRNELKRLVKDILQHYPDLVNGFNDFLGHCENIDGFLEGTFNKRQTSRMVRPVEKERYKENEGDSDPEKERYKESKNSERVLTFNSKEGAAHEASTFPSKEKYNLCKPISELDLSNCQRCTPSYRLLPKNYPVPSASNRTDTEASVLNDRWVSVTSGSEDYSFKHMRKNQYEESLFRCEDDMFELDMLLESVTVAIERVEKLVERMEGNSLKPDSSISLDEHLTSLNMRCIERLYGDHGLDVIDVLRKNVGVTLPVILTRLKQKQEEWSRCQSDFNKVWAEVYSKNYHKSLDHRSFYFKQQDTKNLNTKD

SEQ ID NO: 184898 - protein, 1011 aa, Zea Mays
MARRPPPSPPPPAQGNGSGSGSLTTRDALAYLKAVKDKFQEKRHTYEQFIQVMRDFKSDRLDSTGVIARVKTIFHGYPDLILGFNAFLPKEHAIRPLDLREDKKPVDYPRAISLVNRIKSRFQQEEHVYKSFLGILNKYRMHNKPIQDVYNEVTALLHGHPDLLEEFSHFLPDTPMPPPQAGTTTKVRHDDNNAIMHSVTRAQTVQVNQQIIESPVFNSKSQTVQRGRDFPSTADWDTSADRLDLEHDIQKSCIEKEKIRDACPRQHRRGYKRNEKNDEYENEDLDVEQCGHKSQRKMEGTGDDTPGDATLSSFNCSHAQEFQFCEKLKAHLEPEAYQEFLKCLHIYNQDIITRNELKRLVKDILQHYPDLVNGFNDFLGHCENIDGFLEGTFNKRQTSRMVRPVEKERYKENEGDSDPEKERYKESKNSERVLTFNSKEGAAHEASTFPSKEKYNLCKPISELDLSNCQRCTPSYRLLPKNYPVPSASNRTDTEASVLNDRWVSVTSGSEDYSFKHMRKNQYEESLFRCEDDMFELDMLLESVTVAIERVEKLVERMEGNSLKPDSSISLDEHLTSLNMRCIERLYGDHGLDVIDVLRKNVGVTLPVILTRLKQKQEEWSRCQSDFNKVWAEVYSKNYHKSLDHRSFYFKQQDTKNLNTKALLSQIKEISEKNRKGDDVLLAIAAGNRWPLVANMSFVYLDMDIHEDLYQIIKYSCGELCNSSDQVNKVMRIWTTFLEPLLGIHHRAHGAEDADMVKSKRRTREVGLACGGKTNNAAAKGGNGSKSAGAESVAEFMGRNETIPSMKSIKHDRITSLYGVGVHPFSAYSVSHNNLRPETEEGELSPNGDFKEEHFCVFEDEAVDGTSKQNEGSTSRSPQGRPKNYLKFSGKDHSGAENEGNKRAQRSAEDSENASEADEDISGSESAGDEESSHEDQEEEEDDMDLDTKAKNDCRAEVNREAQGLDGGTSLSFSECLQSTVKPISKSFMREYCQLRQTVPHQTITGKLQGT

SEQ ID NO: 184899 - protein, 929 aa, Zea Mays
MHNKPIQDVYNEVTALLHGHPDLLEEFSHFLPDTPMPPPQAGTTTKVRHDDNNAIMHSVTRAQTVQVNQQIIESPVFNSKSQTVQRGRDFPSTADWDTSADRLDLEHDIQKSCIEKEKIRDACPRQHRRGYKRNEKNDEYENEDLDVEQCGHKSQRKMEGTGDDTPGDATLSSFNCSHAQEFQFCEKLKAHLEPEAYQEFLKCLHIYNQDIITRNELKRLVKDILQHYPDLVNGFNDFLGHCENIDGFLEGTFNKRQTSRMVRPVEKERYKENEGDSDPEKERYKESKNSERVLTFNSKEGAAHEASTFPSKEKYNLCKPISELDLSNCQRCTPSYRLLPKNYPVPSASNRTDTEASVLNDRWVSVTSGSEDYSFKHMRKNQYEESLFRCEDDMFELDMLLESVTVAIERVEKLVERMEGNSLKPDSSISLDEHLTSLNMRCIERLYGDHGLDVIDVLRKNVGVTLPVILTRLKQKQEEWSRCQSDFNKVWAEVYSKNYHKSLDHRSFYFKQQDTKNLNTKALLSQIKEISEKNRKGDDVLLAIAAGNRWPLVANMSFVYLDMDIHEDLYQIIKYSCGELCNSSDQVNKVMRIWTTFLEPLLGIHHRAHGAEDADMVKSKRRTREVGLACGGKTNNAAAKGGNGSKSAGAESVAEFMGRNETIPSMKSIKHDRITSLYGVGVHPFSAYSVSHNNLRPETEEGELSPNGDFKEEHFCVFEDEAVDGTSKQNEGSTSRSPQGRPKNYLKFSGKDHSGAENEGNKRAQRSAEDSENASEADEDISGSESAGDEESSHEDQEEEEDDMDLDTKAKNDCRAEVNREAQGLDGGTSLSFSECLQSTVKPISKYVSTALPNHEKKLSHIFYGNDSFYVLFRLHQIFYERILSAKTNCSTSDNNWKASRHINSPDQYSRYYQHSGFIKDLLYMTYIF

SEQ ID NO: 184900 - protein, 552 aa, Zea Mays
MRKNQYEESLFRCEDDMFELDMLLESVTVAIERVEKLVERMEGNSLKPDSSISLDEHLTSLNMRCIERLYGDHGLDVIDVLRKNVGVTLPVILTRLKQKQEEWSRCQSDFNKVWAEVYSKNYHKSLDHRSFYFKQQDTKNLNTKALLSQIKEISEKNRKGDDVLLAIAAGNRWPLVANMSFVYLDMDIHEDLYQIIKYSCGELCNSSDQVNKVMRIWTTFLEPLLGIHHRAHGAEDADMVKSKRRTREVGLACGGKTNNAAAKGGNGSKSAGAESVAEFMGRNETIPSMKSIKHDRITSLYGVGVHPFSAYSVSHNNLRPETEEGELSPNGDFKEEHFCVFEDEAVDGTSKQNEGSTSRSPQGRPKNYLKFSGKDHSGAENEGNKRAQRSAEDSENASEADEDISGSESAGDEESSHEDQEEEEDDMDLDTKAKNDCRAEVNREAQGLDGGTSLSFSECLQSTVKPISKYVSTALPNHEKKLSHIFYGNDSFYVLFRLHQIFYERILSAKTNCSTSDNNWKASRHINSPDQYSRYYQHSGFIKDLLYMTYIF

SEQ ID NO: 184901 - protein, 1247 aa, Zea Mays
MARRPPPSPPPPAQGNGSGSGSLTTRDALAYLKAVKDKFQEKRHTYEQFIQVMRDFKSDRLDSTGVIARVKTIFHGYPDLILGFNAFLPKEHAIRPLDLREDKKPVDYPRAISLVNRIKSRFQQEEHVYKSFLGILNKYRMHNKPIQDVYNEVTALLHGHPDLLEEFSHFLPDTPMPPPQAGTTTKVRHDDNNAIMHSVTRAQTVQRGRDFPSTADWDTSADRLDLEHDIQKSCIEKEKIRDACPRQHRRGYKRNEKNDEYENEDLDVEQCGHKSQRKMEGTGDDTPGDATLSSFNCSHAQEFQFCEKLKAHLEPEAYQEFLKCLHIYNQDIITRNELKRLVKDILQHYPDLVNGFNDFLGHCENIDGFLEGTFNKIFWNIGQTSRMVRPVEKERYKENEGDSDPEKERYKESKNSERVLTFNSKEGAAHEASTFPSKEKYNLCKPISELDLSNCQRCTPSYRLLPKNYPVPSASNRTDTEASVLNDRWVSVTSGSEDYSFKHMRKNQYEESLFRCEDDMFELDMLLESVTVAIERVEKLVERMEGNSLKPDSSISLDEHLTSLNMRCIERLYGDHGLDVIDVLRKNVGVTLPVILTRLKQKQEEWSRCQSDFNKVWAEVYSKNYHKSLDHRSFYFKQQDTKNLNTKALLSQIKEISEKNRKGDDVLLAIAAGNRWPLVANMSFVYLDMDIHEDLYQIIKYSCGELCNSSDQVNKVMRIWTTFLEPLLGIHHRAHGAEDADMVKSKRRTREVGLACGGKTNNAAAKGGNGSKSAGAESVAEFMGRNETIPSMKSIKHDRITSLYGVGVHPFSAYSVSHNNLRPETEEGELSPNGDFKEEHFCVFEDEAVDGTSKQNEGSTSRSPQGRPKNYLKFSGKDHSGAENEGNKRAQRSAEDSENASEADEDISGSESAGDEESSHEDQEEEEDDMDLDTKAKNDCRAEVNREAQGLDGGTSLSFSECLQSTVKPISKYVSTALPNHEKKLSHIFYGNDSFYVLFRLHQIFYERILSAKTNCSTSDNNWKASRHINSPDQYSRFISALYNLLDGSSDHTKFEDDCRSIIGTQSYVLFTIDKLIYKIVKQLQALASDEMDNQLLQLYLYEKSRSPGSFFDLVYHENARALLHDDNIYRFECHSDPTELTIQLMEYGNEKPELTAVSFDPTFSPYLYNGYLSSIDDTKLVDDVFLRRNKRKQGRNDDSPTSLKIMDNVMFANGLECKISCESSKVSYVLDTEDVLFRTRKRRSSI

SEQ ID NO: 184902 - protein, 527 aa, Zea Mays
MEGTGDDTPGDATLSSFNCSHAQEFQFCEKLKAHLEPEAYQEFLKCLHIYNQDIITRNELKRLVKDILQHYPDLVNGFNDFLGHCENIDGFLEGTFNKIFWNIGQTSRMVRPVEKERYKENEGDSDPEKERYKESKNSERVLTFNSKEGAAHEASTFPSKEKYNLCKPISELDLSNCQRCTPSYRLLPKNYPVPSASNRTDTEASVLNDRWVSVTSGSEDYSFKHMRKNQYEESLFRCEDDMFELDMLLESVTVAIERVEKLVERMEGNSLKPDSSISLDEHLTSLNMRCIERLYGDHGLDVIDVLRKNVGVTLPVILTRLKQKQEEWSRCQSDFNKVWAEVYSKNYHKSLDHRSFYFKQQDTKNLNTKALLSQIKEISEKNRKGDDVLLAIAAGNRWPLVANMSFVYLDMDIHEDLYQIIKYSCGELCNSSDQVNKVMRIWTTFLEPLLGIHHRAHGAEDADMVKSKRRTREVGLACGGKTNNAAAKGGNGSKSAGAESVAEFMGRNETIPSMKDNIFVWSGCTSI

SEQ ID NO: 184903 - protein, 566 aa, Zea Mays
MSFVYLDMDIHEDLYQIIKYSCGELCNSSDQVNKVMRIWTTFLEPLLGIHHRAHGAEDADMVKSKRRTREVGLACGGKTNNAAAKGGNGSKSAGAESVAEFMGRNETIPSMKSIKHDRITSLYGVGVHPFSAYSVSHNNLRPETEEGELSPNGDFKEEHFCVFEDEAVDGTSKQNEGSTSRSPQGRPKNYLKFSGKDHSGAENEGNKRAQRSAEDSENASEADEDISGSESAGDEESSHEDQEEEEDDMDLDTKAKNDCRAEVNREAQGLDGGTSLSFSECLQSTVKPISKYVSTALPNHEKKLSHIFYGNDSFYVLFRLHQIFYERILSAKTNCSTSDNNWKASRHINSPDQYSRFISALYNLLDGSSDHTKFEDDCRSIIGTQSYVLFTIDKLIYKIVKQLQALASDEMDNQLLQLYLYEKSRSPGSFFDLVYHENARALLHDDNIYRFECHSDPTELTIQLMEYGNEKPELTAVSFDPTFSPYLYNGYLSSIDDTKLVDDVFLRRNKRKQGRNDDSPTSLKIMDNVMFANGLECKISCESSKVSYVLDTEDVLFRTRKRRSSI

SEQ ID NO: 184904 - protein, 72 aa, Zea Mays
MIKDYLNWPHALDMGQGKLEPGYSIHEKTIAHWEWRDGESGTYPSGKGPPKKGGVLSGGADLFMQWRIHGNG

SEQ ID NO: 184905 - protein, 324 aa, Zea Mays
MNRVFDAIGFVYLDYRYPLRGQGEKRKAAASAAPVEPAPKGKKMKVLTHRPRYIEPAAIPEFSEGASSATKTKETIPPAHRTEEPAIMLKLPLVELVETKADKDKAEGSKIEEIAKMPEILSPSIEAIVPKTHKNFATTPKRRRMAIVLDVVLEIAKSLSSTPRKITKALKAQPKAETKQAEVDAITTQVETEAGPSEPAGTEPVETEEKVAEKIASEKVEAAATEASKESIDYIIRHASGKRLSQEEKLEALHYAQKLKYPKGALVYNGSGEEDFLYCLPDNKEISVCWEIGRSIGFPKLEDVLSILSKDELADSLAYNSIKV

SEQ ID NO: 184906 - protein, 69 aa, Zea Mays
MPKMHPDSDCDKLDMVGKITRLSNQPNWFHPKIHQESTGIVETTQRSDSVLVLRHRLLGRWAVYRVGAH

SEQ ID NO: 184907 - protein, 66 aa, Zea Mays
MHPDSDCDRLNMVGKITRLSNKPNWFHPKIHPESTGIVETTQRSDSVLVLRHHLLGRWVVYRVGAH

SEQ ID NO: 184908 - protein, 67 aa, Zea Mays
MFGFCLDQFYHRTVSPSSACETPSRNQYNFGCVSFLFLLVFLIALAEISLPGEVIRVSRVITNGAVV

SEQ ID NO: 184909 - protein, 87 aa, Zea Mays
MSQSAATLSRVPGPVCTKMDAQDASGLRLRRTGHGWKDNEINHPNWFHPKIHPESTGIVETSQRSDSVLVLRHRLLGCWVEYRVGAH

SEQ ID NO: 184910 - protein, 99 aa, Zea Mays
MNFRVEPVGLVRQSRYLSNHIQSVAIGVRMHLGRPFSCRLVLEPKIVAADSDLIPFMLWTPLLLLINTLAFLKSLLVLSKVPNQVWVTPEWSQESAVKI

SEQ ID NO: 184911 - protein, 56 aa, Zea Mays
MLMIQGSERTVPRNHYTTAPLVITRDTRMTSPRRLITASAIKNTSKNRKETQPKLY

SEQ ID NO: 184912 - protein, 53 aa, Zea Mays
MLNMCRDTLPHIQLFIGLGFGQISLPALSSSHSPLWGRGDPGVLLVLTFPTAT

SEQ ID NO: 184913 - protein, 73 aa, Zea Mays
MAFILIYTYIWLCLENEEEIEVTQEKTSPPLKSQAGTWLYFDICESEPDSPINKGKPRCMQPLPCVFKYFSHT

SEQ ID NO: 184914 - protein, 89 aa, Zea Mays
MGKLEPGYSIHEKTIAHWEWRDGESGTYPHDKGPPKRGGVLSGGADLFMWWRIRGNGRHLQKSLREAYVVWLEIPSWVLIDSDRRTSRI

SEQ ID NO: 184915 - protein, 111 aa, Zea Mays
MVGINLDQMLSRKGRPFVSLKDCSDCWPVDLGPFNWPHASSWVSFASVGPIPEQLTRTGSGEMARVACTLRGKRLEGGVLYSRKHGGHHGESNVYQLGQWLDGGVLCSRVA

SEQ ID NO: 184916 - protein, 569 aa, Zea Mays
MPTVSVGRDRLLAAIGRTYTQEEFEALCFEFGIELDDVTTEKAIIRKEKHLEDDSEVDEDDEVIYKIEVAANRYDLLCLEGLARALRVFTGTEASPVFQVSSIPRGSMLQMHVKPETSKIRPYIVCAVLRGVTFDEARYNSFIDLQDKLHQNICRKRTLVAIGTHDLDTLQGPFSYEALPPNEINFVPLKQEKSFRADKLMEFYKSDMKLKKFLHIIENSPVYPVIYDSNRTVLSLPPIINGAHSAITLATRNVFIECTATDLTKANIVLNTMVTMFSEYCETKFEVEPVEVIHHDGRKTVYPDLSCYKMDVLLSDILGPIGISQDEKQVVCLLNKMQLQAESHSLKGEARISVSVPPTRSDILHARDLSEDVAIAYGFNNVPKSKPKCMTIGGRQPLNRFSDKIRAEVARAGYMEVLTFILSSHEENFDMLNRTDDKSKAVIIANPRTSEFEIFEVGDVVMLDSSRDVGASNNRRLAALYCNRVSGFEEIMGLVDSIVKVVRAPHVNFGENYYVPTDEPEFFPKRQCKIVTSDGKQVGYLGIVHAEVLRKFGIPDPCTFVEMDLEALL

SEQ ID NO: 184917 - protein, 68 aa, Zea Mays
MLEADTSYLPHIGFVRKHGGVPARSAYYPSCSISMYFSIALDFAVGKKGTTIQQIPSLIFVLGIMFAL

SEQ ID NO: 184918 - protein, 281 aa, Zea Mays
MHVSPSRHTCPYARKPRTYLERACDDPTASLSRPRLRLRDRLRLRLRLDGHRTGRSDPARRCQCQQGRRRRRERGGRLGSQQEAGRRPRKQQQAWAPFARRRGVLLRGAHGAVVLRRGAVATVAQDRHGVDCGGGAGRVGGVGGGAGAGGVDGVGGGRAARAPGSHAAPLCRAPGRRPRMGATRAVQPRRGARGPRLLRRHGRGRRGVRARVRRRQPRGWRPREARRRLGRHPRRRQLQDALRSPESRTSPPSLFTHVHVRSILCTLLCFFLACAVFRLYY

SEQ ID NO: 184919 - protein, 599 aa, Zea Mays
MISAVSMPVVTSSGTIPVVVSSATVPSLRYDDCTMCQKALPHAHSDNIIREQGNSRATGNLEAAPMFYSPHQDSGSNKSSLGASSGTPTNYVAEPRAGNTAVMTQFNSTLPARKPAVQATASPDTGVPVQPTVIPLPVSSAPAPDGVFVGHSPQAGAEDPVRYQQQLFSYSMQPAQVLVNGPQGIDASAYKDSNHPAAEPLREYAHNLLHDYARAIDVHTQAVHLGPIAPPESTVHGKPSTYGIIDHAKVGKLPLNIDGSSIYKSQAGGYHIGITNAFAAPAFNQEENISRHSEKPRYAFDIGTQNVHPDIIQQPPNLAVQSNLIAPIEPPGSNEKVTVLPSNSGAQVPSGSPVQRPKEMANHLVSIPPNGSNKFPLQSTVGIDRVEGTQEPAYADSLFSNQDPWKAVGNASLVPPRPNKLTKESVVSGGQYIDGHMPDMNMHAAIPSEEDSCFKDMHTVKLNKGPGEDSIKRQLQAVAEGVAASVLQPPFPEKTVVFSGDHIDSHGAEVDVKFQDEGNNQSDKISQGVQVLDDNDNLQIIKNSDLEELRELGSGTFGTVYHGKWRGSDVAIKRINDRCFAGKASEQERMMDLVDLLQR

SEQ ID NO: 184920 - protein, 967 aa, Zea Mays
MASRGAVAPAVDPSSPSSRAWGGEDETPGAGKVKLMCSYGGRIAPRPGDGALRYVGGQTRLISVPRAASFGELLRKVEAVDEASASSGGVLLRYQLPGEDLDSLISVSGPEDYDNMMEEYEKLAAAAPDGSAKLRVFLFPASGSDAAGSGSGSHLVAAVDESGQRYIDTINCVSAEAMAVAMRPKDSVASAGSSAHNSEASEYSGLVEEPSTLPPHQVAPAYATPHQPPQVTTYVQQQPQVTHYVQHQHPQSAAYVQQVPQSYIEPQQVQYINTQQFGGHGVPQSVNYVPVHMNQFMPSIPVTGSLATTAAQGSTFRPASAGAEPVLETTQFTRPVQAQVDHSYRVVQTPLSQLPPLSSVHQQANDAQRQRFGVQQAMISAVSMPVVTSSGTIPVVVSSATVPSLRYDDCTMCQKALPHAHSDNIIREQGNSRATGNLEAAPMFYSPHQDSGSNKSSLGASSGTPTNYVAEPRAGNTAVMTQFNSTLPARKPAVQATASPDTGVPVQPTVIPLPVSSAPAPDGVFVGHSPQAGAEDPVRYQQQLFSYSMQPAQVLVNGPQGIDASAYKDSNHPAAEPLREYAHNLLHDYARAIDVHTQAVHLGPIAPPESTVHGKPSTYGIIDHAKVGKLPLNIDGSSIYKSQAGGYHIGITNAFAAPAFNQEENISRHSEKPRYAFDIGTQNVHPDIIQQPPNLAVQSNLIAPIEPPGSNEKVTVLPSNSGAQVPSGSPVQRPKEMANHLVSIPPNGSNKFPLQSTVGIDRVEGTQEPAYADSLFSNQDPWKAVGNASLVPPRPNKLTKESVVSGGQYIDGHMPDMNMHAAIPSEEDSCFKDMHTVKLNKGPGEDSIKRQLQAVAEGVAASVLQPPFPEKTVVFSGDHIDSHGAEVDVKFQDEGNNQSDKISQGVQVLDDNDNLQIIKNSDLEELRELGSGTFGTVYHGKWRGSDVAIKRINDRCFAGKASEQERM

SEQ ID NO: 184921 - protein, 343 aa, Zea Mays
MASRGAVAPAVDPSSPSSRAWGGEDETPGAGKVKLMCSYGGRIAPRPGDGALRYVGGQTRLISVPRAASFGELLRKVEAVDEASASSGGVLLRYQLPGEDLDSLISVSGPEDYDNMMEEYEKLAAAAPDGSAKLRVFLFPASGSDAAGSGSGSHLVAAVDESGQRYIDTINCVSAEAMAVAMRPKDSVASAGSSAHNSEASEYSGLVEGPGEDSIKRQLQAVAEGVAASVLQPPFPEKTVVFSGDHIDSHGAEVDVKFQDEGNNQSDKISQGVQVLDDNDNLQIIKNSDLEELRELGSGTFGTVYHGKWRGSDVAIKRINDRCFAGKASEQERMMDLVDLLQR

SEQ ID NO: 184922 - protein, 997 aa, Zea Mays
MASRGAVAPAVDPSSPSSRAWGGEDETPGAGKVKLMCSYGGRIAPRPGDGALRYVGGQTRLISVPRAASFGELLRKVEAVDEASASSGGVLLRYQLPGEDLDSLISVSGPEDYDNMMEEYEKLAAAAPDGSAKLRVFLFPASGSDAAGSGSGSHLVAAVDESGQRYIDTINCVSAEAMAVAMRPKDSVASAGSSAHNSEASEYSGLVEGMSPRAVPPPASAATEYSYSEPSTLPPHQVAPAYATPHQPPQVTTYVQQQPQVTHYVQHQHPQSAAYVQQVPQSYIEPQQVQYINTQQFGGHGVPQSVNYVPVHMNQFMPSIPVTGSLATTAAQGSTFRPASAGAEPVLETTQFTRPVQAQVDHSYRVVQTPLSQLPPLSSVHQQANDAQRQRFGVQQAMISAVSMPVVTSSGTIPVVVSSATVPSLRYDDCTMCQKALPHAHSDNIIREQGNSRATGNLEAAPMFYSPHQDSGSNKSSLGASSGTPTNYVAEPRAGNTAVMTQFNSTLPARKPAVQATASPDTGVPVQPTVIPLPVSSAPAPDGVFVGHSPQAGAEDPVRYQQQLFSYSMQPAQVLVNGPQGIDASAYKDSNHPAAEPLREYAHNLLHDYARAIDVHTQAVHLGPIAPPESTVHGKPSTYGIIDHAKVGKLPLNIDGSSIYKSQAGGYHIGITNAFAAPAFNQEENISRHSEKPRYAFDIGTQNVHPDIIQQPPNLAVQSNLIAPIEPPGSNEKVTVLPSNSGAQVPSGSPVQRPKEMANHLVSIPPNGSNKFPLQSTVGIDRVEGTQEPAYADSLFSNQDPWKAVGNASLVPPRPNKLTKESVVSGGQYIDGHMPDMNMHAAIPSEEDSCFKDMHTVKLNKGPGEDSIKRQLQAVAEGVAASVLQPPFPEKTVVFSGDHIDSHGAEVDVKFQDEGNNQSDKISQGVQVLDDNDNLQIIKNSDLEELRELGSGTFGTVYHGKWRGSDVAIKRINDRCFAGKASEQERMTSLHLCTIQT

SEQ ID NO: 184923 - protein, 350 aa, Zea Mays
MEAAAPAPARGLGRQEYAVLALTFASYASFHASRKPPSIVKAVLSADWVPFSGPRGPHRLGELDVAFLSFYALAMFAAGHLADRADLRCLLGTAMLASGAACAALGAAYFLDIHALAFFAAAQVSSGVVQSAGWPCVVAVVGNWFGHASKRGTIMGVWNSHTSVGNIAGSVLAAAALEFGWGWSFLLPAVVIAALGVVVLVFLVAHPSEAGLDVEVMEDKKEVQGNEDNEFELEMGSQLPRAIGFVEAWKLPGVAPYAFCLFFSKLVAYTFLYWLPFYIRNNAVAGQFLSHKASGILSIVFDIGGVLGGISAGFLSDAIGARAITSLLQLILAPKTLSREIHGRWRRFLR

SEQ ID NO: 184924 - protein, 500 aa, Zea Mays
MHESQVSLFKYTFFWILLLCSKFSFSYFVQIQPLIKPTKDVMGVHNIHYEWHEFFPNASYNIGAIMSLWAPVLLVYLMDTQIWYAIFSTIFGGMTGALGRLGEIRTLGMLRSRFHSLPGAFNTYLVPSDKSKNRRFSLSKRFAEVSPNKRTEAAKFAQLWNEVICSFREEDLISDGEMDLLVVPYSSDPSLKLMQWPLFLLASKIPIALDMAAQFRPRDSDLWKRICADEYMKCAVLECYESFKLVLNLLVVGENEKRIIGIIIKEIEGNIGKNTFLANFRMSALPVLCKKFVELVSTLKERDASKFDNVVLLLQDMLEVITRDMMVNEIRELAEFGHGNKDSVPRRQLFAGSGTKPAIVFPPPVSAQWEEQIKRLYLLLTVKESAMDVPTNLEARRRIAFFTNSLFMDMPRAPRVRKMLSFSVMTPYYSEETVYSKSDLDLENEDGVSIIFYLQKIFPDEWNNFMERNNCKRESEVWGNDENVLQLRHWASLRGQTLCR

SEQ ID NO: 184925 - protein, 453 aa, Zea Mays
MGVHNIHYEWHEFFPNASYNIGAIMSLWAPVLLVYLMDTQIWYAIFSTIFGGMTGALGRLGEGFEGFLDLCEKVFFLIQCPGAILPLQVSPNKRTEAAKFAQLWNEVICSFREEDLISDGAAENFLLHREMDLLVVPYSSDPSLKLMQWPLFLLASKIPIALDMAAQFRPRDSDLWKRICADEYMKCAVLECYESFKLVLNLLVVGENEKRIIGIIIKEIEGNIGKNTFLANFRMSALPVLCKKFVELVSTLKERDASKFDNVVLLLQDMLEVITRDMMVNEIRELAEFGHGNKDSVPRRQLFAGSGTKPAIVFPPPVSAQWEEQIKRLYLLLTVKESAMDVPTNLEARRRIAFFTNSLFMDMPRAPRVRKMLSFSVMTPYYSEETVYSKSDLDLENEDGVSIIFYLQKIFPDEWNNFMERNNCKRESEVWGNDENVLQLRHWASLRGQTLCR

SEQ ID NO: 184926 - protein, 370 aa, Zea Mays
MNFFQMVYLMDTQIWYAIFSTIFGGMTGALGRLGEIRTLGMLRSRFHSLPGAFNTYLVPSDKSKNRRFSLSKRFAEVSPNKRTEAAKFAQLWNEVICSFREEDLISDGEMDLLVVPYSSDPSLKLMQWPLFLLASKIPIALDMAAQFRPRDSDLWKRICADEYMKCAVLECYESFKLVLNLLVVGENEKRIIGIIIKEIEGNIGKNTFLANFRMSALPVLCKKFVELVSTLKERDASKFDNVVLLLQDMLEVITRDMMVNEIRELAEFGHGNKDSVPRRQLFAGSGTKPAIVFPPPVSAQWEEQIKRLYLLLTVKESAMDVPTNLEARRRIAFFTNSLFMDMPRAPRYLMLSQYHNSYVSLDPIQEFLKK

SEQ ID NO: 184927 - protein, 492 aa, Zea Mays
MAWLMRGARAGTVARLVRGRVLGKAARFVGEARALTRVRARGGSSARGWGAGWDVGRGARSGAFGRVYLMDTQIWYAIFSTIFGGMTGALGRLGEIRTLGMLRSRFHSLPGAFNTYLVPSDKSKNRRFSLSKRFAEVSPNKRTEAAKFAQLWNEVICSFREEDLISDGEMDLLVVPYSSDPSLKLMQWPLFLLASKIPIALDMAAQFRPRDSDLWKRICADEYMKCAVLECYESFKLVLNLLVVGENEKRIIGIIIKEIEGNIGKNTFLANFRMSALPVLCKKFVELVSTLKERDASKFDNVVLLLQDMLEVITRDMMVNEIRELAEFGHGNKDSVPRRQLFAGSGTKPAIVFPPPVSAQWEEQIKRLYLLLTVKESAMDVPTNLEARRRIAFFTNSLFMDMPRAPRVRKMLSFSVMTPYYSEETVYSKSDLDLENEDGVSIIFYLQKIFPDEWNNFMERNNCKRESEVWGNDENVLQLRHWASLRGQTLCR

SEQ ID NO: 184928 - protein, 54 aa, Zea Mays
MVLPCPKDSNQRWTELTRCRCGDGVVHKHSISLFRSRYTLALISTAPHQRSQTR

SEQ ID NO: 184929 - protein, 414 aa, Zea Mays
MLSHPLAEMAVPMVVLCIIRLAKLAMHISHLVKMAVPMVEMHITHYHLCSHLDSGCHREIGHGRFLSCMGAVWHPECFRCHACSQPIYDYEFSMSGNHPYHKTCYKEQFHPKCDVCKQFIPTNMNGLIEYRAHPFWVQKYCPSHEMDGTPRCCSCERMEPRESKYVLLDDGRKLCLECLDSAVMDTNDCQPLYLEIQEFYEGLNMKVEQQVPLLLVERQALNEAMEGEKAGHHHLPETRGLCLSEEQTVSTILRPRMAGNKIMGMITEPYRLTRRCEVTAILILYGLPRLLTGSILAHEMMHAWLRLKGYRTLSPDVEEGICQVLAHMWIESEIMAGSGSSAASSSSGSSSSTSSKKGGRSQFEHRLGDFFKHQIETDTSMAYGDGFRTGNRAVLHYGLKRTLEHIRLTGTFPF

SEQ ID NO: 184930 - protein, 346 aa, Zea Mays
MGAVWHPECFRCHACSQPIYDYEFSMSGNHPYHKTCYKEQFHPKCDVCKQFIPTNMNGLIEYRAHPFWVQKYCPSHEMDGTPRCCSCERMEPRESKYVLLDDGRKLCLECLDSAVMDTNDCQPLYLEIQEFYEGLNMKVEQQVPLLLVERQALNEAMEGEKAGHHHLPETRGLCLSEEQTVSTILRPRMAGNKIMGMITEPYRLTRRCEVTAILILYGLPRLLTGSILAHEMMHAWLRLKGYRTLSPDVEEGICQVLAHMWIESEIMAGSGSSAASSSSGSSSSTSSKKGGRSQFEHRLGDFFKHQIETDTSMAYGDGFRTGNRAVLHYGLKRTLEHIRLTGTFPF

SEQ ID NO: 184931 - protein, 88 aa, Zea Mays
MKGVSRFRVRGKLAPRYIGSFPILERCQQVAYRLQLPESLSAVHNVFHVSQLKKCLRIPDRTMDVVDVHLEPDLTYSEHPIRVLDEKD

SEQ ID NO: 184932 - protein, 68 aa, Zea Mays
MPWIWDRVSLNSAIPCMKRQSRTGSGEMARVARTLLAKDRLKGVVCSRVAWTCSCSGGSVGTVDICKG

SEQ ID NO: 184933 - protein, 64 aa, Zea Mays
MMSVRVLNSASGAGAVCSNVEVPSEKVERRAQALRAGTGAAGVGLFRAGFGPGTIHRFSSLFSW

SEQ ID NO: 184934 - protein, 602 aa, Zea Mays
MTMPASSPSVGSACDPPPPPPPPPPRAMKRELAFALQSLSEISASHGRTRSGRPISSLPDPSASASLKRRKRSDPPAPAPAPAPAPAADLVSPPTPPIDAEPPNQPLRDIIQPLHGSNPPTASDHRFDSNADQEVLAMEVIAKPNLPAEEDIAADDSAMEVTAKSNVAAADGVSKPNVSAEDTASKSNVAATVAVAPTLLETAIAAGNDQCDTSNSNGENLQQQAVENVLVSTTMLAEDTVTPAAAAGLKPARRFTRSLLKNNKPDKEESASCESQATPDGSKDASVGFTLLLEKPQRRFTRSLLKTKVESSLVGSDDVLDSASDSPPSVKKMEMKMSKKVACLTKHPGNIRELLNTGMLEGMPVMYIIPHSKKAVLKGVITGCNIRCFCLSCNGAKAISAYYFEQHAGSTKKHPADYIYLGNGNSLRDVLRASDRSPLEALEETIRSSIDPVVKRSRINCLNCNELVLPSSHENVLCQVCLESKQPQDPLTASYTCNGSSSLSRSSKEALLRNISSGKKGGSAGKVTNKDNRLHKLVFNVLLDGTEVAYYVDGQRKVDGYIKDHRIYCNHCNRVVSPSAFEAHAGMITYSHQTEYHCMSWR

SEQ ID NO: 184935 - protein, 988 aa, Zea Mays
MTMPASSPSVGSACDPPPPPPPPPPRAMKRELAFALQSLSEISASHGRTRSGRPISSLPDPSASASLKRRKRSDPPAPAPAPAPAPAADLVSPPTPPIDAEPPNQPLRDIIQPLHGSNPPTASDHRFDSNADQEVLAMEVIAKPNLPAEEDIAADDSAMEVTAKSNVAAADGVSKPNVSAEDTASKSNVAATVAVAPTLLETAIAAGNDQCDTSNSNGENLQQQAVENVLVSTTMLAEDTVTPAAAAGLKPARRFTRSLLKNNKPDKEESASCESQATPDGSKDASVGFTLLLEKPQRRFTRSLLKTKVESSLVGSDDVLDSASDSPPSVKKMEMKMSKKVACLTKHPGNIRELLNTGMLEGMPVMYIIPHSKLQKAVLKGVITGCNIRCFCLSCNGAKAISAYYFEQHAGSTKKHPADYIYLGNGNSLRDVLRASDRSPLEALEETIRSSIDPVVKRSRINCLNCNELVLPSSHENVLCQVCLESKQPQDPLTASYTCNGSSSLSRSSKEALLRNISSGKKGGSAGKVTNKDNRLHKLVFNVLLDGTEVAYYVDGQRKVDGYIKDHRIYCNHCNRVVSPSAFEAHAGEGSRRKPYDNIFTSNGVSLHELAMKISKDMELSERETDDLCRECGQGGDIFPCKICPRSFHPACVGLSKVPAEWYCDSCRNLVQKEKALAKNKNAKAAGRQAGVDSIEQIMKRAIRIVPISDDLGGCALCKQKDFNNAVFDERTVILCDQCEKEYHVGCLQSQWQVELKELPEEEWFCCSSCSETRSSLDKIISDGAQLLADPDLEIIKKKHETRGLCMDTSKDLKWQLLSGKRATEDGSILLSAAVPIFHQSFDPIREALTGRDLIPEMVNGRGPKEGMPGQDYSGMYCALLTVGSTVVSAALLRVMGGDVAELPLVATSQDVQGLGYFQALFSCIERVLVSLKIKHFVLPAAHEAEGIWMNKFGFSRISPEELEAYLNGAHLTIFHGTSYMYKAVPVS

SEQ ID NO: 184936 - protein, 729 aa, Zea Mays
MTMPASSPSVGSACDPPPPPPPPPPRAMKRELAFALQSLSEISASHGRTRSGRPISSLPDPSASASLKRRKRSDPPAPAPAPAPAPAADLVSPPTPPIDAEPPNQPLRDIIQPLHGSNPPTASDHRFDSNADQEVLAMEVIAKPNLPAEEDIAADDSAMEVTAKSNVAAADGVSKPNVSAEDTASKSNVAATVAVAPTLLETAIAAGNDQCDTSNSNGENLQQQAVENVLVSTTMLAEDTVTPAAAAGLKPARRFTRSLLKNNKPDKEESASCESQATPDGSKDASVGFTLLLEKPQRRFTRSLLKTKVESSLVGSDDVLDSASDSPPSVKKMEMKMSKKVACLTKHPGNIRELLNTGMLEGMPVMYIIPHSKKAVLKGVITGCNIRCFCLSCNGAKAISAYYFEQHAGSTKKHPADYIYLGNGNSLRDVLRASDRSPLEALEETIRSSIDPVVKRSRINCLNCNELVLPSSHENVLCQVCLESKQPQDPLTASYTCNGSSSLSRSSKEALLRNISSGKKGGSAGKVTNKDNRLHKLVFNVLLDGTEVAYYVDGQRKVDGYIKDHRIYCNHCNRVVSPSAFEAHAGEGSRRKPYDNIFTSNGVSLHELAMKISKDMELSERETDDLCRECGQGGDIFPCKICPRSFHPACVGLSKVPAEWYCDSCRNLVQKEKALAKNKNAKAAGRQAGVDSIEQIMKRAIRIVPISDDLGGCALCKKISTMLCLMSAL

SEQ ID NO: 184937 - protein, 249 aa, Zea Mays
MSVGSRRRPPPPHHHRRAMTPASSVSVPAPVPAPPKPLYLRGPVIAGAVALAAFLLLAAAYATRRAGSPPAALLSHPAVSTRFFSFDLVREYPHDPAAFTQGILYAGNDTLFESTGLYGRSSVRKVELQTGKVLVNHQMDGDVFGEGLTLLGDRLFQVTWLKNDGFIYDRHNFSKCTSFTHKMRDGWGLATDGKVLFGSDGTSMLYKLDSKSLEVMKVVTVKYHGNQVPYLNELEYIDGEVWANVWQIA

SEQ ID NO: 184938 - protein, 259 aa, Zea Mays
MSVGSRRRPPPPHHHRRAMTPASSVSVPAPVPAPPKPLYLRGPVIAGAVALAAFLLLAAAYATRRAGSPPAALLSHPAVSTRFFSFDLVREYPHDPAAFTQGILYAGNDTLFESTGLYGRSSVRKVELQTGKVLVNHQMDGDVFGEGLTLLGDRLFQVTWLKNDGFIYDRHNFSKCTSFTHKMRDGWGLATDGKVLFGSDGTSMLYKLDSKSLEVMKVVTVKYHGNQVPYLNELEYIDGEVWANVWQLHRTLKTRLQLL

SEQ ID NO: 184939 - protein, 157 aa, Zea Mays
MSVGSRRRPPPPHHHRRAMTPASSVSVPAPVPAPPKPLYLRGPVIAGAVALAAFLLLAAAYATRRAGSPPAALLSHPAVSTRFFSFDLVREYPHDPAAFTQGILYAGNDTLFESTGLYGRSSVRKVELQTGKVLVNHQMDGDVFGEGLTLLGDRLPG

SEQ ID NO: 184940 - protein, 196 aa, Zea Mays
MDGDVFGEGLTLLGDRLFQVTWLKNDGFIYDRHNFSKCTSFTHKMRDGWGLATDGKVLFGSDGTSMLYKLDSKSLEVMKVVTVKYHGNQVPYLNELEYIDGEVWANVWQTDCIARVSPEDGLVVGWIFLHELRRQLWNSGNTNIDVLNGIAWDERRHRLFVTGKLWPKLYEIKLRAVDGPADGSVEKLCPKASFYR

SEQ ID NO: 184941 - protein, 743 aa, Zea Mays
MQLVPAIIGGLPSANHSLLLDLEMESSDSDSNAAASAAVEEEAAAAAQQSIFLDPTQASDHATGLGAENQVEKQDNVSAQQTNHSSSNGNLENGSHSNGVHEISSSSETVTTIADGLKLITTIREGRQHILPSWSGSLDHVSGGSTSTSQVHEIEVEKEVSKGDVKVEEYDLEKILDEQETHDLYCPNCKSCITRRVILKKRKRTVRQETGKEPPKRPQLVEPPANAPSQTINQDSPEVFRCLSCFTFFIPTGCGFNIFRIFERRDVDQQVQSQHSSASVENCGSWLLSCFRTIDSPKPLHNADSLEEPLVSDSQRTDNITSVEENTPLHSDNTIGKAEQSNKPSPTGSQTTAATYEVKESFSQFHASSKDVTGSTQKEAGHVVTVQRNGARQEQIPLSRPAVDTKTDTSHLGHKEEFTQTEAGHVVTVQRNGARQEQIPLSQPSGDTANDSMHLGHKQDILEDIMAPSDNSTFFSPSFVKPVLTIPIKVLPGEDNQTVEKPTSVIRQPAEPEAPPHRVLAVPEAEALVPAPSAERDEWDILKAVVYGGLVESITSLSVVSAAAASGAKTLDIFILGIANLIGGLPVLYHNIADLRNTGDIAESSEQVGHYWLELGRRSKYQLHMVIAILSYILFGLLPPVIYGLSFRTSDNRENKVLVVAAASLLCIALLAIGKAHVKRHRTYLTTLLYYLSIGFSSSGLSYVAGVLLAKVLAHFGIIDQGGASAPAPPGLSFPEAAAWASY

SEQ ID NO: 184942 - protein, 556 aa, Zea Mays
MMEVERPMWELKEEEEEPPQLLMEAEEDDYEEEEDTSALLYTRERESMRKKMTTTMADLDLEMESSDSDSNAAASAAVEEEAAAAAQQSIFLDPTQASDHATGLGAENQVEKQDNVSAQQTNHSSSNGNLENGSHSNGVHEISSSSETVTTIADGLKLITTIREGRQHILPSWSGSLDHVSGGSTSTSQVHEIEVEKEVSKGDVKVEEYDLEKILDEQETHDLYCPNCKSCITRRVILKKRKRTVRQETGKEPPKRPQLVEPPANAPSQTINQDSPEVFRCLSCFTFFIPTGCGFNIFRIFERRDVDQQVQSQHSSASVENCGSWLLSCFRTIDSPKPLHNADSLEEPLVSDSQRTDNITSVEENTPLHSDNTIGKAEQSNKPSPTGSQTTAATYEVKESFSQFHASSKDVTGSTQKEAGHVVTVQRNGARQEQIPLSRPAVDTKTDTSHLGHKEEFTQTEAGHVVTVQRNGARQEQIPLSQPSGDTANDSMHLGHKQDILEDIMAPSDNSTFFSPSFVKPGRTTRRLRNQLQLFVSQLSQKLHLIEYWQSLRPRH

SEQ ID NO: 184943 - protein, 835 aa, Zea Mays
MMEVERPMWELKEEEEEPPQLLMEAEEDDYEEEEDTSALLYTRERESMRKKMTTTMADLDLEMESSDSDSNAAASAAVEEEAAAAAQQSIFLDPTQGLWKCRHCDWTHQRLSGPCTAEIILHSQQGHCKIASNVDSLVQHQPLYSSPHKASDHATGLGAENQVEKQDNVSAQQTNHSSSNGNLENGSHSNGVHEISSSSETVTTIADGLKLITTIREGRQHILPSWSGSLDHVSGGSTSTSQVHEIEVEKEVSKGDVKVEEYDLEKILDEQETHDLYCPNCKSCITRRVILKKRKRTVRQETGKEPPKRPQLVEPPANAPSQTINQDSPEVFRCLSCFTFFIPTGCGFNIFRIFERRDVDQQVQSQHSSASVENCGSWLLSCFRTIDSPKPLHNADSLEEPLVSDSQRTDNITSVEENTPLHSDNTIGKAEQSNKPSPTGSQTTAATYEVKESFSQFHASSKDVTGSTQKEAGHVVTVQRNGARQEQIPLSRPAVDTKTDTSHLGHKEEFTQTEAGHVVTVQRNGARQEQIPLSQPSGDTANDSMHLGHKQDILEDIMAPSDNSTFFSPSFVKPVLTIPIKVLPGEDNQTVEKPTSVIRQPAEPEAPPHRVLAVPEAEALVPAPSAERDEWDILKAVVYGGLVESITSLSVVSAAAASGAKTLDIFILGIANLIGGLPVLYHNIADLRNTGDIAESSEQVGHYWLELGRRSKYQLHMVIAILSYILFGLLPPVIYGLSFRTSDNRENKVLVVAAASLLCIALLAIGKAHVKRHRTYLTTLLYYLSIGFSSSGLSYVAGVLLAKVLAHFGIIDQGGASAPAPPGLSFPEAAAWASY

SEQ ID NO: 184944 - protein, 720 aa, Zea Mays
METQPSIPFPSHLGSQQAVGSRLHLNLHLHDCTPAPTPTGNTQEKKRKDDGGLWKCRHCDWTHQRLSGPCTAEIILHSQQGHCKIASNVDSLVQHQPLYSSPHKASDHATGLGAENQVEKQDNVSAQQTNHSSSNGNLENGSHSNGVHEISSSSETVTTIADGLKLITTIREGRQHILPSWSGSLDHVSGGSTSTSQVHEIEVEKEVSKGDVKVEEYDLEKILDEQETHDLYCPNCKSCITRRVILKKRKRTVRQETGKEPPKRPQLVEPPANAPSQTINQDSPEVFRCLSCFTFFIPTGCGFNIFRIFERRDVDQQVQSQHSSASVENCGSWLLSCFRTIDSPKPLHNAGSTQKEAGHVVTVQRNGARQEQIPLSRPAVDTKTDTSHLGHKEEFTQTEAGHVVTVQRNGARQEQIPLSQPSGDTANDSMHLGHKQDILEDIMAPSDNSTFFSPSFVKPVLTIPIKVLPGEDNQTVEKPTSVIRQPAEPEAPPHRVLAVPEAEALVPAPSAERDEWDILKAVVYGGLVESITSLSVVSAAAASGAKTLDIFILGIANLIGGLPVLYHNIADLRNTGDIAESSEQVGHYWLELGRRSKYQLHMVIAILSYILFGLLPPVIYGLSFRTSDNRENKVLVVAAASLLCIALLAIGKAHVKRHRTYLTTLLYYLSIGFSSSGLSYVAGVLLAKVLAHFGIIDQGGASAPAPPGLSFPEAAAWASY

SEQ ID NO: 184945 - protein, 137 aa, Zea Mays
MSGGTPAASSSLRTSLSYYVRQVRAYDYHHYLCLLHLAPAVRKAAFTFRTFNIETARAMDVVFDPRAGLMRLLWWKEGVDKIFGNKLVEHPVAQALSSIIADHKVSKHWLKRSVEARINDANREEGTIPRTSAKLES

SEQ ID NO: 184946 - protein, 151 aa, Zea Mays
MSGGTPAASSSLRTALSYCVRQVRAYDYHHYLCLLHLAPAVRKAAFTFRAFNIETARAMDVVSDPRTGLMRLLWWKEAVDKVFGNKLVEHPVAQALSSVIADHKVSKHWLKRSVEARINDANREEGTIPGTSAELERPAGFCYCSRRCRTM

SEQ ID NO: 184947 - protein, 663 aa, Zea Mays
MSASEFRIPYQQVSPSQPAENVNQFKTCRCGEGDPNSTSETGDSPPASCPNCQVLKSGHLLLSSKGIGWTSWKKRWFVLTRASLVFFRSDPNVPPPRGAEPIVTLGGIDLNNSGSVVIKEERKLLTVFFPDGHGERTFTLKAETTGDLNEWRNALESAIAQAPSIANTMGQNPIFSTDVEAESAESPAEHSEDRSVIGRPAKFALVDADGSPSFLEKALKFIEDHGKNEFSPEEDAHVIGDCIKDSEEGSCSSDAYTESEDDVDKEYSTDNDTHDDDGSYDSGEDDIEEDLDYSDDSEHDSKINANIKDGKVKNNISETAEVAQAEDTSPMDINSQSNQKQESCGPNGSKDRILRSTSRSSSSREKTMEKSCSSAHKGKRTLWGRTSARKDLSTEEIECCSDDEALVEKLESNKIDLQSKIAKEAKENAILWSSLEKRKEELHERRLALEKEVENLRDQLKRVMNLRRGQVSSPSTIDSKVRGQQLCCESCNQRLLNTDRLSGPESSSVEASPTVGSDPAFDMGDIEQSRKQAAQHSPSSRDKPSHEAVGGITQRAPQRGHSIAREGQDGSSSLSSSNSKWNLAQKQYSNSPLIRGLHVSSRLEDFGGSISPAASSALAKLTNRLNFLKERRALLASEMQSLDLGRPPTVKSPTPKGHESKNS

SEQ ID NO: 184948 - protein, 397 aa, Zea Mays
MSASEFRIPYQQPAENVNQFKTCRCGEGDPNSTSETGDSPPASCPNCQVLKSGHLLLSSKGIGWTSWKKRWFVLTRASLVFFRSDPNVPPPRGAEPIVTLGGIDLNNSGSVVIKEERKLLTVFFPDGHGERTFTLKAETTGDLNEWRNALESAIAQAPSIANTMGQNPIFSTDVEAESAESPAEHSEDRSVIGRPAKFALVDADGSPSFLEKALKFIEDHGIKVEGILRQSADVEEVKRRIRDYEKGKNEFSPEEDAHVIGDCIKYVLREMPSSPVPASCCTALVKAYRSDKARRLDEINRVINEVFPEPNRQLLQRTRKKVPVLQMLIRSLRMMLTRNIPQIMTPMMTMVLMILVKMTLKKIWTTLMTVNMTVRSTLISRMARSCTGRGYLSYGYQ

SEQ ID NO: 184949 - protein, 796 aa, Zea Mays
MSASEFRIPYQQVSPSQPAENVNQFKTCRCGEGDPNSTSETGDSPPASCPNCQVLKSGHLLLSSKGIGWTSWKKRWFVLTRASLVFFRSDPNVPPPRGAEPIVTLGGIDLNNSGSVVIKEERKLLTVFFPDGHGERTFTLKAETTGDLNEWRNALESAIAQAPSIANTMGQNPIFSTDVEAESAESPAEHSEDRSVIGRPAKFALVDADGSPSFLEKALKFIEDHGKNEFSPEEDAHVIGDCIKYVLREMPSSPVPASCCTALVKAYRSDKARRLDEINRVINEVFPEPNRQLLQRTLKMMQVVESHKAVNRMSQSALAACMAPLLLRPLLLGECDIDNEFSMGGDSSFQLLQAAAAANHAQAIVIIMMEEFDQIFDDSEEGSCSSDAYTESEDDVDKEYSTDNDTHDDDGSYDSGEDDIEEDLDYSDDSEHDSKINANIKDGKVKNNISETAEVAQAEDTSPMDINSQSNQKQESCGPNGSKDRILRSTSRSSSSREKTMEKSCSSAHKGKRTLWGRTSARKDLSTEEIECCSDDEALVEKLESNKIDLQSKIAKEAKENAILWSSLEKRKEELHERRLALEKEVENLRDQLKRVMNLRRGQVSSPSTIDSKVRGQQLCCESCNQRLLNTDRLSGPESSSVEASPTVGSDPAFDMGDIEQSRKQAAQHSPSSRDKPSHEAVGGITQRAPQRGHSIAREGQDGSSSLSSSNSKWNLAQKQYSNSPLIRGLHVSSRLEDFGGSISPAASSALAKLTNRLNFLKERRALLASEMQSLDLGRPPTVKSPTPKGHESKNS

SEQ ID NO: 184950 - protein, 428 aa, Zea Mays
MTRKKVPVLQMLIRSLRMMLTRNIPQIMTPMMTMVLMILVKMTLKKIWTTLMTVNMTVRSTLISRMARLKTISQKLQVVIIISIFNPPIRATRVENGASREKTMEKSCSSAHKGKRTLWGRTSARKDLSTEEIECCSDDEALVEKLESNKIDLQSKIAKEAKENAILWSSLEKRKEELHERRLALEKEVENLRDQLKRVMNLRRGQVSSPSTIDSKVRGQQLCCESCNQRLLNTDRLSGPESSSVEASPTVGSDPAFDMVRRQNPFRSAFIISGRKVCYQVKKKRTFQGDIEQSRKQAAQHSPSSRDKPSHEAVGGITQRAPQRGHSIAREGQDGSSSLSSSNSKWNLAQKQYSNSPLIRGLHVSSRLEDFGGSISPAASSALAKLTNRLNFLKERRALLASEMQSLDLGRPPTVKSPTPKGHESKNS

SEQ ID NO: 184951 - protein, 822 aa, Zea Mays
MSASEFRIPYQQVSPSQPAENVNQFKTCRCGEGDPNSTSETGDSPPASCPNCQVLKSGHLLLSSKGIGWTSWKKRWFVLTRASLVFFRSDPNVPPPRGAEPIVTLGGIDLNNSGSVVIKEERKLLTVFFPDGHGERTFTLKAETTGDLNEWRNALESAIAQAPSIANTMGQNPIFSTDVEAESAESPAEHSEDRSVIGRPAKFALVDADGSPSFLEKALKFIEDHGIKVEGILRQSADVEEVKRRIRDYEKGKNEFSPEEDAHVIGDCIKYVLREMPSSPVPASCCTALVKAYRSDKARRLDEINRVINEVFPEPNRQLLQRTLKMMQVVESHKAVNRMSQSALAACMAPLLLRPLLLGECDIDNEFSMGGDSSFQLLQAAAAANHAQAIVIIMMEEFDQIFDDSEEGSCSSDAYTESEDDVDKEYSTDNDTHDDDGSYDSGEDDIEEDLDYSDDSEHDSKINANIKDGKVKNNISETAEVAQAEDTSPMDINSQSNQKQESCGPNGSKDRILRSTSRSSSSREKTMEKSCSSAHKGKRTLWGRTSARKDLSTEEIECCSDDEALVEKLESNKIDLQSKIAKEAKENAILWSSLEKRKEELHERRLALEKEVENLRDQLKRVMNLRRGQVSSPSTIDSKVRGQQLCCESCNQRLLNTDRLSGPESSSVEASPTVGSDPAFDMGDIEQSRKQAAQHSPSSRDKPSHEAVGGITQRAPQRGHSIAREGQDGSSSLSSSNSKWNLAQKQYSNSPLIRGLHVSSRLEDFGGSISPAASSALAKLTNRLNFLKERRALLASEMQSLDLGRPPTVKSPTPKGHESKNS

SEQ ID NO: 184952 - protein, 389 aa, Zea Mays
MLIRSLRMMLTRNIPQIMTPMMTMVLMILVKMTLKKIWTTLMTVNMTVRSTLISRMARLKTISQKLQVVIIISIFNPPIRATRVENGASREKTMEKSCSSAHKGKRTLWGRTSARKDLSTEEIECCSDDEALVEKLESNKIDLQSKIAKEAKENAILWSSLEKRKEELHERRLALEKEVENLRDQLKRVMNLRRGQVSSPSTIDSKVRGQQLCCESCNQRLLNTDRLSGPESSSVEASPTVGSDPAFDMGDIEQSRKQAAQHSPSSRDKPSHEAVGGITQRAPQRGHSIAREGQDGSSSLSSSNSKWNLAQKQYSNSPLIRGLHVSSRLEDFGGSISPAASSALAKLTNRLNFLKERRALLASEMQSLDLGRPPTVKSPTPKGHESKNS

SEQ ID NO: 184953 - protein, 430 aa, Zea Mays
MGQNPIFSTDVEAESAESPAEHSEDRSVIGRPAKFALVDADGSPSFLEKALKFIEDHGKNEFSPEEDAHVIGDCIKDSEEGSCSSDAYTESEDDVDKEYSTDNDTHDDDGSYDSGEDDIEEDLDYSDDSEHDSKINANIKDGKVKNNISETAEVAQAEDTSPMDINSQSNQKQESCGPNGSKDRILRSTSRSSSSREKTMEKSCSSAHKGKRTLWGRTSARKDLSTEEIECCSDDEALVEKLESNKIDLQSKIAKEAKENAILWSSLEKRKEELHERRLALEKEVENLRDQLKRVMNLRRGQVSSPSTIDSKVRGQQLCCESCNQRLLNTDRLSGPESSSVEASPTVGSDPAFDMGDIEQSRKQAAQHSPSSRDKPRFRWKHITSSVIGISQADEPAQLPERTEGAAGKRDAELGFGSAPNSEVPNTKRP

SEQ ID NO: 184954 - protein, 81 aa, Zea Mays
MTPWSKTTTSGPLSLPMPLGVDKGVRSPSQLEKPVGRPQRPAEDKMGALRAYRRARGLCDRCAEKCVTPGFGRQTECETCT

SEQ ID NO: 184955 - protein, 388 aa, Zea Mays
MAIHHPHLLDFSPPPNTVAMEEAPPPPHFDHGLLGLHVDGMPHRVLADDAPVAAWAPQAVVSHSLYGYDNTAAGASSLFGHHEASEAQFSVLPPAASSFALLPNHHHQQQLPTTTAASSMQQPFQLRSSKYLGPAQELLAEFCSLEGDLLHATNKQGASGAAAGNSRWDDVETSSSSSAGLWGHLSLSSMDLLELERRKARLLSMVEEVDRRYRRYREQMRSVEVSFEAVAGAGASQVYTRLALRAMSRHFRCLRDALVAQVRALRKAMGERDGGPAGAAAGATKGDTPRLKVLDQCLRQQRAFQHPGTIDNYPWRPQRGLPERAVAVLRAWLFEHFLHPYPNDVDKHILARQTGLSRSQGEAVEADDRGDVHGRSEPETGRRHKPKP

SEQ ID NO: 184956 - protein, 213 aa, Zea Mays
MTGSMDLPAKGGFSFDLCRRNNMLEKNGLKVPGFRKTGTTIVGLVFQDGVVLGADTRATEGPIVADKNCEKIHFMAPNIYCCGAGTAADTEAVTDMVSSQLQLHRYATGRESRVVTALTLLKSHLFKYQGHVSAALVLGGVDCTGPHLHTVYPHGSTDTLPFATMGSGSLAAMSVFESKYKEGLTREEGIQIVCEAICAGIFNDLGSGSNVDV

SEQ ID NO: 184957 - protein, 213 aa, Zea Mays
MSQAGAFPPGKKITVVFVIGSGKGTQCSKIVRHFGFTHLSAGDLLRQQVQSDTEHGAMIKNLMHEGKLVPSDIIVRLLLTAMLQSGNDRFLVDGFPRNEENRRAYESVIGIEPELVLFIDCPREELERRILHRDQGRDDDNVDTIRKRFQVFHDSTLPVVLYYDRMGKVDGAKSADAVFDDVKAIFTQLLTTQASQGGNASSRRSNPPLCSVL

SEQ ID NO: 184958 - protein, 832 aa, Zea Mays
MAAGRGDWEDMVRRMFPPGTTIPEPLPDMDYSFALTYNGPDVSYELPRIQPVCVPAIPTAEPASGPLGLGSGVVPVAPVVGPAAARARANPPAASRAGAADRRAARMTPSDSSDDEEDDAGSSGSRSTKASRPAVPEGRRPQVVTFGVPEEDSGGRYESSEMDGGHDAASAEQHVAVTRPAERKGRTCCRRCGKSKWESKESCIVCDARYCGHCLLRAMGSMPEGRKCVTCIGQPIDEAKRSRLGKGSRILSRLLGPLEVRQILKVEKECQANQLRPEQLLVNGFPLDDEEMTDLLSCQRPPGNLKPGRYWYDKESGLWGKEGEKPDSIISTNLNFNGKLQPDASNGTAQVFINGREITKIELRILKIAKVQCPRDTHFWVYHDGGYEEEGQNNIKGKIWESPLTRFACALVSLPVPPTNFDATKDEAPYSSKTVPDYLDHKRIQKLLILGSPGAGTSTIFKQYLGILLEGRERFEEEALAVPNHPSSVGDDPQQDESKSSSSNSCIYSINAKLKKFSDWLLDIIATGDLDTFFPAATREYAPVVDELWKDPAIQATYKRKDELHFLPDAAEYFLSRAVEVSSNEYEPSEKDVIYAEGVTQGNGLAFIDFTLDDRSPMSESFGDNHDAYPQQPVNKYQLIRVSAKGMNEGCKWVEMFEDVSMVIFSVALSDYDQLGAPASGSSRTLVNKMIQSRDLFEATIRQPCFRDTPFLLLLNKYDAFEEKIGRSPLSSCEWFGDFCPLRTHHNSQSLAQQAFYYVAIKFKDLYAASTGRKLFVWQTRARDRPTVDEAFRYVREVLRWEDERGVAGYCPDESFYSTTELSSSRLIAAAQ

SEQ ID NO: 184959 - protein, 813 aa, Zea Mays
MAAGRGDWEDMVRRMFPPGTTIPEPLPDMDYSFALTYNGPDVSYELPRIQPVCVPAIPTAEPASGPLGLGSGVVPVAPVVGPAAARARANPPAASRAGAADRRAARMTPSDSSDDEEDDAGSSGSRSTKASRPAVPEGRRPQVVTFGVPEEDSGGRYESSEMDGGHDAASAEQHVAVTRPAERKGRTCCRRCGKSKWESKESCIVCDARYCGHCLLRAMGSMPEGRKCVTCIGQPIDEAKRSRLGKGSRILSRLLGPLEVRQILKVEKECQANQLRPEQLLVNGFPLDDEEMTDLLSCQRPPGNLKPGRYWYDKESGLWGKIAKVQCPRDTHFWVYHDGGYEEEGQNNIKGKIWESPLTRFACALVSLPVPPTNFDATKDEAPYSSKTVPDYLDHKRIQKLLILGSPGAGTSTIFKQAKLLYGNRFTDEELENIKLMIQSNMFKYLGILLEGRERFEEEALAVPNHPSSVGDDPQQDESKSSSSNSCIYSINAKLKKFSDWLLDIIATGDLDTFFPAATREYAPVVDELWKDPAIQATYKRKDELHFLPDAAEYFLSRAVEVSSNEYEPSEKDVIYAEGVTQGNGLAFIDFTLDDRSPMSESFGDNHDAYPQQPVNKYQLIRVSAKGMNEGCKWVEMFEDVSMVIFSVALSDYDQLGAPASGSSRTLVNKMIQSRDLFEATIRQPCFRDTPFLLLLNKYDAFEEKIGRSPLSSCEWFGDFCPLRTHHNSQSLAQQAFYYVAIKFKDLYAASTGRKLFVWQTRARDRPTVDEAFRYVREVLRWEDERGVAGYCPDESFYSTTELSSSRLIAAAQ

SEQ ID NO: 184960 - protein, 376 aa, Zea Mays
MSTGLSQLSGGVGGDRGSSSSAGPHHQHSHHPPPPPPPKILLAKPPLPHASSSGADDDGGTGVAGGRARQAPQPGSLSLVSDAWEAHTDKILPYLTENNDFMVIGVIGPPGVGKSTIMNELYGYDASSPGMLPPFPTQTEETRLMGKHCTTGIDIRISNERVILLDAQPVYSPSVLIDMMRPDGSSTIPVLNGEPLSADLAHELMGIQIGVFLASVCNIVLVVSEGMNDLSMWELMLTVDLLKHGIPDPSVLTSSASQDKENKNEDQTGCEDYISDLCFVHTRLQGQDFSPSKFMLLRRTLEKHFNSSTFRVGSSNATGHASDSLVPSSTKVEDLTSSRQDIFLLPLRGHDDSTKFEYGTYSCMLGMIRDQVRLLR

SEQ ID NO: 184961 - protein, 226 aa, Zea Mays
MSTGLSQLSGGVGGDRGSSSSAGPHHQHSHHPPPPPPPKILLAKPPLPHASSSGADDDGGTGVAGGRARQAPQPGSLSLVSDAWEAHTDKILPYLTENNDFMVIGVIGPPGVGKSTIMNELYGYDASSPGMLPPFPTQTEETRLMGKHCTTGIDIRISNERVILLDAQPVYSPSVLIDMMRPDGSSTIPVLNGEPLSADLAHELMGIQIGVFLASVCNIVLVVSEG

SEQ ID NO: 184962 - protein, 253 aa, Zea Mays
MSTGLSQLSGGVGGDRGSSSSAGPHHQHSHHPPPPPPPKILLAKPPLPHASSSGADDDGGTGVAGGRARQAPQPGSLSLVSDAWEAHTDKILPYLTENNDFMVIGVIGPPGVGKSTIMNELYGYDASSPGMLPPFPTQTEETRLMGKHCTTGIDIRISNERVILLDAQPVYSPSVLIDMMRPDGSSTIPVLNGEPLSADLAHELMGIQIGVFLASVCNIVLVVSEGMNDLSMWELMLTVSFLIYNLYFLSFFH

SEQ ID NO: 184963 - protein, 187 aa, Zea Mays
MQVDLLKHGIPDPSVLTSSASQDKENKNEDQTGCEDYISDLCFVHTRLQGQDFSPSKFMLLRRTLEKHFNSSTFRVGSSNATGHASDSLVPSSTKVEDLTSSRQDIFLLPLRGHDDSTKFEYGTYSCMLGMIRDQILSWPARSFSKNLSERDWLRSSARIWDMVKKSPVISEYCKALQSSGWFRKQP

SEQ ID NO: 184964 - protein, 197 aa, Zea Mays
MNDLSMWELMLTVDLLKHGIPDPSVLTSSASQDKENKNEDQTGCEDYISDLCFVHTRLQGQDFSPSKFMLLRRTLEKHFNSSTFRVGSSNATGHASDSLVPSSTKVEDLTSSRQDIFLLPLRGHDDSTKFEYGTYSCMLGMIRDQILSWPARSFSKNLSERDWLRSSARIWDMVKKSPVISEYCKALQSSGWFRKQP

SEQ ID NO: 184965 - protein, 317 aa, Zea Mays
MATGDNDKPPSLDADVDMADLASLDATAATSAAAGGAPSTRFRPKAKGKPRPKAEPPRPVPVAVPKPFEDDTQLYIMQYPLRPCWRPYELHEICEEVRVKPLSSEVEVDLSINTQSENYDQEAPLRLTKQTLSSSKAVDVTNYAVGVLNGNLVHLNHIDAVVQMRPSMSHIISGRAHTRQASQPREMNGGASTSMDSSHKGNERPEDSKDRAEDSEPWISLIYQPAGSNTATKYHDKMIANEGVPIDFTMSSSCYLTSLCPGASTSRKRINKFQAIRAPQAAEPEGAGAKLDNVGRSKEKEEPAEPRRGTRERKLNQ

SEQ ID NO: 184966 - protein, 296 aa, Zea Mays
MATGDNDKPPSLDADVDMADLASLDATAATSAAAGGAPSTRFRPKAKGKPRPKAEPPRPVPVAVPKPFEDDTQLYIMQYPLRPCWRPYELHEICEEVRVKPLSSEVEVDLSINTQSENYDQEAPLRLTKQTLSSSKAVDVTNYAVGVLNGNLVHLNHIDAVVQMRPSMSHIISGRAHTRQASQPREMNGGASTSMDSSHKGNERPEDSKDRAEDSEPWISLIYQPAGSNTATKYHDKMIANEGVPIDFTMSSSCYLTSLCPGASTSRKRINKFQAIRAPQAAEPEGAGAKLDNVGR

SEQ ID NO: 184967 - protein, 577 aa, Zea Mays
MATGDNDKPPSLDADVDMADLASLDATAATSAAAGGAPSTRFRPKAKGKPRPKAEPPRPVPVAVPKPFEDDTQLYIMQYPLRPCWRPYELHEICEEVRVKPLSSEVEVDLSINTQSENYDQEAPLRLTKQTLSSSKAVDVTNYAVGVLNGNLVHLNHIDAVVQMRPSMSHIISGRAHTRQASQPREMNGGASTSMDSSHKGNERPEDSKDRAEDSEPWISLIYQPAGSNTATKYHDKMIANEGVPIDFTMSSEMLLLPLEERLKKWFTEVSGVNRFDALKDLAPTCSEVEILKMLPECAYLVRGLWVCKSSLLFDGVYSGPMDRILLEFTKRDPVPSNILEPFINLIGNRAMRDWILSPLCKRRQILKDHKFISADLSFIKRYPHIVNEQECAWSARETTLRESLEMSTTLAKKTMNSTRPNVASKGPHSNMSKGRDGPSQGSDDLARSVLGTVFTANKVRSMQAVVRDLRQLAAKYASNRKDGSKLQALCNAAKNCASLPHDELNRKIHLVAVPVHSVFVAKHEDKRALRNIFILLFRHKEPNGTLTKQEVVAAAAKHIKREITDREYHQKMGTCC

SEQ ID NO: 184968 - protein, 602 aa, Zea Mays
MATGDNDKPPSLDADVDMADLASLDATAATSAAAGGAPSTRFRPKAKGKPRPKAEPPRPVPVAVPKPFEDDTQLYIMQYPLRPCWRPYELHEICEEVRVKPLSSEVEVDLSINTQSENYDQEAPLRLTKQTLSSSKAVDVTNYAVGVLNGNLVHLNHIDAVVQMRPSMSHIISGRAHTRQASQPREMNGGASTSMDSSHKGNERPEDSKDRAEDSEPWISLIYQPAGSNTATKYHDKMIANEGVPIDFTMSSSCYLTSLCPGASTSRKRINKFQAIREMLLLPLEERLKKWFTEVSGVNRFDALKDLAPTCSEVEILKMLPECAYLVRGLWVCKSSLLFDGVYSGPMDRILLEFTKRDPVPSNILEPFINLIGNRAMRDWILSPLCKRRQILKDHKFISADLSFIKRYPHIVNEQECAWSARETTLRESLEMSTTLAKKTMNSTRPNVASKGPHSNMSKGRDGPSQGSDDLARSVLGTVFTANKVRSMQAVVRDLRQLAAKYASNRKDGSKLQALCNAAKNCASLPHDELNRKIHLVAVPVHSVFVAKHEDKRALRNIFILLFRHKEPNGTLTKQEVVAAAAKHIKREITDREYHQKMGTCC

SEQ ID NO: 184969 - protein, 254 aa, Zea Mays
MSAHSLISLLSQHSPLAMDISAAARGRGPPTSELTSGRRRFSSPQLDVLLCRGLPLLLTRVPPLRLAMVTASREFPCARAPMPSSQRRPPSLCSLSALILRRLAGAPSSSSCPYFSQPSLFQPGSRSCSPVLPVLVRSHAWALCYAPSPVSSPPSPTATCSCLGPLSQLELSFLASHQCVVQGRPGTILHYCFSTAVTFHARRSPLFLCRDAPSLLLLAVADSLSRSPRSPPSSSLAESSPCSLVLGSGQILCA

SEQ ID NO: 184970 - protein, 119 aa, Zea Mays
MPSVHVEYNIENITPHFCRLTDRTYSAPIKVHIEYTVGKQHEVRRKNNFIIGYMPIMLRSHACILYEKDEAELAKYGECPLDPGGYFVVKGTEKVILIQEQLAKNRIIVDTDSKGRFLL

SEQ ID NO: 184971 - protein, 1133 aa, Zea Mays
MTVPTKDDSQSGTVADTVPLPTYRSLAAPVRKPVDKFALLPAFLKVRGLVKEHIDSFNYFVNKGIKKIVEANNRIEARNDPSIYLRYLGVHVGMPSVHVEYNIENITPHFCRLTDRTYSAPIKVHIEYTVGKQHEVRRKNNFIIGYMPIMLRSHACILYEKDEAELAKYGECPLDPGGYFVVKGTEKVILIQEQLAKNRIIVDTDSKGRVIASVTSSTHAIKSKTVIFMDKGKIYLQLNQFNKPIPIIVVMKAMGMESDQETVQMVGRDPRYGDLLFPSIQECASERIYTRQRALQYMDEKVTYPGATNQKEGRSYSILRDVFIAHVPVKNGNLRPKCIYTALMLRRMMDAIVNSDTFDDKDLFKTMNSQAVERMNKNSDKTHSSPLDFSQLIMQDSITFGLERAISTGNWDIKRFRMHRKGVSQVLSRLSYMASLGYMTRITPQFEKTRKTSGPRALQPSQWGMLCPCDTPEGEACGLTKNLALLSHVTTDQEEGPLIYLCYSLGVEDLLSLSSEEIHTPGSFLVMFNGLILGKHKDPQRLVIDLRNLRRSNVIGEFVSIFINEKQHCVHIASDGGRVCRPLIIADMGISRIDETHMEKLRHGTCGFDDFLRDGLIEYLDVNEENNALIALYEHMDQDDVERSSITHIEIEPLSILGVVSGLIPYPHHNQSPRNTYQCAMGKQAMGNIAYNQLFRADSLLYLLVYAQRPLLTTKTIELVGYDKLGAGQNATVAVMGYSGYDIEDAIVMNKSSLDRGFGRCIALKKYTVLKDNYGDGVSDMIVEPQRDNGVLIKQNMRALDEDGIAGPGQIIRNHDIYVNKRTPKNTSKGIGRALRESDYKDSPALYKGVDGETTVVDRVMLCSDTNDKLSIKCIIRHTRRPEVGDKFSSRHGQKGVCGTIVQQEDFPFSERGICPDLIMNPHGFPSRMTIGKMIELLGGKAGVSCGRFHYGSAFGEPSGNADKVADISSTLIKHGFSYNGKDFLYSGILGQPLEAYIFMGPIYYQKLKHMVLDKMHARASGPRVLLTRQPTEGRSRDGGLRLGEMERDCLIAYGASMLIFERLLLSSDPYQVQVCRKCGLLGYYNHKLKTSYCSMCKNGENMAKMRLPYACKLLFQELHAMNVVPRLKLTEV

SEQ ID NO: 184972 - protein, 810 aa, Zea Mays
MLRRMMDAIVNSDTFDDKDYVGNKRFELSGQLISLLFEDLFKTMNSQAVERMNKNSDKTHSSPLDFSQLIMQDSITFGLERAISTGNWDIKRFRMHRKGVSQVLSRLSYMASLGYMTRITPQFEKTRKTSGPRALQPSQWGMLCPCDTPEGEACGLTKNLALLSHVTTDQEEGPLIYLCYSLGVEDLLSLSSEEIHTPGSFLVMFNGLILGKHKDPQRLVIDLRNLRRSNVIGEFVSIFINEKQHCVHIASDGGRVCRPLIIADMGISRIDETHMEKLRHGTCGFDDFLRDGLIEYLDVNEENNALIALYEHMDQDDVERSSITHIEIEPLSILGVVSGLIPYPHHNQSPRNTYQCAMGKQAMGNIAYNQLFRADSLLYLLVYAQRPLLTTKTIELVGYDKLGAGQNATVAVMGYSGYDIEDAIVMNKSSLDRGFGRCIALKKYTVLKDNYGDGVSDMIVEPQRDNGVLIKQNMRALDEDGIAGPGQIIRNHDIYVNKRTPKNTSKGIGRALRESDYKDSPALYKGVDGETTVVDRVMLCSDTNDKLSIKCIIRHTRRPEVGDKFSSRHGQKGVCGTIVQQEDFPFSERGICPDLIMNPHGFPSRMTIGKMIELLGGKAGVSCGRFHYGSAFGEPSGNADKVADISSTLIKHGFSYNGKDFLYSGILGQPLEAYIFMGPIYYQKLKHMVLDKMHARASGPRVLLTRQPTEGRSRDGGLRLGEMERDCLIAYGASMLIFERLLLSSDPYQVQVCRKCGLLGYYNHKLKTSYCSMCKNGENMAKMRLPYACKLLFQELHAMNVVPRLKLTEV

SEQ ID NO: 184973 - protein, 525 aa, Zea Mays
MLRRMMDAIVNSDTFDDKDYVGNKRFELSGQLISLLFEDLFKTMNSQAVERMNKNSDKTHSSPLDFSQLIMQDSITFGLERAISTGNWDIKRFRMHRKGVSQVLSRLSYMASLGYMTRITPQFEKTRKTSGPRALQPSQWGMLCPCDTPEGEACGLTKNLALLSHVTTDQEEGPLIYLCYSLGVEDLLSLSSEEIHTPGSFLVMFNGLILGKHKDPQRLVIDLRNLRRSNVIGEFVSIFINEKQHCVHIASDGGRVCRPLIIADMGISRIDETHMEKLRHGTCGFDDFLRDGLIEYLDVNEENNALIALYEHMDQDDVERSSITHIEIEPLSILGVVSGLIPYPHHNQSPRNTYQCAMGKQAMGNIAYNQLFRADSLLYLLVYAQRPLLTTKTIELVGYDKLGAGQNATVAVMGYSGYDIEDAIVMNKSSLDRGFGRCIALKKYTVLKDNYGDGVSDMIVEPQRDNGVLIKQNMRALDEDGIAGPGQIIRNHDIYVNKRTPKNTSKVTTRTHLPCTKVLMVRLLW

SEQ ID NO: 184974 - protein, 1158 aa, Zea Mays
MTVPTKDDSQSGTVADTVPLPTYRSLAAPVRKPVDKFALLPAFLKVRGLVKEHIDSFNYFVNKGIKKIVEANNRIEARNDPSIYLRYLGVHVGMPSVHVEYNIENITPHFCRLTDRTYSAPIKVHIEYTVGKQHEVRRKNNFIIGYMPIMLRSHACILYEKDEAELAKYGECPLDPGGYFVVKGTEKVILIQEQLAKNRIIVDTDSKGRVIASVTSSTHAIKSKTVIFMDKGKIYLQLNQFNKPIPIIVVMKAMGMESDQETVQMVGRDPRYGDLLFPSIQECASERIYTRQRALQYMDEKVTYPGATNQKEGRSYSILRDVFIAHVPVKNGNLRPKCIYTALMLRRMMDAIVNSDTFDDKDYVGNKRFELSGQLISLLFEDLFKTMNSQAVERMNKNSDKTHSSPLDFSQLIMQDSITFGLERAISTGNWDIKRFRMHRKGVSQVLSRLSYMASLGYMTRITPQFEKTRKTSGPRALQPSQWGMLCPCDTPEGEACGLTKNLALLSHVTTDQEEGPLIYLCYSLGVEDLLSLSSEEIHTPGSFLVMFNGLILGKHKDPQRLVIDLRNLRRSNVIGEFVSIFINEKQHCVHIASDGGRVCRPLIIADMGISRIDETHMEKLRHGTCGFDDFLRDGLIEYLDVNEENNALIALYEHMDQDDVERSSITHIEIEPLSILGVVSGLIPYPHHNQSPRNTYQCAMGKQAMGNIAYNQLFRADSLLYLLVYAQRPLLTTKTIELVGYDKLGAGQNATVAVMGYSGYDIEDAIVMNKSSLDRGFGRCIALKKYTVLKDNYGDGVSDMIVEPQRDNGVLIKQNMRALDEDGIAGPGQIIRNHDIYVNKRTPKNTSKGIGRALRESDYKDSPALYKGVDGETTVVDRVMLCSDTNDKLSIKCIIRHTRRPEVGDKFSSRHGQKGVCGTIVQQEDFPFSERGICPDLIMNPHGFPSRMTIGKMIELLGGKAGVSCGRFHYGSAFGEPSGNADKVADISSTLIKHGFSYNGKDFLYSGILGQPLEAYIFMGPIYYQKLKHMVLDKMHARASGPRVLLTRQPTEGRSRDGGLRLGEMERDCLIAYGASMLIFERLLLSSDPYQVQKMWLVRLLQSQTEDFILFNVQEWGKHGQDEAAIRLQASIPGVACNECSTTLEVNRSMTDAGTVQ

SEQ ID NO: 184975 - protein, 381 aa, Zea Mays
MKSRGKPFSETEIRNWCFQIFQALSHMHQRGYFHRDLKPENLLVTKELIKIADFGLAREISSEPPYTEYVSTRWYRAPEVLLQATVYNAAVDMWAMGAIIAELFSLRPLFPGSSEPDELYKICSIIGTPNQRTWPEGLQLAASMGFQFPQCESVHLSEVVPLASKDAINLISWLCSWDPRRRPTAVEVLQHPFFQPCFYVPPSLRFKSTGYASTPPSAGAKGAVDQKNIRRYYMGTVPNARPTVNYSYLRNNAPARAVGAQRKLELDYQLPETNNHNKVTKAEAMNQSWSRPAAVRSNAGNHLANDLNPRVPDLAEKLSQLSMGPNRVSGLGSERFVRTHENAAKRPLPVGSRAWHGPADPFRRPYEMPGDRTLLPRNLVR

SEQ ID NO: 184976 - protein, 81 aa, Zea Mays
MPRGSQVSSPCSAGVIAFSARIWSTPPAQQVPLYPTSRCSRKFLAGGFVFTETSWSSLLSTALEDQPTLSDCLAWSHAVRH

SEQ ID NO: 184977 - protein, 279 aa, Zea Mays
MWAMGAIIAELFSLRPLFPGSSIIGTPNQRTWPEGLQLAASMGFQFPQCESVHLSEVVPLASKDAINLISWLCSWDPRRRPTAVEVLQHPFFQPCFYVPPSLRFKSTGYASTPPSAGAKGAVDQKNIRRYYMGTVPNARPTVNYSYLRNNAPARAVGAQRKLELDYQLPETNNHNKVTKAEAMNQSWSRPAAVRSNAGNHLANDLNPRVPDLAEKLSQLSMGPNRVSGLGSERFVRTHENAAKRPLPVGSRAWHGPADPFRRPYEMPGDRTLLPRNLVR

SEQ ID NO: 184978 - protein, 396 aa, Zea Mays
MLSSSASRRDAARSGAELPRPHAVAGMARSGELPKGAPSATAPDAVRCEGWMVRHGRRKIGRSFFHTRYFVLDNGVLAYYKKKPRDHMIPLKSIIIDGNCRVEDRGLKTHHGQMIYLLCIYNKKEKENQITMGGYDIEDALAWKRKIELLIDQQQDTTTAKNHKAFASLDFDIDLGGPFSFSDHDSGPEDEEEPRPTLLRRTTIGNGPPDSVLDWTKEADSGLSNQNATSQAYSRKNWRLLRCQNGLRIFEELVEVEYLARSYSRAMRAVGVVEASCEAIFGLVMSMDASRYEWDCSFQYGSLVEEVDGHTAILYHRLQLNWFSMLVWPRDLCYVRYWRRNDDGSYVVLFRSTENQNCGPQPGFVEVSRFPLSKASMGGPALKFNTLCRLMLGDGA

SEQ ID NO: 184979 - protein, 628 aa, Zea Mays
MLSSSASRRDAARSGAELPRPHAVAGMARSGELPKGAPSATAPDAVRCEGWMVRHGRRKIGRSFFHTRYFVLDNGVLAYYKKKPRDHMIPLKSIIIDGNCRVEDRGLKTHHGQMIYLLCIYNKKEKENQITMGGYDIEDALAWKRKIELLIDQQQDTTTAKNHKAFASLDFDIDLGGPFSFSDHDSGPEDEEEPRPTLLRRTTIGNGPPDSVLDWTKEADSGLSNQNATSQAYSRKNWRLLRCQNGLRIFEELVEVEYLARSYSRAMRAVGVVEASCEAIFGLVMSMDASRYEWDCSFQYGSLVEEVDGHTAILYHRLQLNWFSMLVWPRDLCYVRYWRRNDDGSYVVLFRSTENQNCGPQPGFVRASIESGGFKISPLKSLNGRPRTQVQHLMQIDVRGWGVNYLPSFQYYSLLQMLNCVAGLREYFSQTDEIHTVPRIPVMHTMVNAASMKKDQNLQEPDSKTKQADNKHLDMVDEESEDDDDYQVPDADVEEEPTKSDSDAKNSDPIDLSWFSGIIRQDTNEKSRNCWAVPDSKIFKVRSKNFPHDKSKVPAGKYLMELVAVDWFKDAKRMDHVARRKGSAVQVAAEKGMFTFLVNIQVSSCSNNPTMLPCPFISVLLRSFLTER

SEQ ID NO: 184980 - protein, 215 aa, Zea Mays
MASLDAVRGDLALLILYLNKAEARDKICRAIQYGSKFISNGEPGPAQNVDKSTSLARKVFRLCKFVNDLHALISPPAKGTPLPLILLGKSKNAMLSTFLFLDQIVWAGRTGIYKNKERAEFLGRIAFYCFLGSNTCTAIIELAELQRLSTSMKKLEKELKHQELYKNEQYRMKLHKSNERLLALVKSSLDIVVAVGLLQLAPKKLLPSPPAKQSK

SEQ ID NO: 184981 - protein, 232 aa, Zea Mays
MASLDAVRGDLALLILYLNKAEARDKICRAIQYGSKFISNGEPGPAQNVDKSTSLARKVFRLCKFVNDLHALISPPAKGTPLPLILLGKSKNAMLSTFLFLDQIVWAGRTGIYKNKERAEFLGRIAFYCFLGSNTCTAIIELAELQRLSTSMKKLEKELKHQELYKYRMKLHKSNERLLALVKSSLDIVVAVGLLQLAPKKVTPRVTGAFGFASSLIACYQLLPSPPAKQSK

SEQ ID NO: 184982 - protein, 56 aa, Zea Mays
MQSLVPFSTASSARPMASGPARRCARGSRARRAPSTRYTTSSPRSCSSPPSYPPSL

SEQ ID NO: 184983 - protein, 55 aa, Zea Mays
MKKSFKFLPALPIFLDIMFHHVLGVILSLSFVLVFGEGSCLGSHWGSCRSASSSW

SEQ ID NO: 184984 - protein, 479 aa, Zea Mays
MASSVHQLEEHDEAGEEHDRHGIQLITSPLLQPSSRRPHGSAEEKEAEAGDDNGSPIEQVAVLPVGRLMAAALPERAFFRGRPCEFTLNPGPFSVKEHVLITIFANAGAGTVFAKNLVTSVRVFYGQHMSFLIALLLILTSQVMGFGWAGVFRRYLVEPAAMWWPSNLVQVSLFRALHEKERRRKGSMTRNQFFTVAFICSFAYYIFPGYLFQMLTSLSWICWVFPSSVIAQQLGSGLHGLGIGAVGLDWSSISSYLGSPLASPWFATANIAAAFFIVVYIITPINYWFNVYKARNFPIYSDGLYTVAGQKYNISSIMDSHFYFDTDAYEKSGPLYISTFFASSYGLSFACLTATVSHVLLFHGSEIWQLSKSAFEDKKMDIHTKLMRRYRQVPEWWFICILVASVSATMLTCEYYIEQLQLPWWGVLLACALAIFYTLPIGILKATTNQSTSWGTYIPDDPWRTCASKYTATLAHIKH

SEQ ID NO: 184985 - protein, 255 aa, Zea Mays
MGYLYPGRPMANMCFKVYGYVGPHQALEFLQDFKLGHYMKIPPRAMFTAQVVGTLIAGSVYLGTIWWLLDTIPDVCNTELLPAGSPWTCPYDHVFYDASVLWGLIGPRRIFGDLGTYSAVNWFFLGGAIAPLLVWCTHKAFPAQKWIRHVNAPVLIGATTFMPPATAANYTTWILVAFLSGYVVYKYRRNWWERHNYLLSGALDAGLAFMAVLLYLCLGLENKSLNWWGNDLDGCPLASCPTAKGITVDGCPVHN

SEQ ID NO: 184986 - protein, 107 aa, Zea Mays
MSSHVHVPCLLVSSSRRSHLPYLLSLPRPQAAEHHCTCLLESLSTHGHGVRLSLCLPLGCSSAGYAEPSLAMAAPSLVPSSPIPSSLSVPSMVLLHSPWPCLPAAPH

SEQ ID NO: 184987 - protein, 107 aa, Zea Mays
MSSHVHVPCLLVSSSRRSHLPYLLSLPRPQAAEHHCTCLLESLSTHGHGVRLSLCLPLGCSSAGYGEPSLAMAAPSLVPSSPIPSSLSVPSMVLLHSPWPCLPAAPH

SEQ ID NO: 184988 - protein, 262 aa, Zea Mays
MQRVQGGQPERPDGAAPGGSGRPRHVRAPAAGRRRRRQEQAREQGGQRRRDGAAPGGAARARGLRAPAGGRARRRRRADAALHGGPHGGHRRRERAAALRRRGRRGQVLPDPRGARGRQGRRQLQRAGGSRWTWPGRGAASGWSTSCPPSLTCASPGSRPPPTSRRRSPARSPSQGTAACFSTRRSWTAAAPTPARSAWKDPVTSQPKCAGTSCAPSARWTCALWSSPTTCPGSPAPSPARCAGAPSPRSGCGPRRTSPSLT

SEQ ID NO: 184989 - protein, 65 aa, Zea Mays
MGFWATTLIFVLAGVAASLFTLLCCNRGPSTNLFHLTLVTTAVICCWMIWARCEYLGRRLHNMMS

SEQ ID NO: 184990 - protein, 383 aa, Zea Mays
MTIHIVLFLGNVCYAMAYDMKSLTVLIIGRLLCGMGSARAVNRRYISDCVPARIRMQASAGFVSASALGMACGPALAGLLQWKFKIYMVTFNQSTLPGWVMAVAWLLYLIWLWVSFKEPNRATEVNEAPQNPASGQTVDIGQVENGLAQPLLMDSVDKQNEDEDEEVDESEEAADDSRKPATSIGSAYRLLTPSVKVQLLIYFMLKYAMEILLSESSVITNHYFSWNTSAVAIFLAILGLTVLPVNAVVGTYISNMFEDRQLLMVSQITLLVGIIFSFKVTSTYSVVQYVVSALVTFVSAEVLEGVNLSLLSSVMSSRLSRGTYNGGLLSTEAGTLARVVADCTITAAGYLGVGKLLNVTLLPSLVICVASIACTFLTYNSLF

SEQ ID NO: 184991 - protein, 384 aa, Zea Mays
MTIHSIVLFLGNVCYAMAYDMKSLTVLIIGRLLCGMGSARAVNRRYISDCVPARIRMQASAGFVSASALGMACGPALAGLLQWKFKIYMVTFNQSTLPGWVMAVAWLLYLIWLWVSFKEPNRATEVNEAPQNPASGQTVDIGQVENGLAQPLLMDSVDKQNEDEDEEVDESEEAADDSRKPATSIGSAYRLLTPSVKVQLLIYFMLKYAMEILLSESSVITNHYFSWNTSAVAIFLAILGLTVLPVNAVVGTYISNMFEDRQLLMVSQITLLVGIIFSFKVTSTYSVVQYVVSALVTFVSAEVLEGVNLSLLSSVMSSRLSRGTYNGGLLSTEAGTLARVVADCTITAAGYLGVGKLLNVTLLPSLVICVASIACTFLTYNSLF

SEQ ID NO: 184992 - protein, 606 aa, Zea Mays
MVNFGKKLMADQIPEWKGYYINYKLMKKKVKQYGQQLQQGEKDRRRVLKDFSKMLDDQIEKIVLFLLEQQGMLASRIEELGKQRAILQDQPDISGIAELREAYREVGIDLIKLLKFVDLNATGIRKILKKFDKRFGYRFTDYYVTSRSNHPYSQLQQVFKHVGVGAVVGALSRNLAELQERQGSYLSIYDQPSSALKDPIIDMINSSVDKLTRSTNFLRFLGQHALIVDEESPSTAGEEEIEDQKYHFMSLMLNLVNTFLYMVNTYIIVPTADDYSVSLGAASTVCGVVIGSMAVAQIFSSVYFSAWSNKSYFKPLVFSSIVLFLGNVCYAMAYDMKSLTVLIIGRLLCGMGSARAVNRRYISDCVPARIRMQASAGFVSASALGMACGPALAGLLQWKFKIYMVTFNQSTLPGWVMAVAWLLYLIWLWVSFKEPNRATEVNEAPQNPASGQTVDIGQVENGLAQPLLMDSVDKQNEDEDEEVDESEEAADDSRKPATSIGSAYRLLTPSVKVQLLIYFMLKYAMEILLSESSVITNHYFSWNTSAVAIFLAILGLTVLPVNAVVGTYISNMFEDRHYLQLQGYEYILCCPVCCLSTCHICFCRSS

SEQ ID NO: 184993 - protein, 620 aa, Zea Mays
MVNFGKKLMADQIPEWKGYYINYKLMKKKVKQYGQQLQQGEKDRRRVLKDFSKMLDDQIEKIVLFLLEQQGMLASRIEELGKQRAILQDQPDISGLAELQERQGSYLSIYDQPSSALKDPIIDMINSSVDKLTRSTNFLRFLGQHALIVDEESPSTAGEEEIEDQKYHFMSLMLNLVNTFLYMVNTYIIVPTADDYSVSLGAASTVCGVVIGSMAVAQIFSSVYFSAWSNKSYFKPLVFSSIVLFLGNVCYAMAYDMKSLTVLIIGRLLCGMGSARAVNRRYISDCVPARIRMQASAGFVSASALGMACGPALAGLLQWKFKIYMVTFNQSTLPGWVMAVAWLLYLIWLWVSFKEPNRATEVNEAPQNPASGQTVDIGQVENGLAQPLLMDSVDKQNEDEDEEVDESEEAADDSRKPATSIGSAYRLLTPSVKVQLLIYFMLKYAMEILLSESSVITNHYFSWNTSAVAIFLAILGLTVLPVNAVVGTYISNMFEDRQLLMVSQITLLVGIIFSFKVTSTYSVVQYVVSALVTFVSAEVLEGVNLSLLSSVMSSRLSRGTYNGGLLSTEAGTLARVVADCTITAAGYLGVGKLLNVTLLPSLVICVASIACTFLTYNSLF

SEQ ID NO: 184994 - protein, 353 aa, Zea Mays
MTIQMGSARAVNRRYISDCVPARIRMQASAGFVSASALGMACGPALAGLLQWKFKIYMVTFNQSTLPGWVMAVAWLLYLIWLWVSFKEPNRATEVNEAPQNPASGQTVDIGQVENGLAQPLLMDSVDKQNEDEDEEVDESEEAADDSRKPATSIGSAYRLLTPSVKVQLLIYFMLKYAMEILLSESSVITNHYFSWNTSAVAIFLAILGLTVLPVNAVVGTYISNMFEDRQLLMVSQITLLVGIIFSFKVTSTYSVVQYVVSALVTFVSAEVLEGVNLSLLSSVMSSRLSRGTYNGGLLSTEAGTLARVVADCTITAAGYLGVGKLLNVTLLPSLVICVASIACTFLTYNSLF

SEQ ID NO: 184995 - protein, 78 aa, Zea Mays
MLPWSKTIAGFLILVELCKGLVVYPRQLTLEVFKGPYNPGQKGNTTCGYRRATSAEYKTGISVVLIGMSGSGPHMSNL

SEQ ID NO: 184996 - protein, 54 aa, Zea Mays
MAGAEGILHRSMDVVVVSCVVVGGLPHYTAACKMPLHEFVLSFVTCSALCIRGM

SEQ ID NO: 184997 - protein, 107 aa, Zea Mays
MRWPNSSPVLLQVKSWVTVILKWPTPGRTLRPRHCLLGNLSSQSGVSSILPPSHWCISKLSDCRRYSGALCKSVHMMCLPFASYDVWYLVCIACLNLYQEYLPMSIA

SEQ ID NO: 184998 - protein, 187 aa, Zea Mays
MAAATVSVPRIKLGSQGLEVSAQGLGCMGMSAFYGPPKPEPDMIKLIHHAVAAGVTLLDTSDMYGPHTNEILLGKALQGGVKEKVELATKFAVSFADGKREIRGDPAYVRAACEASLKRLGIDCIDLYYQHRIDKKVPIEVTCIKEKDAATCLSGSCRTWVCIETKALIHLDGKYFCTYVPWIHLPV

SEQ ID NO: 184999 - protein, 482 aa, Zea Mays
MKLLMHVEIIANCTGRTKNDDFCTTCKASRWKDKEPNCILTKKERKKETPCKVLRYFPIKDRLKRMFMCRETTPLLRWHDEERIKDGLLRHPADAPVWKRFDEKFPQFASDSRNIRFALATDGFNPFGKMSSMHSCWPVVLVVYNLPPWLCMKDHNIMLSLMIPGPKSPGYRIHVFFEPLLEDLKDLFQTGISTYDASRNESFTLQGAVLMNISDLPGLGMLASHMVHGKFACPPCGENVWTKQLKNGRKSCFLGHRKYIDLDHPYRFDASSFDGMIELGKEPSTYYGRPILHEITALGNFKDSKTYKSVSSLFSLPYWDDNILRYNLDVMHIEKNVFDNLYDTISGLEGKTKDNLQARLDLVDMNIRADLHPQVKDSGKLYLPPARFGMSKSERRVFCDVIRNINVPDGYCRNISKRVNVAKGKIIGLKTHDCHVLMQQFMPIALRGNLPDDITAVVFELSAYFRGICSKVLNVEELDRLD

SEQ ID NO: 185000 - protein, 402 aa, Zea Mays
MRFLYPARMEKWILRTIGERWRQHKSNLKSLHFDAHRSKENNLKNVPKGVLDDQWVTLVNNWFTTKSQDISEANRINCAKRKATHTSGTKSFARNREDMREQDPEKKYPHRAVLYINTHKSNITKNTNPHVVALKELLVQQPSLADTSHGKVAWKGNALSQILGEEKPGHIHGLGLVPNLDQVFGGSTSRHLKHLNLTSLDATSSEDVVSLRLQVEKLIDRVQKQDDTILNLQNTLELQKSHHECLDEPLSASKDVQPTTNQKVNLLDELNSTMADEIEHDGYEELQAQCKKSKIQEKSKPPMPRGGLQGGRVSSSLNVKNSSNAAKVMNQDIARNSSNHEPYKNKGSLENYLPSTKDDQSTSERKRVYGQFQSEEFWTLDENHESSHYEETHYNLVGFQQD

SEQ ID NO: 185001 - protein, 517 aa, Zea Mays
MQHMTTILLLENAKKESDNDNEFNDLGQTNEAISRGPNKLKHVWNLQKGKRIVVNCNELDQPIGEEAGVLGKFLDMVARNGCLCSLSFKDWRLLIGKKDRNNEQKNKQDVLKQVKMRFLYPARMEKWILRTIGERWRQHKSNLKSLHFDAHRSKENNLKNVPKGVLDDQWVTLVNNWFTTKSQDISEANRINCAKRKATHTSGTKSFARNREDMREQDPEKKYPHRAVLYINTHKSNITKNTNPHVVALKELLVQQPSLADTSHGKVAWKGNALSQILGEEKPGHIHGLGLVPNLDQVFGGSTSRHLKHLNLTSLDATSSEDVVSLRLQVEKLIDRVQKQDDTILNLQNTLELQKSHHECLDEPLSASKDVQPTTNQKVNLLDELNSTMADEIEHDGYEELQAQCKKSKIQEKSKPPMPRGGLQGGRVSSSLNVKNSSNAAKVMNQDIARNSSNHEPYKNKGSLENYLPSTKDDQSTSERKRVYGQFQSEEFWTLDENHESSHYEETHYNLVGFQQD

SEQ ID NO: 185002 - protein, 395 aa, Zea Mays
MQHMTTILLLENAKKESDNDNEFNDLGQTNEAISRGPNKLKHVWNLQKGKRIVVNCNELDQPIGEEAGVLGKFLDMVARNGCLCSLSFKDWRLLIGKKDRNNEQKNKQDVLKQVKMRFLYPARMEKWILRTIGERWRQHKSNLKSLHFDAHRSKENNLKNVPKGVLDDQWVTLVNNWFTTKSQDISEANRINCAKRKATHTSGTKSFARNREDMECLDEPLSASKDVQPTTNQKVNLLDELNSTMADEIEHDGYEELQAQCKKSKIQEKNKSSNAQDAKLLKDKRVSIAQKSKPPMPRGGLQGGRVSSSLNVKNSSNAAKVMNQDIARNSSNHEPYKNKGSLENYLPSTKDDQSTSERKRVYGQFQSEEFWTLDENHESSHYEETHYNLVGFQQD

SEQ ID NO: 185003 - protein, 490 aa, Zea Mays
MRFLYPARMEKWILRTIGERWRQHKSNLKSLHFDAHRSKENNLKNVPKGVLDDQWVTLVNNWFTTKSQDISEANRINCAKRKATHTSGTKSFARNREDMREQDPEKKYPHRAVLYINTHKSNITKNTNPHVVALKELLVQQPSLADTSHGKVAWKGNALSQILGEEKPGHIHGLGLVPNLDQVFGGSTSRHLKHLNLTSLDATSSEDVVSLRLQVEKLIDRVQKQDDTILNLQNTLELQKSHHECLDEPLSASKDVQPTTNQKVNLLDELNSTMADEIEHDGYEELQAQCKKSKIQEKSKPPMPRGGLQGGRVSSSLNVKNSSNAAKVMNQDIARNSSNHEPYKNKGSLENYLPSTKDDQSTSERKRVYGQFQSEEFWTLDENHESIKPLRGDTLQPSRISTGLKVGSHIFLKSWRNQNKKVALGTIIGCDPKQKVGGDPLGKEFWKVCLGLVLVRDEPLIRPYNNFVVLGDIDNNPIAWPSSCIEKAAL

SEQ ID NO: 185004 - protein, 442 aa, Zea Mays
MVARNGCLCSLSFKDWRLLIGKKDRNNEQKNKQDVLKQVKMRFLYPARMEKWILRTIGERWRQHKSNLKSLHFDAHRSKENNLKNVPKGVLDDQWVTLVNNWFTTKSQDISEANRINCAKRKATHTSGTKSFARNREDMREQDPEKKYPHRAVLYINTHKSNITKNTNPHVVALKELLVQQPSLADTSHGKVAWKGNALSQILGEEKPGHIHGLGLVPNLDQVFGGSTSRHLKHLNLTSLDATSSEDVVSLRLQVEKLIDRVQKQDDTILNLQNTLELQKSHHECLDEPLSASKDVQPTTNQKVNLLDELNSTMADEIEHDGYEELQAQCKKSKIQEKSKPPMPRGGLQGGRVSSSLNVKNSSNAAKVMNQDIARNSSNHEPYKNKGSLENYLPSTKDDQSTSERKRVYGQFQSEEFWTLDENHESSHYEETHYNLVGFQQD

SEQ ID NO: 185005 - protein, 453 aa, Zea Mays
MRLAAGEWFTARVSSCGLFHIAYPSASDQLKTELRTIYGQLCQDDMPMVRRAAASNLGKFAATVEQNHLKTEIMSIFDDLTQDDQDSVRLLAVEGCAALGKLLEPQDCVAHILPVIVNFSQDKSWRVRYMVANQLYELCEAVGPEPTRADLVPAYVRLLRDNEAEVRIAAAGKVTKFCRILNPQLSVQHILPCVKELSSDSSQHVRSALASVIMGMAPVLGKDATIEQLVPIFLSLLKDEFPDVRLNIISKLDQVNQVIGIDLLSQSLLPAIVELAEDRHWRVRLAIIEYIPLLASQLGVGFFDDKLGALCMQWLEDKVFSIRDAAANNLKRLAEEFGPEWAMQHIIPQVLEKINNPHYLYRMTILQAISLLAPVMGAEITCQKLLPVVINSSKDRVPNIKFNVAKVLQSLVPILDQSTVKPCLVELSEDPDVDVRYYANQALQACDQMMVSS

SEQ ID NO: 185006 - protein, 141 aa, Zea Mays
MVPRTAENFLALCGTGYYDGTVFHRNIKGFMVQGGDPTGTGKGGSSIWGAKFADELRESLKHNARGIMSMANSGPNTNGSQFFITYAKQPHLNGHYTVFAKVIHGFEVLDLMEKAQTGPGDRPLAEIRLNRVTIHANPLAV

SEQ ID NO: 185007 - protein, 87 aa, Zea Mays
MSHRKLKGKKRRSPLQHIRRKVYMFHPSSSSSENMLVNATPYQSISSSSQKHTPNLGFMAGWKESSPTTLHHNSQCLCTWENRSIHA

SEQ ID NO: 185008 - protein, 62 aa, Zea Mays
MVEHQQDKSLALLTKTWVPDIWWQWSKSRQESERTSEREKITHCLSQLPIFLHLVNVFRTSD

SEQ ID NO: 185009 - protein, 70 aa, Zea Mays
MLLIVGLMLSHQSTSKNLISQNPLKNKLAVGYNVPENNLVKSKNFLKHGKRVFAKSSSKLIPSSGFAPCS

SEQ ID NO: 185010 - protein, 771 aa, Zea Mays
MDPSLILFWNVRGLNSAARQDAVRSLVDSLRVDVVCLQETKLVDCDRRTVLSMLGADFDNNFVCLPSVGASDGVLITWRAKLGRIVASCVDSFSVSVKFNPADGEAWWLTCVYGPQGHDRKIAFIHELRAIRAACTGPWLLGGDFNLNFRDEDKNNLNINRAMMGRFRRCIDDLSIKDIDLLGWKYTWSGANNVQVRLDRVFCSSDWEEKFPNYLLQSSASEDSDHCPLLLGLKDNYTGKRRFHFESFWPRFEGFLEAVTNDWGSVQQSSCPLKTLSLKFKATTKGLQCWSDKKVGNFKLQLGLARELLLQLEVAKESRILNVLETWLLRRLKKCSLALASLIRSVARTRSRIAWLKDGDANTKLFHSWSRHRKRKNFIAKIQDGEQLVTSHSDKAEVLRSFYSDLIGTAQQRSRTVNLDTLGLQHIDLQGLEQPISEEEVWNTIKQLPPDKAPGPDGFTGRFYKACWSIIKKDIMAAILAVWNKDFWNFRYLNTAFITLLPKKEDAILAMDFRPISLIHSFAKLITKIMANRLSGYMDKLISRNQNVFIKGRFIQDNFMLVQQTARLLHAQKQPRILLKLDISKAFDSVSWSFLLEVLEKVGFGPIWRDVISGLLMTSSTQIMLNGVPGEYIQHKRGLRQGDSLSPLLFIIVMDVLNGLIVKAADEGLLQPLSTHSIQHRISLYADDVVIFLKPTASDLHLVTMILELFGDASGLKTNVQKSSVAPIHCSPVDMEMVTQIFPCKVETLPLKYLGLPLSREVKQGATAAIN

SEQ ID NO: 185011 - protein, 105 aa, Zea Mays
MKKSNVVKRQMVFSRQFSKRHIFGRLGTYGCETRVFAGRDLVGSKLNFSMIHGELRLLGGWPLFVKSHRIEAGHVCAFMFQEEEEEEGELSLRVHVLGTMPVPTI

SEQ ID NO: 185012 - protein, 112 aa, Zea Mays
MCLADLEFDYINPFDSSSRINKVVMPEFVLQALLSVLFLLSGHWAMLLLSLPMVYYNYTLYQRRQHLVDVTEIFNQLGREKKRRLFKIVSLIVLLFLSLFWMIWSVLSEEDE

SEQ ID NO: 185013 - protein, 105 aa, Zea Mays
MDPKGKGMVINDKEKESFANEPKDDKPTDSGSDHKRRDGKKKKTRRIKEIVYYDDSDESTSSQKDNDDNDYDKRKTVNSNFSFDYSRIPQSTNIHLLSIPLGKPP

SEQ ID NO: 185014 - protein, 281 aa, Zea Mays
MSFPHKMLPVTFVCSNQGQPGVKSHRYCKNIIGCDNWSISKTSWGNYQYNNVWTKENERQRKHFDDEVERIRAEAQCRIAEAERECKITLENEKMKYHEEYLDSIRILEEKWKVHQQSPKKQNKEAESTSNDTGEVHNLLQNEKMLRQSAEDEASDLKNQISHWKKLEATATAEIIKLQKMLDAEASQKEKLEEEIGVLRSQLLQMSMEADETRSLDKGDGPGKIFPGFRFIGCLRLEVSQPREQGQLDRSNRLPNSLNKLGYKRYCHCLNLKNLMSAFMQ

SEQ ID NO: 185015 - protein, 193 aa, Zea Mays
MFGQRAMKVENMVKLKEEFDYKSLCRKLDIELDKLIAENERQRKHFDDEVERIRAEAQCRIAEAERECKITLENEKMKYHEEYLDSIRILEEKWKVHQQSPKKQNKEAESTSNDTGEVHNLLQNEKMLRQSAEDEASDLKNQISHWKKLEATATAEIIKLQKMLDAEASQKEKLEEEIGVLRSQLLQMSMEAD

SEQ ID NO: 185016 - protein, 181 aa, Zea Mays
MFGQRAMKVENMVKLKEEFDYKSLCRKLDIELDKLIAENERQRKHFDDEVERIRAEAQCRIAEAERECKITLENKEAESTSNDTGEVHNLLQNEKMLRQSAEDEASDLKNQISHWKKLEATATAEIIKLQKMLDAEASQKEKLEEEIGVLRSQLLQMSMEADETRSLDKGDGPGKIFPGFR

SEQ ID NO: 185017 - protein, 211 aa, Zea Mays
MLLRSSEDETIRRVAAGAIANLAMNETNQDLIMAQGGVTLLSMTASDAEDPQTLRMVAGAIANLCGNDKLQTRLRVEGGIKALLGMVRCGHPDVLAQVARGIANFAKCESRAATQGNKMGKSLLIDDGALPWIVKNANNEAAPIRRHIELALCHLAQHEVNSKDIINEGALWELVRISRDCSREDIRNLAYRTLTSSPTLEAEMRRLGIKM

SEQ ID NO: 185018 - protein, 117 aa, Zea Mays
MKYHEEYLDSIRILEEKWKVHQQSPKKQNKEAESTSNDTGEVHNLLQNEKMLRQSAEDEASDLKNQISHWKKLEATATAEIIKLQKMLDAEASQKEKLEEEIGVLRSQLLQMSMEAD

SEQ ID NO: 185019 - protein, 293 aa, Zea Mays
MTPANGAPARAAEAGPHEVESEADAFRRQVDDLVSKTDVITSHKDAWPFLEPVDVVTLQLPDYHNIITQPMDFSTIQKKMERKDGTCYTNVREICSDVRLIFANAMKYNDDQNVIHLMAKSLLEKFEEKWLHFLPKVESEEKRQKEEESKGVAATNTSREVAIVKLAKDTDDEINKKLEELRKMVVHRCRKMTTDEKRKLGAGICHLSPDDLSKALEIVAQDNPSFQTKAEEVDLDMDAQSETTLWRLKFFVREALERQANVASGKMDENAKRKREICNALAKTTSRRIKKQP

SEQ ID NO: 185020 - protein, 50 aa, Zea Mays
MICSNWWPSSFLLKSSRSMMWFVTRDAKDKSRVDPKMMLVTNLRMDDLIE

SEQ ID NO: 185021 - protein, 625 aa, Zea Mays
MAAGVLFIILGFLLVLPSATAIGQVCGNAGNYTANSTYQSNLASLAAALPANTSTSPQLFATATAGQSPDAVYALALCRGDTASSSNLTGCAACVKNSFAYAQRTCPHAKAASVYDDDCLLGFSSSDILIPANNMSTLFQYWNPASIPGGDASMVSADVKDLLTQTARAAASSPRRFATAFMDASGSSIPTLYSLAQCTPDLSAGDCLACLQRLVSLLNATTSVRLGGRVLVLRCNFRFENMMFYDGAPTTRVTTPSSSGPPAPPFPAPTTTDKRAAGTKPWVVAVSVLCSTSSSGSSSTLLRLVLPLAKQKVHKSSRGGDEVDWEMEAHLSEFWVFDLHQILEATDNFSEENKLGEGGFGPVYKGQLPEGVEIAVKRLASHSGQGFVEFKNEVQLIAKLQHRNLVRHLGCCSQEEEKILVYEYLPNKSLDLFIFADEDRRSLLDWNNRLAIIEGTAEGLLYLHKHSRLRVIHRDLKPSNILLDSEMNPKISDFGLAKIFSSNDVSSEGGTTTRRVVGTYGYMAPEYASEGLFSVKSDVFSFGVLVLEIISGKRNSGIHECGDFINILGYENAADRPTMLDVVAMLSTKTKVLDKPNHPAYFNVRVGNEEASTTATTMSCSVSMR

SEQ ID NO: 185022 - protein, 291 aa, Zea Mays
MEASVAAAGGGGGSAATRSSPAAVQATNDDAAASKLSCVNKGYMKDDYVRFFVRRPTRRAPIINRGYYARWSVLRTLLHQFLNAGKNSNNDKPKQILSLGAGFDTTFFQLQDEGMAPHCYVELDFKEVTSKKAAIINHYSEMKEKLGSEASISIEKGEVISTHYKLFSADIRDIPKLDSVIRMAEMDPSLPTFIIAECVLIYLDPTATGAIIHPDDAFGEQMIRNLESRGCPLLGINATPTLSHKEKLFLGNGWQRAVAWDMLKIYNDFIDSQERRSLCYAAPFHDVTADK

SEQ ID NO: 185023 - protein, 206 aa, Zea Mays
MEASVAAAGGGGGSAATRSSPAAVQATNDDAAASKLSCVNKGYMKDDYVRFFVRRPTRRAPIINRGYYARWSVLRTLLHQFLNAGKNSNNDKPKQILSLGAGFDTTFFQLQDEGMAPHCYVELDFKEVTSKKAAIINHYSEMKEKLGSEASISIEKGEVISTHYKLFSADIRDIPKLDSVIRMAEMDPRVCAYLPGPNCHWCYYSS

SEQ ID NO: 185024 - protein, 357 aa, Zea Mays
MEASVAAAGGGGGSAATRSSPAAVQATNDDAAASKLSCVNKGYMKDDYVRFFVRRPTRRAPIINRGYYARWSVLRTLLHQFLNAGKNSNNDKPKQILSLGAGFDTTFFQLQDEGMAPHCYVELDFKEVTSKKAAIINHYSEMKEKLGSEASISIEKGEVISTHYKLFSADIRDIPKLDSVIRMAEMDPSLPTFIIAECVLIYLDPTATGAIVSWASQKFSTAVFFLYEQIHPDDAFGEQMIRNLESRGCPLLGINATPTLSHKEKLFLGNGWQRAVAWDMLKIYNDFIDSQERRSLCYAAPFHDVTADKAARNGCRIERLELFDEFEEWYMMQEHYCVAYGINDAEGIFDSFGFGET

SEQ ID NO: 185025 - protein, 293 aa, Zea Mays
MKDDYVRFFVRRPTRRAPIINRGYYARWSVLRTLLHQFLNAGKNSNNDKPKQILSLGAGFDTTFFQLQDEGMAPHCYVELDFKEVTSKKAAIINHYSEMKEKLGSEASISIEKGEVISTHYKLFSADIRDIPKLDSVIRMAEMDPSLPTFIIAECVLIYLDPTATGAIVSWASQKFSTAVFFLYEQIHPDDAFGEQMIRNLESRGCPLLGINATPTLSHKEKLFLGNGWQRAVAWDMLKIYNDFIDSQERRRIERLELFDEFEEWYMMQEHYCVAYGINDAEGIFDSFGFGET

SEQ ID NO: 185026 - protein, 332 aa, Zea Mays
MEASVAAAGGGGGSAATRSSPAAVQATNDDAAASKLSCVNKGYMKDDYVRFFVRRPTRRAPIINRGYYARWSVLRTLLHQFLNAGKNSNNDKPKQILSLGAGFDTTFFQLQDEGMAPHCYVELDFKEVTSKKAAIINHYSEMKEKLGSEASISIEKGEVISTHYKLFSADIRDIPKLDSVIRMAEMDPSLPTFIIAECVLIYLDPTATGAIVSWASQKFSTAVFFLYEQIHPDDAFGEQMIRNLESRGCPLLGINATPTLSHKEKLFLGNGWQRAVAWDMLKIYNDFIDSQERRRILNLILAENSVSACVMLHLSMMSLLIRLPAMDAGSNG

SEQ ID NO: 185027 - protein, 314 aa, Zea Mays
MEASVAAAGGGGGSAATRSSPAAVQATNDDAAASKLSCVNKGYMKDDYVRFFVRRPTRRAPIINRGYYARWSVLRTLLHQFLNAGKNSNNDKPKQILSLGAGFDTTFFQLQDEGMAPHCYVELDFKEVTSKKAAIINHYSEMKEKLGSEASISIEKGEVISTHYKLFSADIRDIPKLDSVIRMAEMDPSLPTFIIAECVLIYLDPTATGAIIHPDDAFGEQMIRNLESRGCPLLGINATPTLSHKEKLFLGNGWQRAVAWDMLKIYNDFIDSQERRRILNLILAENSVSACVMLHLSMMSLLIRLPAMDAGSNG

SEQ ID NO: 185028 - protein, 318 aa, Zea Mays
MEASVAAAGGGGGSAATRSSPAAVQATNDDAAASKLSCVNKGYMKDDYVRFFVRRPTRRAPIINRGYYARWSVLRTLLHQFLNAGKNSNNDKPKQILSLGAGFDTTFFQLQDEGMAPHCYVELDFKEVTSKKAAIINHYSEMKEKLGSEASISIEKGEVISTHYKLFSADIRDIPKLDSVIRMAEMDPSLPTFIIAECVLIYLDPTATGAIIHPDDAFGEQMIRNLESRGCPLLGINATPTLSHKEKLFLGNGWQRAVAWDMLKIYNDFIDSQERRRIERLELFDEFEEWYMMQEHYCVAYGINDAEGIFDSFGFGET

SEQ ID NO: 185029 - protein, 91 aa, Zea Mays
MTRHRRRSIIARRGPWHRHLHYKEELLHVIPLGPYTALHLLGMYFDAGASICSSSVRERRRLATVLRTSLVLVSWEEEPLLTTRSASYGVD

SEQ ID NO: 185030 - protein, 70 aa, Zea Mays
MMICHVMTSLKPIYCSYVASTYRTNPRPIRIQGPCQLILALDHTICTTVTTDASKPRMISRCSAVHGAAA

SEQ ID NO: 185031 - protein, 184 aa, Zea Mays
MAASALHLRLHPSPPAGVKLQQRKLRSKIQRQGGLSRRFSKVVSYYGLTTPPYKLDALEPYMSKRTVELHWGKHHQDYVDGLNKQLATSPLYGYTLEDLIKEAYNNGNPLPEYNNAAQVWNHHFFWESMQPEGGGLPEGVKRNERKLSVVHTRNAISPLAFGDIPIISLDLWEHAYYLDYKSLL

SEQ ID NO: 185032 - protein, 197 aa, Zea Mays
MSKRTVELHWGKHHQDYVDGLNKQLATSPLYGYTLEDLIKEAYNNGNPLPEYNNAAQVWNHHFFWESMQPEGGGLPEGGVLQQIEKDFGSFTNFREEFIRSALQLLGSGWVWLVLKRNERKLSVVHTRNAISPLAFGDIPIISLDLWEHAYYLDYKDDKLTYVTNFMDHLVSWHTVTLRMMRAESFVNLGEPNIPEA

SEQ ID NO: 185033 - protein, 212 aa, Zea Mays
MAGSLAASAFFPGPGASPAASAKNLAGEVPDSLSVRGIVAKPNANSGNMQVKAQAQTLPKVNGTKVNLKNASSDTEEAIPYTAPKTFYNQLPDWSMLLAAVTTIFLAAEKQWTLLDWKPKKPDMLVDTFGFGGIIQDGMVFRQNFIIRSYEIGADRTASIETLMNHLQETALNHVKTAGLLGDGFGATPEMSKRNLIWVVSKIQLLVEKYPL

SEQ ID NO: 185034 - protein, 381 aa, Zea Mays
MAGSLAASAFFPGPGASPAASAKNLAGEVPDSLSVRGIVAKPNANSGNMQVKAQAQTLPKVNGTKVNLKNASSDTEEAIPYTAPKTFYNQLPDWSMLLAAVTTIFLAAEKQWTLLDWKPKKPDMLVDTFGFGGIIQDGMVFRQNFIIRSYEIGADRTASIETLMNHLQETALNHVKTAGLLGDGFGATPEMSKRNLIWVVSKIQLLVEKYPLWEDTVQVDTWVAAAGKNGMRRDWHVLDCKSGCTILRATSVWVMMNKNTRRLSKMPDEVRAEIGPYFNARAAITDEQSEKLAKPGSTAGGDAMKQFMRKGLTPRWWGDLDVNQHVNNVKYIGWILEVISSGPASFHRIQWPLLWPCGGCCWRDLAGMASKFIKLCILVLV

SEQ ID NO: 185035 - protein, 172 aa, Zea Mays
MMNKNTRRLSKMPDEVRAEIGPYFNARAAITDEQSEKLAKPGSTAGGDAMKQFMRKGLTPRWWGDLDVNQHVNNVKYIGWILESAPIAILEKHELASMTLDYRKECGRDSVLQSLTTVAGECVDGDTDSTIQCDHLLQLETGADIVKAHTEWRPKRAHGEGTPMGGFPAESA

SEQ ID NO: 185036 - protein, 72 aa, Zea Mays
MDPHQGKKHQTEEKYIRQTKERKQTFLLPIEIHFSDYPCDCSHSQVDLTSGLGCDSHVTYKQVNHRMQAKDQ

SEQ ID NO: 185037 - protein, 59 aa, Zea Mays
MGMWKVVCVTDASAYIASWIVRLLLDRGYTVRATVRDTGVCSASKSTSRGTISSQVQDL

SEQ ID NO: 185038 - protein, 101 aa, Zea Mays
MHALREPHLAALTAVVVDARSCSCAATTSASCWHRALKVVERRDMVLVWGRCVWKRLPQTKGCSSKQERKEQLELLLPTECVERRGKEMSKRCLGCRIVWL

SEQ ID NO: 185039 - protein, 99 aa, Zea Mays
MQCWHLESYLHHVLNKFSEPLLCLLVYCFRAQSSEEIPALELLLVPWYLCSLCYGLSSPLNPQVDLPLFMWFSFRALQRTPRRRIGFLKKEPAPVLLIQ

SEQ ID NO: 185040 - protein, 116 aa, Zea Mays
MGMGFWSWGTCGLQFALWASRVENAQATTPVSVCTAHSRPPVRIGAHLPSSVAQLPTNGDQEHPAHTVAAPCRRTRVKLPPSPQDRVAAQPKVEPPPKEEPPYSLTLCSALLPDLM

SEQ ID NO: 185041 - protein, 210 aa, Zea Mays
MPRPRPPSCLSASAASTSCRSSGSNALLCVVLTRSGLASAICAIPVRLSVSSVVDFLFAIVILSVVPIRASPARQPSRPLYPLSRALPRSPCCVVVDLSACCCGTWIALASTRTRRTTILFVEWKSSRWHVEVVDRHPHLHQVPSREDALVLARVIIILIVDCQRQSPRQQPHPRLRRSNNFAAPLFKSESSSVGSSLTSQLQLELIMVS

SEQ ID NO: 185042 - protein, 217 aa, Zea Mays
MHCTDHSYMGTIFDPESGDRLHIELAKSTSRRPRGGVEGYRVIDKRANKTEGNADHENVGDEDDDEVWGEDEDGGNDNNGDGGSDEPSGTENENPSDKNELPTDQSDQPGHKQQNGQSLSNEGRDKSSSDIPPCSTIFIANLGHTCTEDELKEVLSKEPGFHVLKMRRRGGMPVAFADFTDIESSTAAMNRLQGTVLASSDNDGLHIEYARSKMRKS

SEQ ID NO: 185043 - protein, 59 aa, Zea Mays
MGNLSQMKDETNLQVIYHLALLSSLQIWDIHAQRTNSRKFYPRNLDFMSLKCVAVVECL

SEQ ID NO: 185044 - protein, 75 aa, Zea Mays
MLTMKTLVMKMMTKYGGKMRMEAMTIMVMEDQMSHRAQKMKIPVIRMNCLRIRVINQGTSSRMGNLSQMTRQIFK

SEQ ID NO: 185045 - protein, 285 aa, Zea Mays
MATDPAPVPAMRCYSLPPVRLPAEDILFCVDVDLEARAEMKSAAAAAASSGSTSTASPQPTQPAGAGGAPAAGPRTVVRRMDAVRQALLLFVHSKLTMCPEHRFAFASLGETFSMGFSSDAGFAMEAIHSLSASETRYAMADLTQLFMTACQEGKRAESQGRILRVVLIYCRSSTKPQHQWPVKPKNFTLDIIYLHDKPNPDNCPQKVYDALVDVLEHVSQYEGYILETGQGLARVLFRQMCILVSHPLQRCMQDDLDIPKQVAKKIVAAEPAQNEDAAPVSSQQ

SEQ ID NO: 185046 - protein, 162 aa, Zea Mays
MATDPAPVPAMRCYSLPPVRLPAEDILFCVDVDLEARAEMKSAAAAAASSGSTSTASPQPTQPAGAGGAPAAGPRTVVRRMDAVRQALLLFVHSKLTMCPEHRFAFASLGETFSMVKKGFSSDAGFAMELARKGKEQNRKAGFSGWCSYTAVPLQSHSISGP

SEQ ID NO: 185047 - protein, 161 aa, Zea Mays
MEAIHSLSASETRYAMADLTQLFMTACQEGKRAESQGRILRVVLIYCRSSTKPQHQWPVKPKNFTLDIIYLHDKPNPDNCPQKVYDALVDVLEHVSQYEGYILETGQGLARVLFRQMCILVSHPLQRCMQDDLDIPKQVAKKIVAAEPAQNEDAAPVSSQQ

SEQ ID NO: 185048 - protein, 320 aa, Zea Mays
MAPPPAPPADWTPDLRPVASVPVPITVPSPRDHTHHHHHLVDRRDTPRGRAWEPERNRRGEAMDGAAVVKLMSGEAGYVLEDVPHVSDYLPDLPTYPNPLQDNPAYSVVKQYFVNPDDTVCQKVYFEPDEVHACIVTCGGLCPGLNTVIREIVCGLSDMYGVTKILGIQGGYRGFYARNTITLTPKIVNDIHKRGGTVLGSSRGGHDTVKIVDSIQDRGINQVYVIGGDGTQRGAGVIFEEVRRRGLKVSVAGIPKTIDNDIPVIDKSFGFDTAVEEAQRAINAAHVEAVSAENGIGLVKLMGRHSGLLLDPRITILSGR

SEQ ID NO: 185049 - protein, 251 aa, Zea Mays
MDRVHRTAQTSSVNTEDTSRYTASMQQNSFPLRPSLSSSLPPRAPYPPTANDHPGILPPMSAAADDRARRAAAFRPAPLPPPAQKQQLSGVAAAVLDAGGRLGRAVGDVFRRLRIDDTFYSGGGGGGGGAPNRSWRDAGNNGGRPAAAGAPAAASREEATGGGASSGRFARAQGSMNLSATYDSRTHDVESSVVARGDLWRAEASHSSSSSAGAGGNGANNNLFLVQLGPVLFVRDTTLLFPVHLSKRHLI

SEQ ID NO: 185050 - protein, 408 aa, Zea Mays
MSAAADDRARRAAAFRPAPLPPPAQKQQLSGVAAAVLDAGGRLGRAVGDVFRRLRIDDTFYSGGGGGGGGAPNRSWRDAGNNGGRPAAAGAPAAASREEATGGGASSGRFARAQGSMNLSATYDSRTHDVESSVVARGDLWRAEASHSSSSSAGAGGNGANNNLFLVQLGPVLFVRDTTLLFPVHLSKRHLIWYGFERKNGVHSVCPAYWSAHKRWFFMSMLCLNPFAFSFMDMQFPNGQLRYVAGDGFTARAFLPLRGGVLQAHGKFPGEKRLSFSFKNRNGGSVVPMVQWPDKSLSVGVVQALSWRRSGLMLQPATQISICPTIGGRHPGVCVELIHSADDNVGVVCGYSHTASSPASAYASISIGRSKLNGGAARSGLAFRVDAPLLHGFGRPWFSVQMNSGIEF

SEQ ID NO: 185051 - protein, 139 aa, Zea Mays
MKSPTSCRPTQCPYCKTLNYAVEYRGVKTMEEKGIEQLEEQRVIEAQIRMRRQELQDDAERMKNKQAAPLSDVVASAQVDSCSTDGASTVAASSPRGNDALSSEVQRSELILRNSEVFQQRRFSFVGSIVIIVALNYWG

SEQ ID NO: 185052 - protein, 324 aa, Zea Mays
MKSPTSCRPTQCPYCKTLNYAVEYRGVKTMEEKGIEQLEEQRVIEAQIRMRRQELQDDAERMKNKQAAPLSDVVASAQVDSCSTDGASTVAASSPRGNDALSSEVQRSELILRNSEVFQQRRGNNFDVDLEEVMLMEAIWLSVQDQEALGNPGCVSTTPSSIPSRPLDGAMTTAGEAASPGGFACAVAALAEQQHMHGQSSSASACQTTRFDILSRSDRSFTEDLSVVGNSSSDSRVDEPSSSSTHRTVEGSNGWWSEVAEAGTRIAESDVTVEAGVGNSSTSAVSNIGSGSVPDSFEEQMMLAMALSLVDARARAGSPGLAWR

SEQ ID NO: 185053 - protein, 464 aa, Zea Mays
MPPPPPPPLGLRLRLSLLPPHPIAPSIRHAFCSPSVVSCHLSVRPLAQRRGGRPRPLCAARGEAEAEGFAWPDGSEEELRRLLELLPRELSRRVETHPELPALVEVVMDLGRPPLARFPSGDFLLSQRPISFDDLRHATSHSQVGDFGADNRAGISRTLHRISAIRNRKGVIVGLTCRVGRAVPGSANLLQDLVKDGGSLLLIGPPGVGKTTVIREIARMLADDYKKRVMIVDTSNEIGGDGDIPHPGIGNARRLQVPNQDMQHKVLIEAVENHMPQAIVIDEIGTKLEAMAASTIAQRGIQLVATAHGVTIENLIMNPSLEMLVGGIQSVTLGDEEANRRGVQKTVLERKGPSTFTCAAEIVSKKELRVHRSLEATVDALLAGKLPNFEIRKLGSKGSMQEVSVQKEQSHLGIYDATEFGSDSLRNARRSLDSAFSLDSAEGHIVRSDGADSSFNLYAYGLMQ

SEQ ID NO: 185054 - protein, 597 aa, Zea Mays
MPPPPPPPLGLRLRLSLLPPHPIAPSIRHAFCSPSVVSCHLSVRPLAQRRGGRPRPLCAARGEAEAEGFAWPDGSEEELRRLLELLPRELSRRVETHPELPALVEVVMDLGRPPLARFPSGDFLLSQRPISFDDLRHATSHSQVGDFGADNRAGISRTLHRISAIRNRKGVIVGLTCRVGRAVPGSANLLQDLVKDGGSLLLIGPPGVGKTTVIREIARMLADDYKKRVMIVDTSNEIGGDGDIPHPGIGNARRLQVPNQDMQHKSVTLGDEEANRRGVQKTVLERKGPSTFTCAAEIVSKKELRVHRSLEATVDALLAGKLPNFEIRKLGSKGSMQEVSVQKEQSHLGIYDATEFGSDSLRNARRSLDSAFSLDSAEGHIVRSDGADSSFNLYAYGISESTALQAIHQLELDDSVTLTYNISEADAVIALHSKLKKNYQIQAVLKSQDIPVFLVKTNSLPQITRALRALVDDHMDEVIDYNDKEEARSSEETDALEEARLAIEQVVIPKGESVQLLPRPSSIISSQVGLVESFSLKWEVVGQEPKACVRILPHFAPKQVEAVARETPAEPADSDWESHDDSDHTQSGITRLPFLPD

SEQ ID NO: 185055 - protein, 322 aa, Zea Mays
MPPPPPPPLGLRLRLSLLPPHPIAPSIRHAFCSPSVVSCHLSVRPLAQRRGGRPRPLCAARGEAEAEGFAWPDGSEEELRRLLELLPRELSRRVETHPELPALVEVVMDLGRPPLARFPSGDFLLSQRPISFDDLRHATSHSQVGDFGADNRAGISRTLHRISAIRNRKGVIVGLTCRVGRAVPGSANLLQDLVKDGGSLLLIGPPGVGKTTVIREIARMLADDYKKRVMIVDTSNEIGGDGDIPHPGIGNARRLQVPNQDMQHKSVTLGDEEANRRGVQKTVLERKGPSTFTCAAEIVSKKELRVHRSLEATVDALLAVTL

SEQ ID NO: 185056 - protein, 398 aa, Zea Mays
MHVLIEAVENHMPQAIVIDEIGTKLEAMAASTIAQRGIQLVATAHGVTIENLIMNPSLEMLVGGIQSVTLGDEEANRRGVQKTVLERKGPSTFTCAAEIVSKKELRVHRSLEATVDALLAGKLPNFEIRKLGSKGSMQEVSVQKEQSHLGIYDATEFGSDSLRNARRSLDSAFSLDSAEGHIVRSDGADSSFNLYAYGISESTALQAIHQLELDDSVTLTYNISEADAVIALHSKLKKNYQIQAVLKSQDIPVFLVKTNSLPQITRALRALVDDHMDEVIDYNDKEEARSSEETDALEEARLAIEQVVIPKGESVQLLPRPSSIISSQVGLVESFSLKWEVVGQEPKACVRILPHFAPKQVEAVARETPAEPADSDWESHDDSDHTQSGITRLPFLPD

SEQ ID NO: 185057 - protein, 449 aa, Zea Mays
MPPPPPPPLGLRLRLSLLPPHPIAPSIRHAFCSPSVVSCHLSVRPLAQRRGGRPRPLCAARGEAEAEGFAWPDGSEEELRRLLELLPRELSRRVETHPELPALVEVVMDLGRPPLARFPSGDFLLSQRPISFDDLRHATSHSQVGDFGADNRAGISRTLHRISAIRNRKGVIVGLTCRVGRAVPGSANLLQDLVKDGGSLLLIGPPGVGKTTVIREIARMLADDYKKRVMIVDTSNEIGGDGDIPHPGIGNARRLQVPNQDMQHKVLIEAVENHMPQAIVIDEIGTKLEAMAASTIAQRGIQLVATAHGVTIENLIMNPSLEMLVGGIQSVTLGDEEANRRGVQKTVLERKGPSTFTCAAEIVSKKELRVHRSLEATVDALLAGKLPNFEIRKLGSKGSMQEVSVQKEQSHLGIYDATEFGSDSLRNARRSLDSAFSLDSAEGHIVRMF

SEQ ID NO: 185058 - protein, 467 aa, Zea Mays
MPPPPPPPLGLRLRLSLLPPHPIAPSIRHAFCSPSVVSCHLSVRPLAQRRGGRPRPLCAARGEAEAEGFAWPDGSEEELRRLLELLPRELSRRVETHPELPALVEVVMDLGRPPLARFPSGDFLLSQRPISFDDLRHATSHSQVGDFGADNRAGISRTLHRISAIRNRKGVIVGLTCRVGRAVPGSANLLQDLVKDGGSLLLIGPPGVGKTTVIREIARMLADDYKKRVMIVDTSNEIGGDGDIPHPGIGNARRLQVPNQDMQHKVLIEAVENHMPQAIVIDEIGTKLEAMAASTIAQRGIQLVATAHGVTIENLIMNPSLEMLVGGIQSVTLGDEEANRRGVQKTVLERKGPSTFTCAAEIVSKKELRVHRSLEATVDALLAGKLPNFEIRKLGSKGSMQEVSVQKEQSHLGIYDATEFGSDSLRNARRSLDSAFSLDSAEGHIVRSPSRLPCKPFISWSWTTVLL

SEQ ID NO: 185059 - protein, 397 aa, Zea Mays
MDSRALGTVGLLLVSCFLLAAGGAQRFEAMFNFGDSLGDTGNLCVNKSAANQLLLTFAQPPYGMTYFGHPTCRCSDGRLVVDFLGAGATAPPAVEAAGRRGLPQGCEHGHRRRHGPRLRVPQVHRPRLPDLEQRRHERPDPVVQGPAAVHLRRRAAGGRARLQGLPGQIPVRLRPLRRERLQCHALLRAHRGSGKELHAQDRRHRRQRRRATHPVGRSGHRRPGSAARGVLRHLPHVSPERRPGRLRRARVPEGAQRAVRLPELPAPEQARRPPGKVSLGEDRVRRLLHPHRPAGAQPGALRLHNWRRPGVLRRWWRQVQLRARRAVRHEGRHRVPGPVEARVLGRRPPDGGREQAHRRGMAQRPVLPSSHCDSVDSVGHPRPMRGCAHGKTGTGLP

SEQ ID NO: 185060 - protein, 186 aa, Zea Mays
MPGSPKVFFASSASRRSGALRRLLSSPAFSAACLFFGLAGFLAATLTLSRSPSITHSRCPDSSRPLSVSVAWDRRPGDGSAAGSAELPASLATGSRGRHKVAFVGIFTGFGSIGRRRALRRTWLPADRQGLLRLEEATGLAFRFVIGKSNSKNKMAALNREVEEYDDFVLLDLEEEYSRLPYKTFL

SEQ ID NO: 185061 - protein, 302 aa, Zea Mays
MPGSPKVFFASSASRRSGALRRLLSSPAFSAACLFFGLAGFLAATLTLSRSPSITHSRCPDSSRPLSVSVAWDRRPGDGSAAGSAELPASLATGSRGRHKVAFVGIFTGFGSIGRRRALRRTWLPADRQGLLRLEEATGLAFRFVIGKSNSKNKMAALNREVEEYDDFVLLDLEEEYSRLPYKTLAFFKAAYALYDSDFYVKADDDIYLRPDRLSLLLAKERSHPQTYIGCMKKGPVFTDPKLKWLGMSPNPFYSDQNTSFMRMGQFMLYQLTWWLAWLHCETTVSVCSATRTLQLDRGCLL

SEQ ID NO: 185062 - protein, 109 aa, Zea Mays
MVDPDAPSPSDPNLREYLHWLVTDIPGTTGAAFWQEVICYESPRPTMGIHRFVLVLFQQLGRQTVYAPGWRQNFNTRDFAELYNLGPPVAAVYFNCQREAGSGGRRMYS

SEQ ID NO: 185063 - protein, 110 aa, Zea Mays
MTVGKLMEAYETCIAKLWKSQSGRRKISLKKVQEANFSKEARKLVSEAILNQIISLNRLDMELYDHAKKIFTQEHLMLKAQQSMVGQHRQFGEQKVCSNSKSTSSLCILF

SEQ ID NO: 185064 - protein, 78 aa, Zea Mays
MISEKELLVNRFISVPKDMGAFNCGAFVAGIVKGVLDNAGFPAVVTAHFVPIEGQQRPRTTILIKFAEEVLHREARLG

SEQ ID NO: 185065 - protein, 146 aa, Zea Mays
MIGVGKAKQYANVLDKPLSRGRQEVSLSAFAFLFSELVQYNQTQVDNITELERRLEDAGYAVGARVLELLCHREKGNRRETRLLGILSFIHSTVWKVLFGKVADSLEKGTEHEDEYMISEKELLVNRHGSIQLWSFCCGHCKGCIR

SEQ ID NO: 185066 - protein, 398 aa, Zea Mays
MLQFDDDRVVAFINVTGSLVGIRFTSQFEDGQLGIYVSGEPDLFMGLGESVVSMHWAAANLTCDEALKNKSQYACCSNSKCLGVNSKDGYIGYRCKCLDGFQGNPYSISDGCEDIDECKTQHICKENEVCNNVAGSYYCTKTTKQQGLVLGVIIGLCVGFGILVSCLGGMLVIRRWKRDIQKQLRRKYFRKNQGLLLEQLISSDENARNNTKIFSLEELKKATNDFDTSRILGRGGHGMVYKGILSDQRVVAIKISKIMEQGEIDSFINEVAILSQINHRNIVRLFGCCLETEVPLLVYDFVSNGSLFEILHAAEASNDFQLSWDDCLRIALEAAGALYYLHSSASVSIFHRDVKSSNILLDGNYTAKVSDFGASRLVPIDQTHVVTNISRHFWLLRS

SEQ ID NO: 185067 - protein, 749 aa, Zea Mays
MSRHCVTLPVIIFGLLQMAVALYSNPSSTHPNCTERCGNVSIQYPFGIGSGCFRQPDFSLTCDDGGGGGGNQPPKIFLHDGITEVLPDSGGTVGLSRLIDVAISHTIFMAPGIPSYNFSWNLSSFTMFDGSFNVTGCDFDIYIQEPGTNGSLWPCTNRCPQSITTETVARHDCNGTGCCIVYLGISVRDFQLKFVRHDNGARGDHDALSNGSALWDTINITSNWAQIYWDIDDQPTCARAKEKNINYACVSNHSQCFDDEVFDVGYRCACNSGYVGNPFVVDGCKRDEASSQLANFYNLRAGVKLGYSPNQLKENCSRSCGNISVPYPFGLEEGCSARKLFKLNCTNATASMLQFDDDRVVAFINVTGSLVGIRFTSQFEDGQLGIYVSGEPDLFMGLGESVVSMHWAAANLTCDEALKNKSQYACCSNSKCLGVNSKDGYIGYRCKCLDGFQGNPYSISDGCEDIDECKTQHICKENEVCNNVAGSYYCTKTTKQQGLVLGVIIGLCVGFGILVSCLGGMLVIRRWKRDIQKQLRRKYFRKNQGLLLEQLISSDENARNNTKIFSLEELKKATNDFDTSRILGRGGHGMVYKGILSDQRVVAIKISKIMEQGEIDSFINEVAILSQINHRNIVRLFGCCLETEVPLLVYDFVSNGSLFEILHAAEASNDFQLSWDDCLRIALEAAGALYYLHSSASVSIFHRDVKSSNILLDGNYTAKVSDFGASRLVPIDQTHVVTNISRHFWLLRS

SEQ ID NO: 185068 - protein, 146 aa, Zea Mays
MKLASNRWCTLALAASVFSSDILCSRCFFGRTEGSMPWLCSMMVRLTPTRSSADQAKMSLFRERQEMSFSSSREVRSSLITTICLGVAGSRGTAFVPSLLWSCAMTFSSVTGRVPSKPSRYALRQCTFRFPGTKSFSMLHAVYWLP

SEQ ID NO: 185069 - protein, 471 aa, Zea Mays
MQEELNNFTRNEVWHLVPHPNQNVVGTKWVFRNKQYEHGVVTRNKARLVAKGYSQVEGLDFGETYAPVARLESIRILLAYATYHGFKLYQMDVKKCLPQWTNQGRVYVEQPPGFEDSEYPNHVYKLSKALYGLKQAPRAWYECLRDFLITNGFKVRKADPTLFTKTIAKDLFVCQIYVDDIIFGSTNKSTCEEFSWIMIQKFEMSMMGELKYFLGFQVKQLQDGTFISQIKYIQDILNMFGMKDAKPIKIPMGTSGHLDLDTGGKSVDQKVYRSMIGSLLYLCASRPDIMLSVCMCARFQADPKEVHLRAVKRIIRYLVYTPNFGLWYPKGSTFDLIGYFDADWAGCKIDRKSTSGTCQFLGRSLVSWASKKQNPVALSTVEAEYITAGHCCAQLLWMRQTLRDYGYKLSKVPLLCDNESAILMADNSVEHSRTKHIDIWYHFLRDHQQRGILKLLMLAPKNNYPISLPNL

SEQ ID NO: 185070 - protein, 121 aa, Zea Mays
MCPKCLTELNPRNLISLWLGCTIICPPGSSLTLELLSGKPGFLNAITMDESKLLLNSSKPILSFKRIFSSSENWWLRVQKFLVSTGSIWIPLTTLNQLMEKVSMINAYTNDLCNCILKRGC

SEQ ID NO: 185071 - protein, 451 aa, Zea Mays
MSRHCVTLLVIIFGLLQMAVALYSNPSSTHPNCTERCGNVSIQYPFGFGSGCFRQPDFSLTCDGGGGGNQPPKTFLHDGITEVLPDSGVTVGLSRLIDVAISHTIFMAPGIPSYNFSWNLSSFTMLDGSFNVTGCDFDIYRQEPGKNGSIPRCTNSCPQNITETVARQNCNGTGCCRLYVGEVVPDFQLKFVLHNNDTRGDHDALSNGSTLWNTINITSNWAQILWDIDDQPTCSRAKDKNINYACVSNYSHCFDAELFDIGYRCGCNSGYVGNPYVVDGCKRDEGYSPNQLKENCSRSCGNISVPYPFGLEEGCSARKLFKLNCRNATASMLQFDDDRVVAFINVAESLVGIRFTSHFEDDQLGIYVPGEPDLFMGLGESVVSMHWAAANLTCDEALKNKSQYACVSSNSKCLGVNSKDGYIGYRCKCLDGFQGNPYTISDGCEEVLLLC

SEQ ID NO: 185072 - protein, 281 aa, Zea Mays
MELFPHGGFVRLRSRARDKYVHADVDASGVSLRPLGAAPSVNAVWKPERWPSEGDFLILQIVAYGRYLAVSDKDAPPGHRGVRAVQRDYNSPRAEAPFLWTAFRVDAHQNYVRLHNHQRWLRANGRHRYWNNVVTIDTRNASLTTMMQWRVEEIPVSPEPLPLPPPPQQPTIHVSRGLFKRRAKVHPSGRMIQHVRMDDDGFILDNWPDFNFDDYSVSNLRAEVALRQDDENITLCLRAGKHALLIPLITDLPHNTDPLDIIVMPAGSPVVLEVMLYLVVS

SEQ ID NO: 185073 - protein, 888 aa, Zea Mays
MAEIVTGAMGTLLPKLANLIKEEYNLQKKVRGEIMFLETELKSMEAALIKVSEAPIDHPPDVQVKLWTREVRELSYDLEDSIDRFMVRVGDGKPHSFKGFIDRSLHLLTRGRIQHSIGIDIKEIRSRIKDVSERRDRYKVDLVPSKPVGRSIDNLRLSALYRKATELVGAEEKSSDLVKRLMEGDKEASKQPVVLSIVGFGGLGKTTLANLVYEKIKGQFVCGAFVYVSHNPDVVKVFKNMLYQLDGDKYRDINQGTWSEEQLIWELRKFLLHKRYFIVIDDIWNTSVWETIQCSLMHNECGSIIIITTRNIDVAKQAGSVYQMEPLSLSDSTKLFCQIIFGSEDKCPPANLAEVAGKILQKCGGVPLAIITMASMLANKTGKEINTHSYWSHVYQSMGYGLDGSTNVKNMRRILSVSYYDLPSHLKTCLLYLSLYPEDYRIRTRGLIWKWIGEGFVHEEQGKSLYEVGKDYIEELVNTSMLEPVGIGHDGKTVSCRIHDMVLDLISFLSNEEHFLTKVGGQQPVSLDLPKKVRRLSLQISQEEEAKQLATMSFSHVRSLTVSTEVFQLTPKLSAFLVLRVLNLKKCNGVNNHHFKDICNMFQLRYLSLNAKFITEIPREIRNLQFLQVLDITNLGHKVKMTTIIHLRQLLRLCSRSGWSIKQLDGFGKLTSLQEVKGTITIESPSMLHDLGCLTNLRTLGINFRDWDESYEEPFIQCLSNLVSLKSMKIKGTMMSSLCSECDKLYPGPQQLCSIDMKSLARTVIMTRVPRWMSSLCSLSSIKITLLALGVQDIHVLGSIPSLRCLSVHVKETRDERLVIDKCYPFRCLTEMQIDYESMAVVFAPGSMQNLKELHLLFGVKERKIRSQAQAIRAAILFANAGRIPATD

SEQ ID NO: 185074 - protein, 1060 aa, Zea Mays
MAEIVTGAMGTLLPKLANLIKEEYNLQKKVRGEIMFLETELKSMEAALIKVSEAPIDHPPDVQVKLWTREVRELSYDLEDSIDRFMVRVGDGKPHSFKGFIDRSLHLLTRGRIQHSIGIDIKEIRSRIKDVSERRDRYKVDLVPSKPVGRSIDNLRLSALYRKATELVGAEEKSSDLVKRLMEGDKEASKQPVVLSIVGFGGLGKTTLANLVYEKIKGQFVCGAFVYVSHNPDVVKVFKNMLYQLDGDKYRDINQGTWSEEQLIWELRKFLLHKRYFIVIDDIWNTSVWETIQCSLMHNECGSIIIITTRNIDVAKQAGSVYQMEPLSLSDSTKLFCQIIFGSEDKCPPANLAEVAGKILQKCGGVPLAIITMASMLANKTGKEINTHSYWSHVYQSMGYGLDGSTNVKNMRRILSVSYYDLPSHLKTCLLYLSLYPEDYRIRTRGLIWKWIGEGFVHEEQGKSLYEVGKDYIEELVNTSMLEPVGIGHDGKTVSCRIHDMVLDLISFLSNEEHFLTKVGGQQPVSLDLPKKVRRLSLQISQEEEAKQLATMSFSHLRYLSLNAKFITEIPREIRNLQFLQVLDITNLGHKVKMTTIIHLRQLLRLCSRSGWSIKQLDGFGKLTSLQEVKGTITIESPSMLHDLGCLTNLRTLGINFRDWDESYEEPFIQCLSNLVSLKSMKIKGTMMSSLCSECDKLYPGPQQLCSIDMKSLARTVIMTRVPRWMSSLCSLSSIKITLLALGVQDIHVLGSIPSLRCLSVHVKETRDERLVIDKCYPFRCLTEMQIDYESMAVVFAPGSMQNLKELHLLFGVKEVMHKYGDCNFGLEHLMSLEHVSVKTMYTIMPEEVEAVKDEFQKSLDMNPGKPTLIVDYLYPKEHIPFSNWHCILNVAWVLVANKLSEVMNFLQIIQSHVRDDDVRYDDVRGRSQSRCCDLGATSQSILPAQHITLLRLGEEVGRRLLVPLQLQSPDCPVRIPSSRDTATAASALRFCLPGETNGRQRHRRRRRRRAQIGVPAGPAQPPPRSPSASHGGARESGEGPDVPESSVDHGGKSDGVVPQ

SEQ ID NO: 185075 - protein, 308 aa, Zea Mays
MAASATDADAGAGLRSEFLQVLLSRRRDLLVPLTVEQGSPVKDPMYQNPPSTMEANPMESCPSKEVENLREKLVEENFYLITELGEQGRVPVLLLKLDDPVPRRKPAIVFLHSSYKCKEWLRPLLEAYASKGYVCVAIDSRYHGERASNETTYIDALKSAWRNGDTMPFVFDTVWDLVKLGDYLGEREDVDPCRVGITGESLGGMHAWFAAFVDTRYSVVVPIIGVQGFRWAIDNNMWLARVNSIRPLFEEARIDLGKSELDTEVVERVWEKIAPGLDSQFDAPYSLPLLAPRPLLLLNVHCRAWSRP

SEQ ID NO: 185076 - protein, 137 aa, Zea Mays
MPFVFDTVWDLVKLGDYLGEREDVDPCRVGITGESLGGMHAWFAAFVDTRYSVVVPIIGVQGFRWAIDNNMWLARVNSIRPLFEEARIDLGKSELDTEVVERVWEKIAPGLDSQFDAPYSLPLLAPRPLLLLNVHCR

SEQ ID NO: 185077 - protein, 139 aa, Zea Mays
MHAWFAAFVDTRYSVVVPIIGVQGFRWAIDNNMWLARVNSIRPLFEEARIDLGKSELDTEVVERVWEKIAPGLDSQFDAPYSLPLLAPRPLLLLNGAEDPRCPISGLGEAISKTAKAYEESGCAEKFMYYSLKEEFGEL

SEQ ID NO: 185078 - protein, 157 aa, Zea Mays
MHAWFAAFVDTRYSVVVPIIGVQGFRWAIDNNMWLARVNSIRPLFEEARIDLGKSELDTEVVERVWEKIAPGLDSQFDAPYSLPLLAPRPLLLLNGAEDPRCPISGLGEAISKTAKAYEESGCAEKFMFIAEPGVGHKITIDMVKAASEWFDRFLHA

SEQ ID NO: 185079 - protein, 65 aa, Zea Mays
MTPSMFATIQQRRRGTFGPPERTRSLKLFRSGLDLLCLPRLAFSCIIFIKSLHFSILCFRFPKGA

SEQ ID NO: 185080 - protein, 81 aa, Zea Mays
MGDNQRRIDVVFAMIYLLVALDHQCSDIHPIKLSYLTKDRSRPSIIYCICMRINNNSDTRNKIFSKSVLKKRLGVCGADSL

SEQ ID NO: 185081 - protein, 56 aa, Zea Mays
MGAQASTQCRVCCLSSLASSRSFHRRNEIPGFTDRSRPERNQPVAGMALRPARSIA

SEQ ID NO: 185082 - protein, 238 aa, Zea Mays
MMHAKSESDVTSLAASSPPRSPKRGGGAAGNGGYYVQSPSRESHDGGYKSSSMQPTPVYNSPNESPSHPSYGRHSRSSSVSRFSGNLRKGAAGDRKVLNDKGWPECNVIEEEGPYEDLAGDSGLSRRCQIILGFLTFVLLFTVFCLIIWGAARPYEPEVIVKSLVMDDFYAGEGTDHSGVPTKLVTTNCSLHIAVYNPATMFGIHVTSGPIHLMYSEIPIAVGQVYPSSVLGLFNSRF

SEQ ID NO: 185083 - protein, 126 aa, Zea Mays
MEPDDDLRRRGAVPEHAHQAHRRQEDHGDRRLHRLLPVLDDLIAEDNYLNYHERLLKLVKLGGLIGYDNTLWNGSVVLPDDAPMRKYIRFYRDFVLVLNKALAADDRVEICQLPVGDGVTLCRRVK

SEQ ID NO: 185084 - protein, 292 aa, Zea Mays
MLLFCLRLLPVNCFLLLGQWAFTWRQPVCWSQHAHPTGTRNPPETRRVRVRVWDFTRGCGRGRVWAYSAGAVAGGFFLHPTRTRPVAISTTRATTTTTPAAAAANCCCPTAGWRWTPLPSARRPSPRLPPPRLQSRLRRCWAPVERSRRWQGTAAAEGGSTAASGCASGASGWRRSASRTSGRGSGSGPTPPPSPPRAPTTRPSSASAAAPRGSTSPTSSTARRWPTTPRTARGSQPPPSARRRPRSAPASTRSTAAAAPLRSRCRSIAAAPRTPTSTGSQPRKPQTTSKAR

SEQ ID NO: 185085 - protein, 809 aa, Zea Mays
MDLAINPFSSGTRLRDMIRAIRACKTAAEERAVVRRECAAIRAAISEGDQDYRHRNMAKLMFIHMLGYPTHFGQMECLKLIAAAGFPEKRIGYLGLMLLLDERQEVLMLVTNSLKQDLNHSNQFIVGLALCALGNICSAEMARDLAPEVERLLQNRDPNTKKKAALCSIRIVRKVPDLAENFMSAAASLLKEKHHGVLISAVQLCMELCKASHEALEYLRKNCLEGLVRILRDVSNSSYAPEYDIGGITDPFLHIRVLKLMRILGQGDADCSEYINDILAQVSTKTESNKNAGNAILYECVETIMGIEATSGLRVLAINILGRFLSNRDNNIRYVALNMLMKAIAVDTQAVQRHRATILECVKDADVSIRKRALELVYLLVNDTNVKPLTKELVDYLEVSDQDFKEDLTAKICSIVEKFSLDKLWYLDQMFRVLSLAGNYVKDDVWHALIVLMSNASELQGYSIRSLYKALQASGEQESLVRVAIWCIGEYGEMLVNNLSMLDMEEPITVTESDAVDAVEIALQRYSADVTTRAMCLVSLLKLSSRFPPTSERIKEIVAQNKGNTVLELQQRSIEFSSIIQRHQSIKSSLLERMPALDEANYLVKRAASTQAAVSSVNSAPAVTSGGPLKLPNGVAKPPPAPLADLLDLGSDDAPVTTSAPTTSPNDFLQDLLGIGLTDSSPIGGAPSTSTDILMDLLSIGSSPVQNGPPTSNFSLPGIETKPPPVTPQVVDLLDGLSSSTSLPDENAAYPTITAFQSATLRITFSFKKQPGKPQETTINASFTNLATTALTDFVFQAAVPKDGNPYMV

SEQ ID NO: 185086 - protein, 498 aa, Zea Mays
MDLAINPFSSGTRLRDMIRAIRACKTAAEERAVVRRECAAIRAAISEGDQDYRHRNMAKLMFIHMLGYPTHFGQMECLKLIAAAGFPEKRIGYLGLMLLLDERQEVLMLVTNSLKQDLNHSNQFIVGLALCALGNICSAEMARDLAPEVERLLQNRDPNTKKKAALCSIRIVRKVPDLAENFMSAAASLLKEKHHGVLISAVQLCMELCKASHEALEYLRKNCLEGLVRILRDVSNSSYAPEYDIGGITDPFLHIRVLKLMRILGQGDADCSEYINDILAQVSTKTESNKNAGNAILYECVETIMGIEATSGLRVLAINILGRFLSNRDNNIRYVALNMLMKAIAVDTQAVQRHRATILECVKDADVSIRKRALELVYLLVNDTNVKPLTKELVDYLEVSDQDFKEDLTAKICSIVEKFSLDKLWYLDQMFRVLSLAGNYVKDDVWHALIVLMSNASELQGYSIRSLYKALQASGEQLGWPFGALVNMEKCWSTILVC

SEQ ID NO: 185087 - protein, 425 aa, Zea Mays
MFDNYIVGPFPAFIQNLTNLTDLRIYGTNLQGPIPKNFSNLSNLEVLMLGDLAGNHSYLNVIGAWANLSVLSLRKCGLTGQVPNTPPNLPKLKYLDLTSNNLSGSIGGLLLSYKTSNYMDVSYNYYVDGSLSNNPSGQKQFINYLGTSIDASGRINSGNLTILNCLRMNECNINNLTNRATSFAINCGGKQVEYSDLMPIMFSEDSTDLGGSGFHVNATSHWVVSHVGSDPFNESTGIVNTSDIFETNMQELYQTARTSTSSLWYYVVGLANGNYTVQLFFAEIVITHGPGKRLFDIDIQDQNIRKDFDITKEAGGSRKATNITYEVTVDNSILAIHLYWSGRGTCCIPYEGAYGPLVSAIKVTHSQDPKTSPPQAPHSDSARDDVKRRGVVAGIAALSIAAAVISSSVVYLWWKWVSLVKRPMA

SEQ ID NO: 185088 - protein, 615 aa, Zea Mays
MLCSSHLLLRAQVNSCLRPPRPTPVPMARSAPTFVAVFLLVLVLLTMDAAQGQQPFPLSTDPSDADALHAVFRQWRLEGGAAMEDPCRKGVWSESSGINASVECNCLPSRVCRITSLNVSGHGNISAIPRELFNLTELVSLDLSNNNLSGSIPPEVINLSKLETWHFNNNPLSGGFPHELSLLRNLRSLWMFDNYIVGPFPAFIQNLTNLTDLRIYGTNLQGPIPKNFSNLSNLEVLMLGDLAGNHSYLNVIGAWANLSVLSLRKCGLTGQVPNTPPNLPKLKYLDLTSNNLSGSIGGLLLSYKTSNYMDVSYNYYVDGSLSNNPSGQKQFINYLGTSIDASGRINSGNLTILNCLRMNECNINNLTNRATSFAINCGGKQVEYSDLMPIMFSEDSTDLGGSGFHVNATSHWVVSHVGSDPFNESTGIVNTSDIFETNMQELYQTARTSTSSLWYYVVGLANGNYTVQLFFAEIVITHGPGKRLFDIDIQDQNIRKDFDITKEAGGSRKATNITYEVTVDNSILAIHLYWSGRGTCCIPYEGAYGPLVSAIKVTHSQDPKTSPPQAPHSDSARDDVKRRGVVAGIAALSIAAAVISSSVVYLWWKWVSLVKRPMA

SEQ ID NO: 185089 - protein, 510 aa, Zea Mays
MLCSSHLLLRAQVNSCLRPPRPTPVPMARSAPTFVAVFLLVLVLLTMDAAQGQQPFPLSTDPSDADALHAVFRQWRLEGGAAMEDPCRKGVWSESSGINASVECNCLPSRVCRITSLNVSGHGNISAIPRELFNLTELVSLDLSNNNLSGSIPPEVINLSKLETWHFNNNPLSGGFPHELSLLRNLRSLWMFDNYIVGPFPAFIQNLTNLTDLRIYGTNLQGPIPKNFSNLSNLEVLMLGDLAGNHSYLNVIGAWANLSVLSLRKCGLTGQVPNTPPNLPKLKYLDLTSNNLSGSIGGLLLSYKTSNYMDVSYNYYVDGSLSNNPSGQKQFINYLGTSIDASGRINSGNLTILNCLRMNECNINNLTKIVITHGPGKRLFDIDIQDQNIRKDFDITKEAGGSRKATNITYEVTVDNSILAIHLYWSGRGTCCIPYEGAYGPLVSAIKVTHSQDPKTSPPQAPHSDSARDDVKRRGVVAGIAALSIAAAVISSSVVYLWWKWVSLVKRPMA

SEQ ID NO: 185090 - protein, 165 aa, Zea Mays
MLCSSHLLLRAQVNSCLRPPRPTPVPMARSAPTFVAVFLLVLVLLTMDAAQGQQPFPLSTDPSDADALHAVFRQWRLEGGAAMEDPCRKGVWSESSGINASVECNCLPSRVCRITSLNVSGHGNISAIPRELFNLTELVSLDLSNNNLSGSIPPEVINLSKLETC

SEQ ID NO: 185091 - protein, 369 aa, Zea Mays
MLCSSHLLLRAQVNSCLRPPRPTPVPMARSAPTFVAVFLLVLVLLTMDAAQGQQPFPLSTDPSDADALHAVFRQWRLEGGAAMEDPCRKGVWSESSGINASVECNCLPSRVCRITSLNVSGHGNISAIPRELFNLTELVSLDLSNNNLSGSIPPEVINLSKLETWHFNNNPLSGGFPHELSLLRNLRSLWMFDNYIVGPFPAFIQNLTNLTDLRIYGTNLQGPIPKNFSNLSNLEVLMLGDLAGNHSYLNVIGAWANLSVLSLRKCGLTGQVPNTPPNLPKLKYLDLTSNNLSGSIGGLLLSYKTSNYIYVGGNNLSGPVPSEIVQSSVSLDVSYNYYVDGSLSNNPSEIILEHQLMQVEESTVEILQS

SEQ ID NO: 185092 - protein, 342 aa, Zea Mays
MFDNYIVGPFPAFIQNLTNLTDLRIYGTNLQGPIPKNFSNLSNLEVLMLGDLAGNHSYLNVIGAWANLSVLSLRKCGLTGQVPNTPPNLPKLKYLDLTSNNLSGSIGGLLLSYKTSNYIYVGGNNLSGPVPSEIVQSSVSLDVSYNYYVDGSLSNNPSGQKQFINYLGTSIDASGRINSGNLTILNCLRMNECNINNLTKIVITHGPGKRLFDIDIQDQNIRKDFDITKEAGGSRKATNITYEVTVDNSILAIHLYWSGRGTCCIPYEGAYGPLVSAIKVTHSQDPKTSPPQAPHSDSARDDVKRRGVVAGIAALSIAAAVISSSVVYLWWKWVSLVKRPMA

SEQ ID NO: 185093 - protein, 335 aa, Zea Mays
MWSYRDLTSNNLSGSIGGLLLSYKTSNYMDVSYNYYVDGSLSNNPSGQKQFINYLGTSIDASGRINSGNLTILNCLRMNECNINNLTNRATSFAINCGGKQVEYSDLMPIMFSEDSTDLGGSGFHVNATSHWVVSHVGSDPFNESTGIVNTSDIFETNMQELYQTARTSTSSLWYYVVGLANGNYTVQLFFAEIVITHGPGKRLFDIDIQDQNIRKDFDITKEAGGSRKATNITYEVTVDNSILAIHLYWSGRGTCCIPYEGAYGPLVSAIKVTHSQDPKTSPPQAPHSDSARDDVKRRGVVAGIAALSIAAAVISSSVVYLWWKWVSLVKRPMA

SEQ ID NO: 185094 - protein, 318 aa, Zea Mays
MPTGPDAPDEHIILDENVKAEGHDYYSIGAFKVSPNNKLVAYAEDTKGDEIYTVYVIDTESGEYVGQPLKGITSDIEWAGDDHLVYITMDSILRPDKVWLHKLGSDQSSDACLYHEKDDTFSLGLQASESKRYLFVESGSKNTSFIFYLDIPKQNKELAVLTPRVYGIDTTASHRGNHFFIKRRSDEFYNSELVACPLDNVAETTILLPHRESVKIQDFQLFDNHIAVYERENGLPKVIVYRLPAIGESIGQLQGGRAIDFIDPTYAVDPEESQFHSSVLRFHYSSMRTPPSVYDYDMDSGVSVLKKIHTADSMHQIM

SEQ ID NO: 185095 - protein, 503 aa, Zea Mays
MPTGPDAPDEHIILDENVKAEGHDYYSIGAFKVSPNNKLVAYAEDTKGDEIYTVYVIDTESGEYVGQPLKGITSDIEWAGDDHLVYITMDSILRPDKVWLHKLGSDQSSDACLYHEKDDTFSLGLQASESKRYLFVESGSKNTSFIFYLDIPKQNKELAVLTPRVYGIDTTASHRGNHFFIKRRSDEFYNSELVACPLDNVAETTILLPHRESVKIQDFQLFDNHIAVYERENGLPKVIVYRLPAIGESIGQLQGGRAIDFIDPTYAVDPEESQFHSSVLRFHYSSMRTPPSVYDYDMDSGVSVLKKIHTILGGFNASNYVTERKWAAAADGTQVPMSILYRNDLVKLDGSDPMLLYGYGSYEICIDPSFRGSRFSLVDRGFIYVIAHIRGGGEMGRKWYEDGKLLKKKNTFTDFIDCAEHLIKSKYCSREKLCINGRSAGGLLMGAVLNMRPDLFRAAVAGVPFVDVVTTMLDPTIPLTTAEWEVMAQEYPNILVTAGLNGI

SEQ ID NO: 185096 - protein, 246 aa, Zea Mays
MDYRQACNSTAHLRCWRELGKNTPECPTSWEHVYIKATGEQSAEMVTDEGAIYVTSNRGYNWKAAVQETVSATLNRTVSSGISGASYYTGTFNTVNRSADGRYVAVSSRGNFYLTWEPGQPFWQPHNRAVARRIQNMGWRADGGLWLLVRGGGLFLSRGTGITEDFEEVQVQSRGFGILDVGYRSQEEAWAAGGSGVLLKTTNGGKSWMRDKAADNIAANLYSVKFLDDRKGFVLGNDGVLLRYLG

SEQ ID NO: 185097 - protein, 969 aa, Zea Mays
MPCALEVIDARLQSTSHIQCSRSFDQNIGRRFSKGHLIQKPVAICPENSDTSSTILLFRHDPDWKQAPFLSDTQEVNKPNEKNMHDQVDSSKPVSNGNTHGGSTFRQSQQRENVCNSLMAVPPCHVVAKKYSRSVATALSLGSDSDILHNGDKLPKRNSRKRGKQCKRTIRKRLNLASETIFEESTYGASPAEVVPTNLLVDKLSETTSSASSLVKTDGRYKEDHVECGIMLNLATLGTDEMDGSGCAGSSYNDAGGRLSSSCVSYLNDKSNTTDSSEFDGSTFTEHGLGEESNSYQKLTCPYVYNPSYATMDSIFSRWNSDNSGNYSVDVEARLTVKDENRHDHSKLGASTGRSNVRMECQLIGSCFSATHAEDTNDPLGIRSYSSKDVTDSCSHTEMVQCSSKSFHFKSGRRNIKSSKTPSYVDLTASNRVRGSNRHKNNGKDSSAVWQKVERNDKMVSKAGHPSDTPVHDKGANEVGKKGVQEDPTRIRAKHNPNKKVCKQKPSNGAVELEPAKGEDALNSCHTFSGPFYTKQAPFLRQQRNSFSKQGSQSLKNYCAPRNGIPKVAKDYLQQEELPMLVLVHAKNTSDKSSSYSSSADEVGLTGVSNNYPTEGNESSQPDIEVAASVSCNLVPDLAPQAASDDFHISDPHSLRPENKGASNSRSSNNLCTDPFAAEAKEARCVKLLTENNSQEPSDNAAETDYSKMKEVISYVYTAQQRVEDIQLCIGRPIADFENFVYSASPVVHCSSCSVGCKSCLQECVKDGLCLHQTPDITLRTVWQWYEEPSCYGLDVKAQDLWRSKALWNSHCQFTTYFVPYLSAVQLFSQPKRTSGGSIDKESIHRDVTCETSPQLNLPPIFAKLFPKQSVPVNKPSTLRTEDDQQSADGELVFEFFEYEQPYSRRQLFDKVNELIAGAKPSNCQISGDPKNLEASLHDLHPASWYALFSWNVHLYLVLCCMVSHIPDT

SEQ ID NO: 185098 - protein, 981 aa, Zea Mays
MHDQVDSSKPVSNGNTHGGSTFRQSQQRENVCNSLMAVPPCHVVAKKYSRSVATALSLGSDSDILHNGDKLPKRNSRKRGKQCKRTIRKRLNLASETIFEESTYGASPAEVVPTNLLVDKLSETTSSASSLVKTDGRYKEDHVECGIMLNLATLGTDEMDGSGCAGSSYNDAGGRLSSSCVSYLNDKSNTTDSSEFDGSTFTEHGLGEESNSYQKLTCPYVYNPSYATMDSIFSRWNSDNSGNYSVDVEARLTVKDENRHDHSKLGASTGRSNVRMECQLIGSCFSATHAEDTNDPLGIRSYSSKDVTDSCSHTEMVQCSSKSFHFKSGRRNIKSSKTPSYVDLTASNRVRGSNRHKNNGKDSSAVWQKVERNDKMVSKAGHPSDTPVHDKGANEVGKKGVQEDPTRIRAKHNPNKKVCKQKPSNGAVELEPAKGEDALNSCHTFSGPFYTKQAPFLRQQRNSFSKQGSQSLKNYCAPRNGIPKVAKDYLQQEELPMLVLVHAKNTSDKSSSYSSSADEVGLTGVSNNYPTEGNESSQPDIEVAASVSCNLVPDLAPQAASDDFHISDPHSLRPENKGASNSRSSNNLCTDPFAAEAKEARCVKLLTENNSQEPSDNAAETDYSKMKEVISYVYTAQQRVEDIQLCIGRPIADFENFVYSASPVVHCSSCSVGCKSCLQECVKDGLCLHQTPDITLRTVWQWYEEPSCYGLDVKAQDLWRSKALWNSHCQFTTYFVPYLSAVQLFSQPKRTSGGSIDKESIHRDVTCETSPQLNLPPIFAKLFPKQSVPVNKPSTLRTEDDQQSADGELVFEFFEYEQPYSRRQLFDKVNELIAGAKPSNCQISGDPKNLEASLHDLHPASWYCVAWYPIYRIPDGKFQATFLTYHSLGHWIRRSSSAGGAAVLPVMGLQSYNAKAEWWFEMSKSESEGGQSQASEASEILKERSRTLSEAAAVLSRASVLKNGQMSRNRHPDYEFFLSRS

SEQ ID NO: 185099 - protein, 1057 aa, Zea Mays
MPCALEVIDARLQSTSHIQCSRSFDQNIGRRFSKGHLIQKPVAICPENSDTSSTILLFRHDPDWKQAPFLSDTQEVNKPNEKNMHDQVDSSKPVSNGNTHGGSTFRQSQQRENVCNSLMAVPPCHVVAKKYSRSVATALSLGSDSDILHNGDKLPKRNSRKRGKQCKRTIRKRLNLASETIFEESTYGASPAEVVPTNLLVDKLSETTSSASSLVKTDGRYKEDHVECGIMLNLATLGTDEMDGSGCAGSSYNDAGGRLSSSCVSYLNDKSNTTDSSEFDGSTFTEHGLGEESNSYQKLTCPYVYNPSYATMDSIFSRWNSDNSGNYSVDVEARLTVKDENRHDHSKLGASTGRSNVRMECQLIGSCFSATHAEDTNDPLGIRSYSSKDVTDSCSHTEMVQCSSKSFHFKSGRRNIKSSKTPSYVDLTASNRVRGSNRHKNNGKDSSAVWQKVERNDKMVSKAGHPSDTPVHDKGANEVGKKGVQEDPTRIRAKHNPNKKVCKQKPSNGAVELEPAKGEDALNSCHTFSGPFYTKQAPFLRQQRNSFSKQGSQSLKNYCAPRNGIPKVAKDYLQQEELPMLVLVHAKNTSDKSSSYSSSADEVGLTGVSNNYPTEGNESSQPDIEVAASVSCNLVPDLAPQAASDDFHISDPHSLRPENKGASNSRSSNNLCTDPFAAEAKEARCVKLLTENNSQEPCKWYSAAGHLSQKWVPVGKKETCNGICLDVSANGDDSNLPSERTYKLNLSEHAAADNAAETDYSKMKEVISYVYTAQQRVEDIQLCIGRPIADFENFVYSASPVVHCSSCSVGCKSCLQECVKDGLCLHQTPDITLRTVWQWYEEPSCYGLDVKAQDLWRSKALWNSHCQFTTYFVPYLSAVQLFSQPKRTSGGSIDKESIHRDVTCETSPQLNLPPIFAKLFPKQSVPVNKPSTLRTEDDQQSADGELVFEFFEYEQPYSRRQLFDKVNELIAGAKPSNCQISGDPKNLEASLHDLHPASWYCVAWYPIYRIPDGKFQATFLTYHSLGHWIRRSSSAGGAAVLPVMGLQSYNAKSGGLR

SEQ ID NO: 185100 - protein, 940 aa, Zea Mays
MHDQVDSSKPVSNGNTHGGSTFRQSQQRENVCNSLMAVPPCHVVAKKYSRSVATALSLGSDSDILHNGDKLPKRNSRKRGKQCKRTIRKRLNLASETIFEESTYGASPAEVVPTNLLVDKLSETTSSASSLVKTDGRYKEDHVECGIMLNLATLGTDEMDGSGCAGSSYNDAGGRLSSSCVSYLNDKSNTTDSSEFDGSTFTEHGLGEESNSYQKLTCPYVYNPSYATMDSIFSRWNSDNSGNYSVDVEARLTVKDENRHDHSKLGASTGRSNVRMECQLIGSCFSATHAEDTNDPLGIRSYSSKDVTDSCSHTEMVQCSSKSFHFKSGRRNIKSSKTPSYVDLTASNRVRGSNRHKNNGKDSSAVWQKVERNDKMVSKAGHPSDTPVHDKGANEVGKKGVQEDPTRIRAKHNPNKKVCKQKPSNGAVELEPAKGEDALNSCHTFSGPFYTKQAPFLRQQRNSFSKQGSQSLKNYCAPRNGIPKVAKDYLQQEELPMLVLVHAKNTSDKSSSYSSSADEVGLTGVSNNYPTEGNESSQPDIEVAASVSCNLVPDLAPQAASDDFHISDPHSLRPENKGASNSRSSNNLCTDPFAAEAKEARCVKLLTENNSQEPCKWYSAAGHLSQKWVPVGKKETCNGICLDVSANGDDSNLPSERTYKLNLSEHAAADNAAETDYSKMKEVISYVYTAQQRVEDIQLCIGRPIADFENFVYSASPVVHCSSCSVGCKSCLQECVKDGLCLHQTPDITLRTVWQWYEEPSCYGLDVKAQDLWRSKALWNSHCQFTTYFVPYLSAVQLFSQPKRTSGGSIDKESIHRDVTCETSPQLNLPPIFAKLFPKQSVPVNKPSTLRTEDDQQSADGELVFEFFEYEQPYSRRQLFDKVNELIAGAKPSNCQISGDPKNLEASLHDLHPASWYALFSWNVHLYLVLCCMVSHIPDT

SEQ ID NO: 185101 - protein, 139 aa, Zea Mays
MISIQRLGMLSFHGTCTCIWYCVAWYPIYRIPDGKFQATFLTYHSLGHWIRRSSSAGGAAVLPVMGLQSYNAKAEWWFEMSKSESEGGQSQASEASEILKERSRTLSEAAAVLSRASVLKNGQMSRNRHPDYEFFLSRS

SEQ ID NO: 185102 - protein, 309 aa, Zea Mays
MAIILVRAASPGLSAADSISHQGTLQCSTLLKTKRPAARRWMPCSLLGLHPWEAGRPSPAVYSSLAVNPAGEAVVSSEQKVYDVVLKQAALLKRQLRTPVLDARPQDMDMPRNGLKEAYDRCGEICEEYAKTFYLGTMLMTEERRRAIWAIYVWCRRTDELVDGPNANYITPTALDRWEKRLEDLFTGRPYDMLDAALSDTISRFPIDIQPFRDMIEGMRSDLRKTRYNNFDELYMYCYYVAGTVGLMSVPVMGIATESKATTESVYSAALALGIANQLTNILRDVGEEQGSLMRTSSKGSSRTGGETS

SEQ ID NO: 185103 - protein, 218 aa, Zea Mays
MLDAALSDTISRFPIDIQPFRDMIEGMRSDLRKTRYNNFDELYMYCYYVAGTVGLMSVPVMGIATESKATTESVYSAALALGIANQLTNILRDVGEDARRGRIYLPQDELAQAGLSDEDIFKGVVTNRWRNFMKRQIKRARMFFEEAERGVTELSQASRWPVWASLLLYRQILDEIEANDYNNFTKRAYVGKGKKLLALPVAYGKSLLLPCSLRNGQT

SEQ ID NO: 185104 - protein, 297 aa, Zea Mays
MGGGGGGNSRELDQTPTWAVASVCGVIVLISILLEKGLHHVGEFFSHRKKKAMVEALEKVKAELMVLGFISLLLVFGQNYIVKVCISNHAANTMLPCKLKEAAVPGKKKAAAAAEHLGGVLDWPPPYYAHNGRMLAEASMATKCPEGKVSLISINALHQLHIFIFFLAVFHVSYSAITMALGRAKIRAWKEWEKEAAGQDYEFSNDPTRFRFTHETSFVRQHMNVLNKFPASFYISNFFRQFFRSVRRADYCALRHSFVNVHLAPGTKFDFQKYIKRSLEDDFKDGTPCSGSPSCRW

SEQ ID NO: 185105 - protein, 264 aa, Zea Mays
MNVLNKFPASFYISNFFRQFFRSVRRADYCALRHSFVNVHLAPGTKFDFQKYIKRSLEDDFKVIVGISPPLWASALIFLFLNVNGWHTMLWISIMPVVIILSVGTKLQGIICRMAIDITERHAVIQGIPLVQVSDSYFWFARPTFVLFLIHFTLFQNGFQIIYFLWILYEYGMDSCFNDSEEFVFARLCLGVVVQVLCSYVTLPLYALVSQMGSTMKQSIFDEQTSKALKNWRAGAKKKAPTGSKHGGGSPTAAGSPTKADGDA

SEQ ID NO: 185106 - protein, 1953 aa, Zea Mays
MAAPGRRTADVSSSSPAPSPSPSTGRRLLRTQTVGNLGESIFDSEVVPSSLVEIAPILRVANEVEATNPRVAYLCRFYAFEKAHRLDPTSSGRGVRQFKTALLQRLERENDPTLKGRVHQSDAREMQRFYREYYKKYIQALQHAADKADRALLTKAYQTAAVLFEVLRAVNVSQSVEVDQAILDTHNKVEEKKKLYVPYNILPLDPESTGQAIMRYPEIQAAVYALRNTRGLPWPKDQDKKPGEKNTGKDLLDWLQAMFGFQKDNVSNQREHLVLLLANVHIMKVPKVDQQPKLDDKALDAVMKKLFKNYKKWCKYLGRKSSLWLPTIQQEVQQRKLLYMGLYLLIWGEAANLRFMPECICYIYHHMAFELYGMLAGNVSPMTGENVKPAYGGDEEAFLIKVVTPIYKVIEKEAERSKTMKSKHSHWRNYDDLNEYFWSVDCFRLGWPMRADADFFKTPKDAYLNLLNGENRSAGNTHWMGKVNFVEIRSFWHIFRSFDRMWIFLILSLQAMIIIAWNGGTPSDIFDAGVFKKVLSIFITAAILKLGQAILDLIFGWKARRNMSFAVKLRYILKLICAAAWVVILPVTYAYTWENPTGLARTIKSWLGDGQNQPSLYILAIVIYMAPNIVASMLFLFPFMRRFLESSNVKVITIIMWWSQPRLFVGRGMHEGAFSLFKYTMFWVLLLATKLTVSFYIEIKPLVQPTIDIMREPIRTFQWHEFFPHGTNNIGVVISLWAPIILVYFMDTQIWYALFSTLIGGIYGAYRRLGEIRTLGMLRSRFESLPEAFNERLIPSDANKSKGLRAAFSSRPKKEKRAARFAQMWNVIITSFREEDLIDNREMDLLLVPYCKDRELDIFQWPPFLLASKIPIALDMAADSGGKDRDLTKRIKSDPYFSFAIRECYASFKNIINTLVFGQREKDVLAQIFAVVDQHIEDETLIKDLNMRNLPALSKKFVELLELLQKNKEEDLGQVVILFQDMLEVVTRDIMEEQDQLGTLLESAHGANSRKHEGITPLDQQDQLFAKAIKFPVDESIAWTEKIKRLHLLLTVKESAMDVPTNLDARRRISFFANSLFMDMPNAPKVRNMLAFSILTPYYKEDVLFSLQNLEEPNEDGVSILFYLQKIYPDEWKNFLERVGCKNEEGLREDEELEEKLRLWASYRGQTLTRTVRGMMYYRKALELQAFLDMAEDDDLMEGYRATEVMPEDSQLMTQCKAIADMKFTYVVSCQQYGIQKRSNEPCAHDILRLMTEYPSLRVAYIDEVEAPSQDRNKKIEKVYYSVLVKASVTKPDEPGQSLDQVIYKIKLPGNAILGEGKPENQNHAIIFTRGECLQTIDMNQEHYMEEALKMRNLLQEFEKKHGVRYPSILGVREHIFTGSVSSLAWFMSNQETSFVTIGQRVLANPLRVRFHYGHPDIFDRLFHITRGGVSKASKIINLSEDIFAGFNSTLREGNVTHHEYMQVGKGRDVGLNQISLFEAKIANGNGEQTLSRDIYRLGHRFDFFRMLSCYYTTIGFYFSTMITVWTVYVFLYGRLYLVLSGLDEALATGRRFVHNAPLQVALASESFVQLGFLMALPMMMEIGLERGFRTALSDFILMQLQLASVFFTFSLGTKTHYYGRTLLHGGAEYRATGRGFVVFHAKFADNYRLYSRSHFVKGIELMILLVVYEIFSQPYRGAVTYIFITVSMWFMVGTWLFAPFLFNPSGFEWQKIVDDWTDWHKWISNRGGIGVAPEKSWESWWEKEQEPLRYSGKRGTVVEILLALRFFIYQYGLVYHLNITKKITKDNQSVLVYCFSWVVIFVILLVMKTVSVGRRRFSAEFQLVFRLIKGLIFITFTAIVVILIAIPGMTVLDIFVCILAFMPTGWGLLLIAQAIRPVIHKTGLWGSIKALARGYEILMGLLLFTPIAFLAWFPFVSEFQTRMLFNQAFSRGLQISRILGGHKKDRGTRNKE

SEQ ID NO: 185107 - protein, 847 aa, Zea Mays
MAAPGRRTADVSSSSPAPSPSPSTGRRLLRTQTVGNLGESIFDSEVVPSSLVEIAPILRVANEVEATNPRVAYLCRFYAFEKAHRLDPTSSGRGVRQFKTALLQRLERENDPTLKGRVHQSDAREMQRFYREYYKKYIQALQHAADKADRALLTKAYQTAAVLFEVLRAVNVSQSVEVDQAILDTHNKVEEKKKLYVPYNILPLDPESTGQAIMRYPEIQAAVYALRNTRGLPWPKDQDKKPGEKNTGKDLLDWLQAMFGFQKDNVSNQREHLVLLLANVHIMKVPKVDQQPKLDDKALDAVMKKLFKNYKKWCKYLGRKSSLWLPTIQQEVQQRKLLYMGLYLLIWGEAANLRFMPECICYIYHHMAFELYGMLAGNVSPMTGENVKPAYGGDEEAFLIKVVTPIYKVIEKEAERSKTMKSKHSHWRNYDDLNEYFWSVDCFRLGWPMRADADFFKTPKDAYLNLLNGENRSAGNTHWMGKVNFVEIRSFWHIFRSFDRMWIFLILSLQAMIIIAWNGGTPSDIFDAGVFKKVLSIFITAAILKLGQAILDLIFGWKARRNMSFAVKLRYILKLICAAAWVVILPVTYAYTWENPTGLARTIKSWLGDGQNQPSLYILAIVIYMAPNIVASMLFLFPFMRRFLESSNVKVITIIMWWSQPRLFVGRGMHEGAFSLFKYTMFWVLLLATKLTVSFYIEIKPLVQPTIDIMREPIRTFQWHEFFPHGTNNIGVVISLWAPIILVYFMDTQIWYALFSTLIGGIYGAYRRLGEIRTLGMLRSRFESLPEAFNERLIPSDANKSKGLRAAFSSRPKFFRLLVTKDRKRKELQGLLKCGMSLLQVSVKKTS

SEQ ID NO: 185108 - protein, 1487 aa, Zea Mays
MAAPGRRTADVSSSSPAPSPSPSTGRRLLRTQTVGNLGESIFDSEVVPSSLVEIAPILRVANEVEATNPRVAYLCRFYAFEKAHRLDPTSSGRGVRQFKTALLQRLERENDPTLKGRVHQSDAREMQRFYREYYKKYIQALQHAADKADRALLTKAYQTAAVLFEVLRAVNVSQSVEVDQAILDTHNKVEEKKKLYVPYNILPLDPESTGQAIMRYPEIQAAVYALRNTRGLPWPKDQDKKPGEKNTGKDLLDWLQAMFGFQKDNVSNQREHLVLLLANVHIMKVPKVDQQPKLDDKALDAVMKKLFKNYKKWCKYLGRKSSLWLPTIQQEVQQRKLLYMGLYLLIWGEAANLRFMPECICYIYHHMAFELYGMLAGNVSPMTGENVKPAYGGDEEAFLIKVVTPIYKVIEKEAERSKTMKSKHSHWRNYDDLNEYFWSVDCFRLGWPMRADADFFKTPKDAYLNLLNGENRSAGNTHWMGKVNFVEIRSFWHIFRSFDRMWIFLILSLQAMIIIAWNGGTPSDIFDAGVFKKVLSIFITAAILKLGQAILDLIFGWKARRNMSFAVKLRYILKLICAAAWVVILPVTYAYTWENPTGLARTIKSWLGDGQNQPSLYILAIVIYMAPNIVASMLFLFPFMRRFLESSNVKVITIIMWWSQPRLFVGRGMHEGAFSLFKYTMFWVLLLATKLTVSFYIEIKPLVQPTIDIMREPIRTFQWHEFFPHGTNNIGVVISLWAPIILVYFMDTQIWYALFSTLIGGIYGAYRRLGEIRTLGMLRSRFESLPEAFNERLIPSDANKSKGLRAAFSSRPKASGDERQKEKRAARFAQMWNVIITSFREEDLIDNREMDLLLVPYCKDRELDIFQWPPFLLASKIPIALDMAADSGGKDRDLTKRIKSDPYFSFAIRECYASFKNIINTLVFGQREKDVLAQIFAVVDQHIEDETLIKDLNMRNLPALSKKFVELLELLQKNKEEDLGQVVILFQDMLEVVTRDIMEEQDQLGTLLESAHGANSRKHEGITPLDQQDQLFAKAIKFPVDESIAWTEKIKRLHLLLTVKESAMDVPTNLDARRRISFFANSLFMDMPNAPKVRNMLAFSILTPYYKEDVLFSLQNLEEPNEDGVSILFYLQKIYPDEWKNFLERVGCKNEEGLREDEELEEKLRLWASYRGQTLTRTVRGMMYYRKALELQAFLDMAEDDDLMEGYRATEVMPEDSQLMTQCKAIADMKFTYVVSCQQYGIQKRSNEPCAHDILRLMTEYPSLRVAYIDEVEAPSQDRNKKIEKVYYSVLVKASVTKPDEPGQSLDQVIYKIKLPGNAILGEGKPENQNHAIIFTRGECLQTIDMNQEHYMEEALKMRNLLQEFEKKHGVRYPSILGVREHIFTGSVSSLAWFMSNQETSFVTIGQRVLANPLRVRFHYGHPDIFDRLFHITRGGVSKASKIINLSEDIFDSIPHCVKAMLLTTSTCKLAREGMWVSIKYLCLRQR

SEQ ID NO: 185109 - protein, 1261 aa, Zea Mays
MAAPGRRTADVSSSSPAPSPSPSTGRRLLRTQTVGNLGESIFDSEVVPSSLVEIAPILRVANEVEATNPRVAYLCRFYAFEKAHRLDPTSSGRGVRQFKTALLQRLERENDPTLKGRVHQSDAREMQRFYREYYKKYIQALQHAADKADRALLTKAYQTAAVLFEVLRAVNVSQSVEVDQAILDTHNKVEEKKKLYVPYNILPLDPESTGQAIMRYPEIQAAVYALRNTRGLPWPKDQDKKPGEKNTGKDLLDWLQAMFGFQKDNVSNQREHLVLLLANVHIMKVPKVDQQPKLDDKALDAVMKKLFKNYKKWCKYLGRKSSLWLPTIQQEVQQRKLLYMGLYLLIWGEAANLRFMPECICYIYHHMAFELYGMLAGNVSPMTGENVKPAYGGDEEAFLIKVVTPIYKVIEKEAERSKTMKSKHSHWRNYDDLNEYFWSVDCFRLGWPMRADADFFKTPKDAYLNLLNGENRSAGNTHWMGKVNFVEIRSFWHIFRSFDRMWIFLILSLQAMIIIAWNGGTPSDIFDAGVFKKVLSIFITAAILKLGQAILDLIFGWKARRNMSFAVKLRYILKLICAAAWVVILPVTYAYTWENPTGLARTIKSWLGDGQNQPSLYILAIVIYMAPNIVASMLFLFPFMRRFLESSNVKVITIIMWWSQPRLFVGRGMHEGAFSLFKYTMFWVLLLATKLTVSFYIEIKPLVQPTIDIMREPIRTFQWHEFFPHGTNNIGVVISLWAPIILVYFMDTQIWYALFSTLIGGIYGAYRRLGEIRTLGMLRSRFESLPEAFNERLIPSDANKSKGLRAAFSSRPKASGDERQKEKRAARFAQMWNVIITSFREEDLIDNREMDLLLVPYCKDRELDIFQWPPFLLASKIPIALDMAADSGGKDRDLTKRIKSDPYFSFAIRECYASFKNIINTLVFGQREKDVLAQIFAVVDQHIEDETLIKDLNMRNLPALSKKFVELLELLQKNKEEDLGQVVILFQDMLEVVTRDIMEEQDQLGTLLESAHGANSRKHEGITPLDQQDQLFAKAIKFPVDESIAWTEKIKRLHLLLTVKESAMDVPTNLDARRRISFFANSLFMDMPNAPKVRNMLAFSILTPYYKEDVLFSLQNLEEPNEDGVSILFYLQKIYPDEWKNFLERVGCKNEEGLREDEELEEKLRLWASYRGQTLTRTVRGMMYYRKALELQAFLDMAEDDDLMEGYRATEVMPEDSQLMTQCKAIADMKFTYVVSCQQYGIQKRSNEPCAHDILRLMTEC

SEQ ID NO: 185110 - protein, 1193 aa, Zea Mays
MGLYLLIWGEAANLRFMPECICYIYHHMAFELYGMLAGNVSPMTGENVKPAYGGDEEAFLIKVVTPIYKVIEKEAERSKTMKSKHSHWRNYDDLNEYFWSVDCFRLGWPMRADADFFKTPKDAYLNLLNGENRSAGNTHWMGKVNFVEIRSFWHIFRSFDRMWIFLILSLQAMIIIAWNGGTPSDIFDAGVFKKVLSIFITAAILKLGQAILDLIFGWKARRNMSFAVKLRYILKLICAAAWVVILPVTYAYTWENPTGLARTIKSWLGDGQNQPSLYILAIVIYMAPNIVASMLFLFPFMRRFLESSNVKVITIIMWWSQPRLFVGRGMHEGAFSLFKYTMFWVLLLATKLTVSFYIEIKPLVQPTIDIMREPIRTFQWHEFFPHGTNNIGVVISLWAPIILVYFMDTQIWYALFSTLIGGIYGAYRRLGEIRTLGMLRSRFESLPEAFNERLIPSDANKSKGLRAAFSSRPKASGDERQKEKRAARFAQMWNVIITSFREEDLIDNREMDLLLVPYCKDRELDIFQWPPFLLASKIPIALDMAADSGGKDRDLTKRIKSDPYFSFAIRECYASFKNIINTLVFGQREKDVLAQIFAVVDQHIEDETLIKDLNMRNLPALSKKFVELLELLQKNKEEDLGQVVILFQDMLEVVTRDIMEEQDQLGTLLESAHGANSRKHEGITPLDQQDQLFAKAIKFPVDESIAWTEKIKRLHLLLTVKESAMDVPTNLDARRRISFFANSLFMDMPNAPKVRNMLAFSILTPYYKEDVLFSLQNLEEPNEDGVSILFYLQKIYPDEWKNFLERVGCKNEEGLREDEELEEKLRLWASYRGQTLTRTVRGMMYYRKALELQAFLDMAEDDDLMEGYRATEVMPEDSQLMTQCKAIADMKFTYVVSCQQYGIQKRSNEPCAHDILRLMTEYPSLRVAYIDEVEAPSQDRNKKIEKVYYSVLVKASVTKPDEPGQSLDQVIYKIKLPGNAILGEGKPENQNHAIIFTRGECLQTIDMNQEHYMEEALKMRNLLQEFEKKHGVRYPSILGVREHIFTGSVSSLAWFMSNQETSFVTIGQRVLANPLRVRFHYGHPDIFDRLFHITRGGVSKASKIINLSEDIFAGFNSTLREGNVTHHEYMQVGKGRDVGLNQISLFEAKIANGNGEQTLSRDIYRLGHRFDFFRMLSCYYTTIGFYFSTMVFW

SEQ ID NO: 185111 - protein, 999 aa, Zea Mays
MAAPGRRTADVSSSSPAPSPSPSTGRRLLRTQTVGNLGESIFDSEVVPSSLVEIAPILRVANEVEATNPRVAYLCRFYAFEKAHRLDPTSSGRGVRQFKTALLQRLERENDPTLKGRVHQSDAREMQRFYREYYKKYIQALQHAADKADRALLTKAYQTAAVLFEVLRAVNVSQSVEVDQAILDTHNKVEEKKKLYVPYNILPLDPESTGQAIMRYPEIQAAVYALRNTRGLPWPKDQDKKPGEKNTGKDLLDWLQAMFGFQKDNVSNQREHLVLLLANVHIMKVPKVDQQPKLDDKALDAVMKKLFKNYKKWCKYLGRKSSLWLPTIQQEVQQRKLLYMGLYLLIWGEAANLRFMPECICYIYHHMAFELYGMLAGNVSPMTGENVKPAYGGDEEAFLIKVVTPIYKVIEKEAERSKTMKSKHSHWRNYDDLNEYFWSVDCFRLGWPMRADADFFKTPKDAYLNLLNGENRSAGNTHWMGKVNFVEIRSFWHIFRSFDRMWIFLILSLQAMIIIAWNGGTPSDIFDAGVFKKVLSIFITAAILKLGQAILDLIFGWKARRNMSFAVKLRYILKLICAAAWVVILPVTYAYTWENPTGLARTIKSWLGDGQNQPSLYILAIVIYMAPNIVASMLFLFPFMRRFLESSNVKVITIIMWWSQPRLFVGRGMHEGAFSLFKYTMFWVLLLATKLTVSFYIEIKPLVQPTIDIMREPIRTFQWHEFFPHGTNNIGVVISLWAPIILVYFMDTQIWYALFSTLIGGIYGAYRRLGEIRTLGMLRSRFESLPEAFNERLIPSDANKSKGLRAAFSSRPKKEKRAARFAQMWNVIITSFREEDLIDNREMDLLLVPYCKDRELDIFQWPPFLLASKIPIALDMAADSGGKDRDLTKRIKSDPYFSFAIRECYASFKNIINTLVFGQREKDVLAQIFAVVDQHIEDETLIKDLNMRNLPALSKKFVELLELLQKNKEEDLGQVVILFQDMLEVVTRDIMEEQDQLGT

SEQ ID NO: 185112 - protein, 1481 aa, Zea Mays
MGKVNFVEIRSFWHIFRSFDRMWIFLILSLQAMIIIAWNGGTPSDIFDAGVFKKVLSIFITAAILKLGQAILDLIFGWKARRNMSFAVKLRYILKLICAAAWVVILPVTYAYTWENPTGLARTIKSWLGDGQNQPSLYILAIVIYMAPNIVASMLFLFPFMRRFLESSNVKVITIIMWWSQPRLFVGRGMHEGAFSLFKYTMFWVLLLATKLTVSFYIEIKPLVQPTIDIMREPIRTFQWHEFFPHGTNNIGVVISLWAPIILVYFMDTQIWYALFSTLIGGIYGAYRRLGEIRTLGMLRSRFESLPEAFNERLIPSDANKSKGLRAAFSSRPKASGDERQKEKRAARFAQMWNVIITSFREEDLIDNREMDLLLVPYCKDRELDIFQWPPFLLASKIPIALDMAADSGGKDRDLTKRIKSDPYFSFAIRECYASFKNIINTLVFGQREKDVLAQIFAVVDQHIEDETLIKDLNMRNLPALSKKFVELLELLQKNKEEDLGQVVILFQDMLEVVTRDIMEEQDQLGTLLESAHGANSRKHEGITPLDQQDQLFAKAIKFPVDESIAWTEKIKRLHLLLTVKESAMDVPTNLDARRRISFFANSLFMDMPNAPKVRNMLAFSILTPYYKEDVLFSLQNLEEPNEDGVSILFYLQKIYPDEWKNFLERVGCKNEEGLREDEELEEKLRLWASYRGQTLTRTVRGMMYYRKALELQAFLDMAEDDDLMEGYRATEVMPEDSQLMTQCKAIADMKFTYVVSCQQYGIQKRSNEPCAHDILRLMTEYPSLRVAYIDEVEAPSQDRNKKIEKVYYSVLVKASVTKPDEPGQSLDQVIYKIKLPGNAILGEGKPENQNHAIIFTRGECLQTIDMNQEHYMEEALKMRNLLQEFEKKHGVRYPSILGVREHIFTGSVSSLAWFMSNQETSFVTIGQRVLANPLRVRFHYGHPDIFDRLFHITRGGVSKASKIINLSEDIFAGFNSTLREGNVTHHEYMQVGKGRDVGLNQISLFEAKIANGNGEQTLSRDIYRLGHRFDFFRMLSCYYTTIGFYFSTMITVWTVYVFLYGRLYLVLSGLDEALATGRRFVHNAPLQVALASESFVQLGFLMALPMMMEIGLERGFRTALSDFILMQLQLASVFFTFSLGTKTHYYGRTLLHGGAEYRATGRGFVVFHAKFADNYRLYSRSHFVKGIELMILLVVYEIFSQPYRGAVTYIFITVSMWFMVGTWLFAPFLFNPSGFEWQKIVDDWTDWHKWISNRGGIGVAPEKSWESWWEKEQEPLRYSGKRGTVVEILLALRFFIYQYGLVYHLNITKKITKDNQSVLVYCFSWVVIFVILLVMKTVSVGRRRFSAEFQLVFRLIKGLIFITFTAIVVILIAIPGMTVLDIFVCILAFMPTGWGLLLIAQAIRPVIHKTGLWGSIKALARGYEILMGLLLFTPIAFLAWFPFVSEFQTRMLFNQAFSRGLQISRILGGHKKDRGTRNKE

SEQ ID NO: 185113 - protein, 876 aa, Zea Mays
MAAPGRRTADVSSSSPAPSPSPSTGRRLLRTQTVGNLGESIFDSEVVPSSLVEIAPILRVANEVEATNPRVAYLCRFYAFEKAHRLDPTSSGRGVRQFKTALLQRLERENDPTLKGRVHQSDAREMQRFYREYYKKYIQALQHAADKADRALLTKAYQTAAVLFEVLRAVNVSQSVEVDQAILDTHNKVEEKKKLYVPYNILPLDPESTGQAIMRYPEIQAAVYALRNTRGLPWPKDQDKKPGEKNTGKDLLDWLQAMFGFQKDNVSNQREHLVLLLANVHIMKVPKVDQQPKLDDKALDAVMKKLFKNYKKWCKYLGRKSSLWLPTIQQEVQQRKLLYMGLYLLIWGEAANLRFMPECICYIYHHMAFELYGMLAGNVSPMTGENVKPAYGGDEEAFLIKVVTPIYKVIEKEAERSKTMKSKHSHWRNYDDLNEYFWSVDCFRLGWPMRADADFFKTPKDAYLNLLNGENRSAGNTHWMGKVNFVEIRSFWHIFRSFDRMWIFLILSLQAMIIIAWNGGTPSDIFDAGVFKKVLSIFITAAILKLGQAILDLIFGWKARRNMSFAVKLRYILKLICAAAWVVILPVTYAYTWENPTGLARTIKSWLGDGQNQPSLYILAIVIYMAPNIVASMLFLFPFMRRFLESSNVKVITIIMWWSQPRLFVGRGMHEGAFSLFKYTMFWVLLLATKLTVSFYIEIKPLVQPTIDIMREPIRTFQWHEFFPHGTNNIGVVISLWAPIILVYFMDTQIWYALFSTLIGGIYGAYRRLGEIRTLGMLRSRFESLPEAFNERLIPSDANKSKGLRAAFSSRPKASGDERQKEKRAARFAQMWNVIITSFREEDLIDNREMDLLLVPYCKDRELDIFQWPPFLLASK

SEQ ID NO: 185114 - protein, 1594 aa, Zea Mays
MAFELYGMLAGNVSPMTGENVKPAYGGDEEAFLIKVVTPIYKVIEKEAERSKTMKSKHSHWRNYDDLNEYFWSVDCFRLGWPMRADADFFKTPKDAYLNLLNGENRSAGNTHWMGKVNFVEIRSFWHIFRSFDRMWIFLILSLQAMIIIAWNGGTPSDIFDAGVFKKVLSIFITAAILKLGQAILDLIFGWKARRNMSFAVKLRYILKLICAAAWVVILPVTYAYTWENPTGLARTIKSWLGDGQNQPSLYILAIVIYMAPNIVASMLFLFPFMRRFLESSNVKVITIIMWWSQPRLFVGRGMHEGAFSLFKYTMFWVLLLATKLTVSFYIEIKPLVQPTIDIMREPIRTFQWHEFFPHGTNNIGVVISLWAPIILVYFMDTQIWYALFSTLIGGIYGAYRRLGEIRTLGMLRSRFESLPEAFNERLIPSDANKSKGLRAAFSSRPKASGDERQKEKRAARFAQMWNVIITSFREEDLIDNREMDLLLVPYCKDRELDIFQWPPFLLASKIPIALDMAADSGGKDRDLTKRIKSDPYFSFAIRECYASFKNIINTLVFGQREKDVLAQIFAVVDQHIEDETLIKDLNMRNLPALSKKFVELLELLQKNKEEDLGQVVILFQDMLEVVTRDIMEEQDQLGTLLESAHGANSRKHEGITPLDQQDQLFAKAIKFPVDESIAWTEKIKRLHLLLTVKESAMDVPTNLDARRRISFFANSLFMDMPNAPKVRNMLAFSILTPYYKEDVLFSLQNLEEPNEDGVSILFYLQKIYPDEWKNFLERVGCKNEEGLREDEELEEKLRLWASYRGQTLTRTVRGMMYYRKALELQAFLDMAEDDDLMEGYRATEVMPEDSQLMTQCKAIADMKFTYVVSCQQYGIQKRSNEPCAHDILRLMTEYPSLRVAYIDEVEAPSQDRNKKIEKVYYSVLVKASVTKPDEPGQSLDQVIYKIKLPGNAILGEGKPENQNHAIIFTRGECLQTIDMNQEHYMEEALKMRNLLQEFEKKHGVRYPSILGVREHIFTGSVSSLAWFMSNQETSFVTIGQRVLANPLRVRFHYGHPDIFDRLFHITRGGVSKASKIINLSEDIFAGFNSTLREGNVTHHEYMQVGKGRDVGLNQISLFEAKIANGNGEQTLSRDIYRLGHRFDFFRMLSCYYTTIGFYFSTMITVWTVYVFLYGRLYLVLSGLDEALATGRRFVHNAPLQVALASESFVQLGFLMALPMMMEIGLERGFRTALSDFILMQLQLASVFFTFSLGTKTHYYGRTLLHGGAEYRATGRGFVVFHAKFADNYRLYSRSHFVKGIELMILLVVYEIFSQPYRGAVTYIFITVSMWFMVGTWLFAPFLFNPSGFEWQKIVDDWTDWHKWISNRGGIGVAPEKSWESWWEKEQEPLRYSGKRGTVVEILLALRFFIYQYGLVYHLNITKKITKDNQSVLVYCFSWVVIFVILLVMKTVSVGRRRFSAEFQLVFRLIKGLIFITFTAIVVILIAIPGMTVLDIFVCILAFMPTGWGLLLIAQAIRPVIHKTGLWGSIKALARGYEILMGLLLFTPIAFLAWFPFVSEFQTRMLFNQAFSRGLQISRILGGHKKDRGTRNKE

SEQ ID NO: 185115 - protein, 1164 aa, Zea Mays
MFGFQKDNVSNQREHLVLLLANVHIMKVPKVDQQPKLDDKALDAVMKKLFKNYKKWCKYLGRKSSLWLPTIQQEVQQRKLLYMGLYLLIWGEAANLRFMPECICYIYHHMAFELYGMLAGNVSPMTGENVKPAYGGDEEAFLIKVVTPIYKVIEKEAERSKTMKSKHSHWRNYDDLNEYFWSVDCFRLGWPMRADADFFKTPKDAYLNLLNGENRSAGNTHWMGKVNFVEIRSFWHIFRSFDRMWIFLILSLQAMIIIAWNGGTPSDIFDAGVFKKVLSIFITAAILKLGQAILDLIFGWKARRNMSFAVKLRYILKLICAAAWVVILPVTYAYTWENPTGLARTIKSWLGDGQNQPSLYILAIVIYMAPNIVASMLFLFPFMRRFLESSNVKVITIIMWWSQPRLFVGRGMHEGAFSLFKYTMFWVLLLATKLTVSFYIEIKPLVQPTIDIMREPIRTFQWHEFFPHGTNNIGVVISLWAPIILVYFMDTQIWYALFSTLIGGIYGAYRRLGEIRTLGMLRSRFESLPEAFNERLIPSDANKSKGLRAAFSSRPKASGDERQKEKRAARFAQMWNVIITSFREEDLIDNREMDLLLVPYCKDRELDIFQWPPFLLASKIPIALDMAADSGGKDRDLTKRIKSDPYFSFAIRECYASFKNIINTLVFGQREKDVLAQIFAVVDQHIEDETLIKDLNMRNLPALSKKFVELLELLQKNKEEDLGQVVILFQDMLEVVTRDIMEEQDQLGTLLESAHGANSRKHEGITPLDQQDQLFAKAIKFPVDESIAWTEKIKRLHLLLTVKESAMDVPTNLDARRRISFFANSLFMDMPNAPKVRNMLAFSILTPYYKEDVLFSLQNLEEPNEDGVSILFYLQKIYPDEWKNFLERVGCKNEEGLREDEELEEKLRLWASYRGQTLTRTVRGMMYYRKALELQAFLDMAEDDDLMEGYRATEVMPEDSQLMTQCKAIADMKFTYVVSCQQYGIQKRSNEPCAHDILRLMTEYPSLRVAYIDEVEAPSQDRNKKIEKVYYSVLVKASVTKPDEPGQSLDQVIYKIKLPGNAILGEGKPENQNHAIIFTRGECLQTIDMNQEHYMEEALKMRNLLQEFEKKHGVRYPSILGVREHIFTGSVSSLAWFMSNQETSFVTIGQRVLANPLRIQFHIA

SEQ ID NO: 185116 - protein, 670 aa, Zea Mays
MWNVIITSFREEDLIDNREMDLLLVPYCKDRELDIFQWPPFLLASKIPIALDMAADSGGKDRDLTKRIKSDPYFSFAIRECYASFKNIINTLVFGQREKDVLAQIFAVVDQHIEDETLIKDLNMRNLPALSKKFVELLELLQKNKEEDLGQVVILFQDMLEVVTRDIMEEQDQLGTLLESAHGANSRKHEGITPLDQQDQLFAKAIKFPVDESIAWTEKIKRLHLLLTVKESAMDVPTNLDARRRISFFANSLFMDMPNAPKVRNMLAFSILTPYYKEDVLFSLQNLEEPNEDGVSILFYLQKIYPDEWKNFLERVGCKNEEGLREDEELEEKLRLWASYRGQTLTRTVRGMMYYRKALELQAFLDMAEDDDLMEGYRATEKRSNEPCAHDILRLMTEYPSLRVAYIDEVEAPSQDRNKKIEKVYYSVLVKASVTKPDEPGQSLDQVIYKIKLPGNAILGEGKPENQNHAIIFTRGECLQTIDMNQEHYMEEALKMRNLLQEFEKKHGVRYPSILGVREHIFTGSVSSLAWFMSNQETSFVTIGQRVLANPLRVRFHYGHPDIFDRLFHITRGGVSKASKIINLSEDIFAGFNSTLREGNVTHHEYMQVGKGRDVGLNQISLFEAKIANGNGEQTLSRDIYRLGHRFDFFRMLSCYYTTIGFYFSTMVFW

SEQ ID NO: 185117 - protein, 92 aa, Zea Mays
MQEGSTKTDQRESKTPQTESPINRRTRKNELCLPRINWGWKRTMGSVGLDYIYIQRIRWRNRTCQGDRDGGERNCFSCTTCSQRLWFCLQSL

SEQ ID NO: 185118 - protein, 61 aa, Zea Mays
MRDNDTCKLFFSAFECCPFLSPCCGCNVFHKLVDNLNLFHEMKCYVGPDFRYERGCSIQLP

SEQ ID NO: 185119 - protein, 394 aa, Zea Mays
MGLSSKPLHRCPIPVANDPNAIAIPKRTPNTIVKKLSYITVDKQDKDPSPLFGGHQNWKQREESFKLNSTMKVHCGFMKNSGADMDTIDLKYIQKCRFVVASGIFDGYDIPHQPSNISHRSQKLFCFLMVVDEVSLDFVQKNASVKIDSAGGKWVGIWRLIRVHRLPFDEPRRNGKIPKILTHRLFPEAWYSIWIDGKMELIVDPLLILERYLWRGKNTFAVAAHKHHRSIYEEGDAIKRRKRYARPLVDLQMKLYYYEGMEPWSPKKKMPSDVPEGAVLIREHTTMTDLFSCLWFNEVNLFTPRDQISFGYVVHRLGGALKFFMFPNCEYNSLFILHGHTREHSSKVEWAKTTDEIVKKGLKESRGGLGLWTPYPADLSSVEVPAVKRTSPAG

SEQ ID NO: 185120 - protein, 276 aa, Zea Mays
MSADVLKKAYEATEDGFFSIVTKQWPVKPQIAAVGSCCLVGVICGGMLYVANVGDSRVVLGKHVKATGEVLAVQLSAEHNVSIASVRKELQSMHPEDRHIVVLKHNVWRVKGLIQVCRSIGDAYLKKQEFNREPLYAKFRLREPFHKPILSSEPSISVQPLQPHDQFLIFASDGLWEQLTNQEAVDIVRSSPRSGCARRLIRAALQEAAKKREMRYSDLKKIDRGVRRHFHDDITVIVVFLDSGLVSQASTHRGPTLSLRGGGGSAGLRSNTLAPT

SEQ ID NO: 185121 - protein, 441 aa, Zea Mays
MAAATAPPPAAVATTLSGLMRCQNIRSSRPRAFYARCASSNASAEAAESRKGGHGGTRLEEAVPVGEGRSRVDAWISARLGGGGVSRARVQASIRAGLVAVNGRPVSKVSHTVKGGDLVSCTVSELQPLRAEAEDIPLDIVYEDDHVLVVNKPAHMVVHPAPGNAKGTLVNAILHHCKISTFTCLARSSAGDECPDSTDEDTDVFHVDQFAAEDVSSEVRNALVRPGIVHRLDKGTSGLLVVAKDEHSHARLAEQFKLHTIRRVYISLTCGAPNPNSGRIEASIARDPNNRIRMTAIAGSGHRYARNAASRYKVREVFAGGGSALVEWRLETGRTHQIRAHAKYIGIPLLGDETYGGTQSMALSLLRPRSPSKYHSGLSNLLSKVDRPCLHAASLGFKHPRSGKVLEFSCPPPDDFLEVLGELRRVTSRSSDAPNGDGVFR

SEQ ID NO: 185122 - protein, 396 aa, Zea Mays
MAAATAPPPAAVATTLSGLMRCQNIRSSRPRAFYARCASSNASAEAAESRKGGHGGTRLEEAVPVGEGRSRVDAWISARLGGGGVSRARVQASIRAGLVAVNGRPVSKVSHTVKGGDLVSCTVSELQPLRAEAEDIPLDIVYEDDHVLVVNKPAHMVVHPAPGNAKGTLVNAILHHCKISTFTCLARSSAGDECPDSTDEDTDVFHVDQFAAEDVSSEVRNALVRPGIVHRLDKGTSGLLVVAKDEHSHARLAEQFKLHTIRRVYISLTCGAPNPNSGRIEASIARDPNNRIRMTAIAGSGHRYARNAASRYKVREVFAGGGSALVEWRLETGRTHQIRAHAKYIGIPLLGDETYGGTQSMALSLLRPRSPSKYHSGLSNLLSKVDRPCLHAASLG

SEQ ID NO: 185123 - protein, 751 aa, Zea Mays
MRKWALSSTLLLLFLLTTLPDPAKKLQVNAEESSHDLANPPKVEEKFGAVPHGLSTDSEVAQREAESISRKTLRSSAEKFEFQAEVSRLMDIIINSLYSNKDIFLRELISNASDALDKIRFLSLTDKEVLGEGDTAKLEIQIKLDKEKKILSIRDRGIGMTKEDLIKNLGTIAKSGTSAFVEKMQSGGDLNLIGQFGVGFYSVYLVADYVEVVSKHNDDKQYVWESKADGSFAISEDTWNEPLGRGTEIRLHLRDEAKEYLEEDKLKDLVKKYSEFINFPIYLWSTKEVDVEVPTDEDETSEEEDSTPETTEEETEEDEEKEKKPKTKTIKETTSEWELLNDVKAVWLRSPKEVTDEEYSKFYHSLAKDFGDDKPMGWSHFTAEGDVEFKALLFIPPKAPHDLYESYYNSNKSNLKLYVRRVFISDEFDDLLPKYLSFLKGIVDSDTLPLNVSREMLQQHSSLKTIKKKLIRKALDMIRKLAEEDPDEYSNKDKTDEEKSEMEEKKGQYAKFWNEFGKSIKLGIIEDATNRNRLAKLLRFESTKSDGKLASLDEYISRMKSGQKDIFYITGSSKEQLEKSPFLERLTKKNYEVIFFTDPVDEYLMQYLMDYEDKKFQNVSKEGLKLGKDSKLKELKESFKELTDWWKKALESENVDSVKISNRLHDTPCVVVTSKYGWSANMEKIMQAQTLSDSSKQAYMRGKRVLEINPRHPIIKELRDKVAQDNEAEEQPEVEEKEPEPEPSSYDKDEL

SEQ ID NO: 185124 - protein, 790 aa, Zea Mays
MRKWALSSTLLLLFLLTTLPDPAKKLQVNAEESSHDLANPPKVEEKFGAVPHGLSTDSEVAQREAESISRKTLRSSAEKFEFQAEVSRLMDIIINSLYSNKDIFLRELISNASDALDKIRFLSLTDKEVLGEGDTAKLEIQIKLDKEKKILSIRDRGIGMTKEDLIKNLGTIAKSGTSAFVEKMQSGGDLNLIGQFGVGFYSVYLVADYVEVVSKHNDDKQYVWESKADGSFAISEDTWNEPLGRGTEIRLHLRDEAKEYLEEDKLKDLVKKYSEFINFPIYLWSTKEVDVEVPTDEDETSEEEDSTPETTEEETEEDEEKEKKPKTKTIKETTSEWELLNDVKAVWLRSPKEVTDEEYSKFYHSLAKDFGDDKPMGWSHFTAEGDVEFKALLFIPPKAPHDLYESYYNSNKSNLKLYVRRVFISDEFDDLLPKYLSFLKGIVDSDTLPLNVSREMLQQHSSLKTIKKKLIRKALDMIRKLAEEDPDEYSNKDKTDEEKSEMEEKKGQYAKFWNEFGKSIKLGIIEDATNRNRLAKLLRFESTKSDGKLASLDEYISRMKSGQKDIFYITGSSKEQLEKSPFLERLTKKNYEVIFFTDPVDEYLMQYLMDYEDKKFQNVSKEGLKLGKDSKLKELKESFKELTDWWKKALESENVDSVKISNRLHDTPCVVVTSKYGWSANMEKIMQAQTLSDSSKQAYMRGKRVLEINPRHPIIKELRDKVAQDNESEELKHTARSSRRWRRRSRSRSRRPTTRTSFRLSDLFSSLASSRFTRNVMISVTAWFKSRDGS

SEQ ID NO: 185125 - protein, 335 aa, Zea Mays
MGWSHFTAEGDVEFKALLFIPPKAPHDLYESYYNSNKSNLKLYVRRVFISDEFDDLLPKYLSFLKGIVDSDTLPLNVSREMLQQHSSLKTIKKKLIRKALDMIRKLAEEDPDEYSNKDKTDEEKSEMEEKKGQYAKFWNEFGKSIKLGIIEDATNRNRLAKLLRFESTKSDGKLASLDEYISRMKSGQKDIFYITGSSKEQLEKSPFLERLTKKNYEVIFFTDPVDEYLMQYLMDYEDKKFQNVSKEGLKLGKDSKLKELKESFKELTDWWKKALESGFNLPDPKEFASSIYKSVQKGLDLSPDATVEEDEAEEQPEVEEKEPEPEPSSYDKDEL

SEQ ID NO: 185126 - protein, 152 aa, Zea Mays
MSTVSSLRSSPRIYKTSIPLFPSKSDTCRPTPIADRHGGRRRKPRTITAVVGGSRCLNGLGLEITSRDDLQTPWMLYARLIRTKVGRDPGNWSPEIVFHRGATRCSERVSVHDESRTRGRIRSRGGSCLSDRESSGGEQFLLRHLRCGNRIS

SEQ ID NO: 185127 - protein, 51 aa, Zea Mays
MMIDSLELCYVNEMAYIVKTYLQNYFSHHCLSTYRCSISKSKTMRKATNVL

SEQ ID NO: 185128 - protein, 125 aa, Zea Mays
MHQEKQLDTLVDKGLESKYDRIELEEMVQVALLCTQSFPGHRTKMSEVVRMLEGDGLAKQWEASQHTKESHKFKVPNFSFSRCHSDLMGDSSLLLQAVELSGPRCGLNMFAHYVAHTFFLLLLSG

SEQ ID NO: 185129 - protein, 102 aa, Zea Mays
MKLPSCRASGVSMRIGEEGPEASARCRPCGGPQRCVPNSQFSLALGIFTKKISNLTQCLIGCYITRWRVCCWQKPALLLNWAPGDEVVYYFVLPASNSVDDF

SEQ ID NO: 185130 - protein, 276 aa, Zea Mays
MLQASSITHSLLPSPLAASDGDRTDRIPRRTEPTPAANANLNTTRNGFQKLEKIKDANRRSRQLEELTDKMRDCKRLIKDFERVSKAEAEHTDPATAKMLHDRKQSMIKELNSYVALKKQQASENKRIDLFDGPSAEDGFGEENVLLASNMTNQQLMDQGNQLMDETDQAIARSKQTVQETVNVGTETAAALKAQTEQMSRVVNELDSIHFSIKKASQLVKEIGRQVATDRCIMAMLFLIVAGVIAIIIVKIVNPHNKDIRDIPGLAPPVSRRLLR

SEQ ID NO: 185131 - protein, 64 aa, Zea Mays
MGEVDCGQCQTKYTLAGSGSRKQCSACIPYLRMSDAHTDRSTGRQAIGKKYQYQYQYHWLAVAP

SEQ ID NO: 185132 - protein, 59 aa, Zea Mays
MMGRLVEGNPITIQIHEFSRKKDVETIVRGAKSKNITYINVFPTKRIEEETTTYTQKTI

SEQ ID NO: 185133 - protein, 146 aa, Zea Mays
MENEQMLIDQVTSVQVLDSHHVHDEQLLVGHAADDHHQMEPNPMAFSLGVHDLDNYYLSSKQILLYNDAGGIHHLKDGQIILDEAADGQARVHNMGHGRTIPGIDLEDDYAQVSAIRNTGECLESASDTSHEYTDNVLQEHMCSQD

SEQ ID NO: 185134 - protein, 451 aa, Zea Mays
MRVLTLSKGESGDAVDGEVSLDTSHSHSLSNMDTPQTENLQSETPELVGAAKEEEHGNHTVSDDGSILPVINGVVNGSEAVTKESQKTLTSKEPEASGIKNMLPGDLNILVQSSECTPNCQSHESFATSDPQPAVPTLVEGGKENNREQFDAQIHGQSNDTEVACDSTTATCEAVPGHAKTELDVKSDSLENSEPLPLSIQEYEPIYQGEEHILGTTNMVYENQEPVYEGEVVLAKQLDKMEESSPSVDDKATEHHWELIDNFLWSTANQLTVYGLFCLQEELKENELCVFFRNNHFNTMFKYNGSLYLLATDQGFISQTDLVWQRLDEVNGDGGFLTSNFTPFKAETPRNDSWNEQQAMTSTADYLAQFDNSTSGNSDLELAIALQQQEFERQPQRFQAPPPQQQQQQPPPQTQHQPAQSGRPGLVVGPRMSNVPPPSRSESKKERCIVM

SEQ ID NO: 185135 - protein, 571 aa, Zea Mays
MFRKIDDFEFTRERAIFDLLDIPLYHGWIVDPQDTETATAIGSKSYNALASGLVEFKSGKPTEENKPVEEETVDFAAATAAALKIPSPSVSLGRSFDEHSLSNSVEPHKRRGDLEEEEELMRVLTLSKGESGDAVDGEVSLDTSHSHSLSNMDTPQTENLQSETPELVGAAKEEEHGNHTVSDDGSILPVINGVVNGSEAVTKESQKTLTSKEPEASGIKNMLPGDLNILVQSSECTPNCQSHESFATSDPQPAVPTLVEGGKENNREQFDAQIHGQSNDTEVACDSTTATCEAVPGHAKTELDVKSDSLENSEPLPLSIQEYEPIYQGEEHILGTTNMVYENQEPVYEGEVVLAKQLDKMEESSPSVDDKATEHHWELIDNFLWSTANQLTVYGLFCLQEELKENELCVFFRNNHFNTMFKYNGSLYLLATDQGFISQTDLVWQRLDEVNGDGGFLTSNFTPFKAETPRNDSWNEQQAMTSTADYLAQFDNSTSGNSDLELAIALQQQEFERQPQRFQAPPPQQQQQQPPPQTQHQPAQSGRPGLVVGPRMSNVPPPSRSESKKERCIVM

SEQ ID NO: 185136 - protein, 693 aa, Zea Mays
MSSDPSRHLPSPVAPPDAAEVDTHSAEPPEVMHRTRAVDFLGRRTPIVYQNDNGPCPLLAICNVLLLKNVISMNPDAEEVSQQRLLSLVAERLIDPNIAGQVKDEEYVNNREQNIADAIDLLPCLTTGIDVNVMFRKIDDFEFTRERAIFDLLDIPLYHGWIVDPQSYNALASGLVEFKSGKPTEENKPVEEETVDFAAATAAALKIPSPSVSLGRSFDEHSLSNSVEPHKRRGDLEEEEELMRVLTLSKGESGDAVDGEVSLDTSHSHSLSNMDTPQTENLQSETPELVGAAKEEEHGNHTVSDDGSILPVINGVVNGSEAVTKESQKTLTSKEPEASGIKNMLPGDLNILVQSSECTPNCQSHESFATSDPQPAVPTLVEGGKENNREQFDAQIHGQSNDTEVACDSTTATCEAVPGHAKTELDVKSDSLENSEPLPLSIQEYEPIYQGEEHILGTTNMVYENQEPVYEGEVVLAKQLDKMEESSPSVDDKATEHHWELIDNFLWSTANQLTVYGLFCLQEELKENELCVFFRNNHFNTMFKYNGSLYLLATDQGFISQTDLVWQRLDEVNGDGGFLTSNFTPFKAETPRNDSWNEQQAMTSTADYLAQFDNSTSGNSDLELAIALQQQEFERQPQRFQAPPPQQQQQQPPPQTQHQPAQSGRPGLVVGPRMSNVPPPSRSESKKERCIVM

SEQ ID NO: 185137 - protein, 89 aa, Zea Mays
MAEREHRTVFVTVGTTCFDALVMAVDSPEVKKALLQKGYSNLLIQMGRGTYVPSKVSGDATLQVDHFTFSPSIADNMRTASLVISHAGS

SEQ ID NO: 185138 - protein, 245 aa, Zea Mays
MGRGGAVMEDGDREEGSYPTLLQRWSSSVWAVSGSGRLLWAGNEAWRAHVGMALVQVAYGGYHVLTKSVLNVGMNQIVFCVYRDLVALALLAPIAFFRERIFGNQLLFLLGLGFTNASYAAAFQPAIPVFTFLLAAIVGVEVINIFTKHGVVKVLGTAVCVSGAVLMVFYRGPSLIGTGGAADATALSVVIDHSHAYNYAPQWLAAAMLRNGVEAWHLGVVCLIGNCFLMGAYLVIQVTQTWPRC

SEQ ID NO: 185139 - protein, 242 aa, Zea Mays
MGRGGAVMEDGDREEGSYPTLLQRWSSSVWAVSGSGRLLWAGNEAWRAHVGMALVQVAYGGYHVLTKSVLNVGMNQIVFCVYRDLVALALLAPIAFFRERIFGNQLLFLLGLGFTNASYAAAFQPAIPVFTFLLAAIVGVEVINIFTKHGVVKVLGTAVCVSGAVLMVFYRGPSLIGTGGAADATALSVVIDHSHAYNYAPQWLAAAMLRNGVEAWHLGVVCLIGNCFLMGAYLVIQVTQTW

SEQ ID NO: 185140 - protein, 115 aa, Zea Mays
MKEMEGSSGKQLIKEICPTCGDHDPKEHTWLMFPGSDMFSRVPFHVAHTVVEKDQERLDLDTKKLQSFVKEKSLVIAEKGALAGRFGADTVKSLVSLTDTTKSTREGGEVKYQFC

SEQ ID NO: 185141 - protein, 150 aa, Zea Mays
MQKKFFWLDIREALTALRKQARTSKTSVPSPFEVIMKEMEGSSGKQLIKEICPTCGDHDPKEHTWLMFPGSDMFSRVPFHVAHTVVEKDQERLDLDTKKLQSFVKEKSLVIAEKGALAGRFGADTVKSLVSLTDTTKSTREGGEVKYQFC

SEQ ID NO: 185142 - protein, 300 aa, Zea Mays
MGGASVDVDGAAEASSPLLLPRSAPRPAVSAEVTRQVGLAAPLVACSLLQYCLQVVSVMFAGHLGELSLSGASVAASFANVTGFSVLLGMGSALDTFCGQSYGARQYDMLGTHTQRAIIVLMFTGLPLAFVLAFTGQILIALGQNPEISFEAGLYAQWLIPGLFAYGLLQCLTRFLQAQNIVHILVACSGLTLLLHVMLCWLLVQSFGLGHKGAALATSVSYWFNVALLAVYVKFSEAGRRSWHGWSGEALKLKDAKVYLKLAIPSTFMTCLEYWAFEMVVLLAGFLPDPKLETSILSVR

SEQ ID NO: 185143 - protein, 54 aa, Zea Mays
MRETVQQRVDDAQTSATKHTNAPRDSARDERERRANRHVTTCGITRAIGERLNR

SEQ ID NO: 185144 - protein, 311 aa, Zea Mays
MGSSLQSDGNWRDACCLDPSLCTNLTIPQICMVQNLIERCLQMYMNKKEVVDALSHHSRIEPCITELVWQQLEQQNPLFFKAYDMRLMLKNQIMVFNRLLQDQFEIMNKEFSSGIPSMSLPNDSNSNLLKQDSCFLPETAPGNAMPDGIMHNGSSSGIINDTPSGDQLLNASKDLHGLHSQIDASTSLQSDQNATAVLYGVDNETSATIKTESCYSSNADFAFCGNTFLESCQSIGDASGGGSFSSSELNGQPLNDSILDMESSSFSFLNQMPQSFMFSDLADDFNQNAEITPFLTPETNFSDSTGGDHTG

SEQ ID NO: 185145 - protein, 167 aa, Zea Mays
MPDGIMHNGSSSGIINDTPSGDQLLNASKDLHGLHSQIDASTSLQSDQNATAVLYGVDNETSATIKTESCYSSNADFAFCGNTFLESCQSIGDASGGGSFSSSELNGQPLNDSILDMESSSFSFLNQMPQSFMFSDLADDFNQNAEITPFLTPETNFSDSTGGDHTG

SEQ ID NO: 185146 - protein, 206 aa, Zea Mays
MRLMLKNQIMVFNRLLQDQFEIMNKEFSSGIPSMSLPNDSNSNLLKQDSCFLPETAPGNAMPDGIMHNGSSSGIINDTPSGDQLLNASKDLHGLHSQIDASTSLQSDQNATAVLYGVDNETSATIKTESCYSSNADFAFCGNTFLESCQSIGDASGGGSFSSSELNGQPLNDSILDMESSSFSFLNQMPQSFMFSDLADDFNQNAV

SEQ ID NO: 185147 - protein, 1032 aa, Zea Mays
MAVSLCYFCPGLTTRSRMPVKRYKKILAEIFPKTQDEEPNERRIGKLCEYASKNPLRVPKITVYLEQHIYRDLRSEQYGFAKVVMLIYRRLSVSCKEQMPLFASSLLSIVHTLLDQKRQDDLRIVGCETLFDFTVNQVDGTYQFNLEGLVPRLCEIAQEVGEDERASALRAAALQSLSAMVVQVVLENYKPQKMQNDDQSTNDADNQLVQEDQKAEHPPSPFIITPAPSWENIVNAKGGINLPEEDVRDPKVWSRICVHNMAKLSREATTFRRILECLFRYFGNNSSWLSENGLALCVLLDMQLLVESSGQNMHLMLSLLIKHIEHKTMLKQPDMQLSIVEVAATLAEQSSAIASPATVGAISDLVRHLKRTFHITLGSKDMELVKWNEKFRKGIDECLVQLSKKVSDAGPVLDMMAVMLENIASTPVVARSTAAAVYRTAQIIASVPNLQYQNKVFPEALFHQLLLTMIHPDHEARVAAHRIFAIVLVPSSVSPSIQASPSGQVKKHDMQRTLSRAVSVFSSSAAIFDKMKKDKHSENSQGESKDNSLHSVGEGTGQPKNQNLHVSQSRRSSMRISNFSMKRGPSMAMRAPSVAIRAPSISLRGPSMSSRASSVSVKEDQISPKKSDEETESVLVKLSARQITLLLSSIWAQATSPENTPVNYEAIAHTYSLLLLFSGSKASTFEALTQSFQVAFSLRSYALTEADSLQPSRRRSLFTLSTAMIIFSSRAYNVLPLIPICKQMINDRAADPFLRLVDESKLTAVKDCSNDPSKIYGSPEDNANALKSLSEIELSESQSRECIVSTIMNNIANMMDAELHNVRSQLLSDFTPDDMCPTSTQFFEMHVDNPSGFHETGHHEEQGLLIDLGNDHDAFGEASEGAEARTSSVPASDLLSIDQLLETVGAEPAPQAGVVSADIGFKDMTSHCEALTIGKQQKMSAFMSFQQSVQAAGVPGSQPNQTTELDLFQDLQLPQAGAQSTNPFSDESVQGYPQYMNGPNGDNAQPGQDFQQQSLKLPAASPYDNFLRAAGC

SEQ ID NO: 185148 - protein, 308 aa, Zea Mays
MIIFSSRAYNVLPLIPICKQMINDRAADPFLRLVDESKLTAVKDCSNDPSKIYGSPEDNANALKSLSEIELSESQSRECIVSTIMNNIANMMDAELHNVRSQLLSDFTPDDMCPTSTQFFEMHVDNPSGFHETGHHEEGLLIDLGNDHDAFGEASEGAEARTSSVPASDLLSIDQLLETVGAEPAPQAGVVSADIGFKDMTSHCEALTIGKQQKMSAFMSFQQSVQAAGVPGSQPNQTTELDLFQDLQLPQAGAQSTNPFSDESVQGYPQYMNGPNGDNAQPGQDFQQQSLKLPAASPYDNFLRAAGC

SEQ ID NO: 185149 - protein, 96 aa, Zea Mays
MGPGKQPLHIKPAHPSLGFAPPKPPPPSSLTPSPPRTHARREPAKRDGRLHLRVPQRRRRRVDRQAALRRDRVVLLHGHPQLRRLPGDRRWWRDDG

SEQ ID NO: 185150 - protein, 956 aa, Zea Mays
MGWGNTITRRLKVFSMALFIYFDYKAVQKRVQWVSTGKKSAIWKKTHERNARRVLNLMIELEGLWVKLGQYLSTRADVLPEPYINVLKQLQDSLPPRPFEEVRETIEKELGEPMSDLFADFVLDPLATASIAQVHRATLADGREVVVKIQHDGVKEIILENAKSLIEWIAWAEPQYDFNPMIDEWCKEAPKELDFNHEAENTRAVSRNLSRKSDCGSGSVSSTVDVLIPEVIQSTGKVLILEYMDGIRLNDNDSLEAYGVDKQKLVEEITRAYAHQIYIDGFFNGDPHPGNFLVSKEPPHKPILLDFGLTKRISESMRQALAKMFLSCAEGDHVALLSAFSEMGLKLRVDMPQQAMDIATVFFRQSTTASEAKENIKTLNDQRERNVKALQEKMKLNKKEVQRFNPVDAFPGDAIIFMRVLNLLRGLSASLNVRIVYLDIMRPFAESTLLGSLTHGQIPNSQWIFDSPANSDVESKLRNYLLELGSDKILGIQVCAYKDGKVIIDTAAGMLGKYDPRPVQPDSLFPVFSVTKGITAGMVHWLVDKGKLKYEETVANIWPNFGTNGKELIKVHHLLNHTSGLHNALGDVVKNDPLLVCDWEETLNQITKSTPETEPGSAQIYHYLSFGWLCGGVIEHASGKKFQEILEEAIVRPLHIEGELYVGIPPGVESRLAALTVDTEELQKLSGIRAGADVPAALLNNIAQMASGVPAIFNTLNVRRAIIPAANGHCSARALARYYAALAAGGSVPPPHSSGAMPPLGSHVHTPKFPTAPLKKKKKGAGKKKGAGGGSMGDLKVQDISGGSSDRNGYCQLRTSDADSEAGSGSGGGGRMFGSDRILDAFMGVGEYEGMAHRDGKFGLGFRRYDDASSGSGRLRCFGHSGMGGSTGFCDVENGFAIAVTVNKLSLGSVTRGVVRLVLEELGLPVPDEYSATGEKGPDMMLNLTTTTTTTPPQLR

SEQ ID NO: 185151 - protein, 740 aa, Zea Mays
MNGARRLQRNLISTMKQSTGKVLILEYMDGIRLNDNDSLEAYGVDKQKLVEEITRAYAHQIYIDGFFNGDPHPGNFLVSKEPPHKPILLDFGLTKRISESMRQALAKMFLSCAEGDHVALLSAFSEMGLKLRVDMPQQAMDIATVFFRQSTTASEAKENIKTLNDQRERNVKALQEKMKLNKKEVQRFNPVDAFPGDAIIFMRVLNLLRGLSASLNVRIVYLDIMRPFAESTLLGSLTHGQIPNSQWIFDSPANSDVESKLRNYLLELGSDKILGIQVCAYKDGKVIIDTAAGMLGKYDPRPVQPDSLFPVFSVTKGITAGMVHWLVDKGKLKYEETVANIWPNFGTNGKELIKVHHLLNHTSGLHNALGDVVKNDPLLVCDWEETLNQITKSTPETEPGSAQIYHYLSFGWLCGGVIEHASGKKFQEILEEAIVRPLHIEGELYVGIPPGVESRLAALTVDTEELQKLSGIRAGADVPAALLNNIAQMASGVPAIFNTLNVRRAIIPAANGHCSARALARYYAALAAGGSVPPPHSSGAMPPLGSHVHTPKFPTAPLKKKKKGAGKKKGAGGGSMGDLKVQDISGGSSDRNGYCQLRTSDADSEAGSGSGGGGRMFGSDRILDAFMGVGEYEGMAHRDGKFGLGFRRYDDASSGSGRLRCFGHSGMGGSTGFCDVENGFAIAVTVNKLSLGSVTRGVVRLVLEELGLPVPDEYSATGEKGPDMMLNLTTTTTTTPPQLR

SEQ ID NO: 185152 - protein, 539 aa, Zea Mays
MRVLNLLRGLSASLNVRIVYLDIMRPFAESTLLGSLTHGQIPNSQWIFDSPANSDVESKLRNYLLELGSDKILGIQVCAYKDGKVIIDTAAGMLGKYDPRPVQPDSLFPVFSVTKGITAGMVHWLVDKGKLKYEETVANIWPNFGTNGKELIKVHHLLNHTSGLHNALGDVVKNDPLLVCDWEETLNQITKSTPETEPGSAQIYHYLSFGWLCGGVIEHASGKKFQEILEEAIVRPLHIEGELYVGIPPGVESRLAALTVDTEELQKLSGIRAGADVPAALLNNIAQMASGVPAIFNTLNVRRAIIPAANGHCSARALARYYAALAAGGSVPPPHSSGAMPPLGSHVHTPKFPTAPLKKKKKGAGKKKGAGGGSMGDLKVQDISGGSSDRNGYCQLRTSDADSEAGSGSGGGGRMFGSDRILDAFMGVGEYEGMAHRDGKFGLGFRRYDDASSGSGRLRCFGHSGMGGSTGFCDVENGFAIAVTVNKLSLGSVTRGVVRLVLEELGLPVPDEYSATGEKGPDMMLNLTTTTTTTPPQLR

SEQ ID NO: 185153 - protein, 344 aa, Zea Mays
MTEGRKWVLFFQDTNGLLFNAIPSALGVSATKGYNVNSLAVPRKAKEAIGGITKLTHVDGRTMVINVEYNQLDPLLRATGHPDGDSNCETGYSPYPGNINQLILELGPYIEELKKTHGAISEFVNPKYTDSTKTAFKSSTRLECMMQDYPKTLPPSAKVGFTVMDTWLAYAPVKNNPEDAAKVPKGNPYHSATSGEMAIYRANSLILRKAGAQIADPVVHTFNGQEVEVWPRVTWSPRWGLTFKSVKEKVHGNSSVSQRSALVINGQNVFLEGLSLDGTLVVNAADEAEVKLTGHIQNKGWTIQHVDYKDASEKEEIRIRGFKLEKIEQLEVNYTEPGNHSLSA

SEQ ID NO: 185154 - protein, 331 aa, Zea Mays
MAPGTDAGYGQWAAACPPLRRNLQLLSPDEVELAKMLLNEGQIHLFEHWPEPGVDDDNKRGFFDQVRRLNSSYPGGLVSYIQNAKKLLADSKEGKNPYDGFTPSVPSGEVLTFGNDNFVSLETAGIKEACNAAFVLVAGGLGERLGYKGIKVALPRETTTGKCFLQHYIESILAFQEASCKMVDEGCQTKIPFVIMTSDDTNALTIKLLESNSYFGMEPSQVKILKQEKVACLADNDARLALDPSDKYKIQTKPHGHGDVHSLLYSSGLLEQWKTEGRKWVLFFQDTNGLLFNVCTLASLLCYNFIVKNRAFLLSLKMYREVPKLLHESGT

SEQ ID NO: 185155 - protein, 272 aa, Zea Mays
MAPGTDAGYGQWAAACPPLRRNLQLLSPDEVELAKMLLNEGQIHLFEHWPEPGVDDDNKRGFFDQVRRLNSSYPGGLVSYIQNAKKLLADSKEGKNPYDGFTPSVPSGEVLTFGNDNFVSLETAGIKEACNAAFVLVAGGLGERLGYKGIKVALPRETTTGKCFLQHYIESILAFQEASCKMVDEGCQTKIPFVIMTSDDTNALTIKLLESNSYFGMEPSQVKILKQEKVACLADNDARLALDPSDKYKIQTKPHGHGDVHSLLYSSGLLEQ

SEQ ID NO: 185156 - protein, 582 aa, Zea Mays
MLLNEGQIHLFEHWPEPGVDDDNKRGFFDQVRRLNSSYPGGLVSYIQNAKKLLADSKEGKNPYDGFTPSVPSGEVLTFGNDNFVSLETAGIKEACNAAFVLVAGGLGERLGYKGIKVALPRETTTGKCFLQHYIESILAFQEASCKMVDEGCQTKIPFVIMTSDDTNALTIKLLESNSYFGMEPSQVKILKQEKVACLADNDARLALDPSDKYKIQTKPHGHGDVHSLLYSSGLLEQWKTEGRKWVLFFQDTNGLLFNAIPSALGVSATKGYNVNSLAVPRKAKEAIGGITKLTHVDGRTMVINVEYNQLDPLLRATGHPDGDSNCETGYSPYPGNINQLILELGPYIEELKKTHGAISEFVNPKYTDSTKTAFKSSTRLECMMQDYPKTLPPSAKVGFTVMDTWLAYAPVKNNPEDAAKVPKGNPYHSATSGEMAIYRANSLILRKAGAQIADPVVHTFNGQEVEVWPRVTWSPRWGLTFKSVKEKVHGNSSVSQRSALVINGQNVFLEGLSLDGTLVVNAADEAEVKLTGHIQNKGWTIQHVDYKDASEKEEIRIRGFKLEKIEQLEVNYTEPGNHSLSA

SEQ ID NO: 185157 - protein, 224 aa, Zea Mays
MAPFLNLYTDSTKTAFKSSTRLECMMQDYPKTLPPSAKVGFTVMDTWLAYAPVKNNPEDAAKVPKGNPYHSATSGEMAIYRANSLILRKAGAQIADPVVHTFNGQEVEVWPRVTWSPRWGLTFKSVKEKVHGNSSVSQRSALVINGQNVFLEGLSLDGTLVVNAADEAEVKLTGHIQNKGWTIQHVDYKDASEKEEIRIRGFKLEKIEQLEVNYTEPGNHSLSA

SEQ ID NO: 185158 - protein, 282 aa, Zea Mays
MVINVEYNQLDPLLRATGHPDGDSNCETGYSPYPGNINQLILELGPYIEELKKTHGAISEFVNPKYTDSTKTAFKSSTRLECMMQDYPKTLPPSAKVGFTVMDTWLAYAPVKNNPEDAAKVPKGNPYHSATSGEMAIYRANSLILRKAGAQIADPVVHTFNGQEVEVWPRVTWSPRWGLTFKSVKEKVHGNSSVSQRSALVINGQNVFLEGLSLDGTLVVNAADEAEVKLTGHIQNKGWTIQHVDYKDASEKEEIRIRGFKLEKIEQLEVNYTEPGNHSLSA

SEQ ID NO: 185159 - protein, 246 aa, Zea Mays
MSMLILELGPYIEELKKTHGAISEFVNPKYTDSTKTAFKSSTRLECMMQDYPKTLPPSAKVGFTVMDTWLAYAPVKNNPEDAAKVPKGNPYHSATSGEMAIYRANSLILRKAGAQIADPVVHTFNGQEVEVWPRVTWSPRWGLTFKSVKEKVHGNSSVSQRSALVINGQNVFLEGLSLDGTLVVNAADEAEVKLTGHIQNKGWTIQHVDYKDASEKEEIRIRGFKLEKIEQLEVNYTEPGNHSLSA

SEQ ID NO: 185160 - protein, 194 aa, Zea Mays
MMQDYPKTLPPSVMDTWLAYAPVKNNPEDAAKVPKGNPYHSATSGEMAIYRANSLILRKAGAQIADPVVHTFNGQEVEVWPRVTWSPRWGLTFKSVKEKVHGNSSVSQRSALVINGQNVFLEGLSLDGTLVVNAADEAEVKLTGHIQNKGWTIQHVDYKDASEKEEIRIRGFKLEKIEQLEVNYTEPGNHSLSA

SEQ ID NO: 185161 - protein, 334 aa, Zea Mays
MHMVLRNHLQFSREELFPSARGLMSFSKHNLALVLAPTRELAQQIEKVMRALGDYLGVKVHACVGGTSVREDQRILASGVHVVVGTPGRVFDMLRRQSLRPDNIKMFVLDEADEMLSRGFKDQIYDIFQLLPSKIQVGVFSATMPPEALEITRKFMNKPVRILVKRDELTLEGIKQFYVNVDKEDWKLDTLCDLYETLAITQSVIFVNTRRKVDWLTDKMRSRDHTVSATHGDMDQNTRDIIMREFRSGSSRVLITTDLLARGIDVQQVSLVINYDLPTQPENYLHRIGRSGRFGRKGVAINFVTRDDERMLFDIQKFYNVLIEELPANVADLL

SEQ ID NO: 185162 - protein, 349 aa, Zea Mays
MHMQRGIVPFCKGLDVIQQAQSGTGKTATFCSGILQQLDYGLVECQALVLAPTRELAQQIEKVMRALGDYLGVKVHACVGGTSVREDQRILASGVHVVVGTPGRVFDMLRRQSLRPDNIKMFVLDEADEMLSRGFKDQIYDIFQLLPSKIQVGVFSATMPPEALEITRKFMNKPVRILVKRDELTLEGIKQFYVNVDKEDWKLDTLCDLYETLAITQSVIFVNTRRKVDWLTDKMRSRDHTVSATHGDMDQNTRDIIMREFRSGSSRVLITTDLLARGIDVQQVSLVINYDLPTQPENYLHRIGRSGRFGRKGVAINFVTRDDERMLFDIQKFYNVLIEELPANVADLL

SEQ ID NO: 185163 - protein, 201 aa, Zea Mays
MSHSHHDGSKPYQPRRGPERPPQPADGIAVPPPAAVAPSVEHLVAAAAEAEALSRLGAEQQQLLQGHEQEVGEEEGEDEEEDEMEDDDDDDDEQEGQHGGIGVEHVPMDADAAAAAAVAAAGAQMDPHSVLVPGTVPPMATNQLTLSFQGEVYVFDSVSPDKVQAVLLLLGGRELSSLSGASSSAPYKVELSTSGGITDEI

SEQ ID NO: 185164 - protein, 157 aa, Zea Mays
MRFREKRKERNFDKKIRYNVRKEVALRMQRNRGQFTSSKPKPDEIAASEMAAADGSLNWALVEGRPPSAAECHHCGINATATPMMRRGPDGPRTLCNACGLMWANKGLLRDLSKSPVPLHSIQQSAPILNGGNGSAMSALGSELENAAAAMGNGHEP

SEQ ID NO: 185165 - protein, 683 aa, Zea Mays
MADVLEPASDAPRVRRPPPPPPDSPEDRSPRLPPPPPGGPPAPSRKRSRSPPPPPPLGSSRPQRYRDHRGGGGRGGSSPSPPPYRGSRRHSPPRYGYDDRRRGYDHDRGGGRGGYDDDRNHGRYLNRGPDWPDSGYGAANDGPGVTQREGLMTYKQFMLVLEDDISPSEAERRYQEYRTEYITTQKRAYFDLHKNEDWLKDKYHPTNLLSVIERRNERCKVIAKDFFLDLQNGTLDLGPGITGGAASKPGGSDGNSDDDTDNDKRRKHGKDSSKGTDSISGALKAHPVSSESRRVQADIEQTLALVRKLDSEKGIEENVLSSGDHDKSDVDKSHIGSMGPIIIIRGLTTVKGLEGVELLDTILTYLWRIHGVDYYGTSESHEAKGLRHVRVDSKTSSTSDVSAADWEKKLDTFWQERLNGQDPLVILTAKDKIDAAAAEVLEPLVRKIRDEKYGWKYGCGAKGCTKLFHAPEFVHKHLRLKHPDLVLESTSKVREDLYFQNYMKDPNAPGGTPVMQLSAPDRGRRRPSMDSRLKFDRGSNKEHDKAERDGGRYGRDDHSPSRDGPDDQMFDGFRGRPSNAPFVAEFPPPPILMPVPGAGPLGPFVPAPPEIAMHMLREQGPPPPFEPNGAPHGSTGMLGPMLGGSAPIIAMPPNFRHDPRRLRSYNDLDAPDEEVTVLDYRSL

SEQ ID NO: 185166 - protein, 536 aa, Zea Mays
MEGLMTYKQFMLVLEDDISPSEAERRYQEYRTEYITTQKRAYFDLHKNEDWLKDKYHPTNLLSVIERRNERCKVIAKDFFLDLQNGTLDLGPGITGGAASKPGGSDGNSDDDTDNDKRRKHGKDSSKGTDSISGALKAHPVSSESRRVQADIEQTLALVRKLDSEKGIEENVLSSGDHDKSDVDKSHIGSMGPIIIIRGLTTVKGLEGVELLDTILTYLWRIHGVDYYGTSESHEAKGLRHVRVDSKTSSTSDVSAADWEKKLDTFWQERLNGQDPLVILTAKDKIDAAAAEVLEPLVRKIRDEKYGWKYGCGAKGCTKLFHAPEFVHKHLRLKHPDLVLESTSKVREDLYFQNYMKDPNAPGGTPVMQLSAPDRGRRRPSMDSRLKFDRGSNKEHDKAERDGGRYGRDDHSPSRDGPDDQMFDGFRGRPSNAPFVAEFPPPPILMPVPGAGPLGPFVPAPPEIAMHMLREQGPPPPFEPNGAPHGSTGMLGPMLGGSAPIIAMPPNFRHDPRRLRSYNDLDAPDEEVTVLDYRSL

SEQ ID NO: 185167 - protein, 566 aa, Zea Mays
MFWMQSNGESDENILYPLTSKQQRLRFSFTMEGLMTYKQFMLVLEDDISPSEAERRYQEYRTEYITTQKRAYFDLHKNEDWLKDKYHPTNLLSVIERRNERCKVIAKDFFLDLQNGTLDLGPGITGGAASKPGGSDGNSDDDTDNDKRRKHGKDSSKGTDSISGALKAHPVSSESRRVQADIEQTLALVRKLDSEKGIEENVLSSGDHDKSDVDKSHIGSMGPIIIIRGLTTVKGLEGVELLDTILTYLWRIHGVDYYGTSESHEAKGLRHVRVDSKTSSTSDVSAADWEKKLDTFWQERLNGQDPLVILTAKDKIDAAAAEVLEPLVRKIRDEKYGWKYGCGAKGCTKLFHAPEFVHKHLRLKHPDLVLESTSKVREDLYFQNYMKDPNAPGGTPVMQLSAPDRGRRRPSMDSRLKFDRGSNKEHDKAERDGGRYGRDDHSPSRDGPDDQMFDGFRGRPSNAPFVAEFPPPPILMPVPGAGPLGPFVPAPPEIAMHMLREQGPPPPFEPNGAPHGSTGMLGPMLGGSAPIIAMPPNFRHDPRRLRSYNDLDAPDEEVTVLDYRSL

SEQ ID NO: 185168 - protein, 569 aa, Zea Mays
MEGLMTYKQFMLVLEDDISPSEAERRYQEYRTEYITTQKRAYFDLHKNEDWLKDKYHPTNLLSVIERRNERCKVIAKDFFLDLQNGTLDLGPGITGGAASKPGGSDGNSDDDTDNDKRRKHGKDSSKGTDSISGALKAHPVSSESRRVQADIEQTLALVRKLDSEKGIEENVLSSGDHDKSDVDKSHIGSMGPIIIIRGLTTVKGLEGVELLDTILTYLWRIHGVDYYGTSESHEAKGLRHVRVDSKTSSTSDVSAADWEKKLDTFWQERLNGQDPLVILTAKDKIDAAAAEVLEPLVRKIRDEKYGWKYGCGAKGCTKLFHAPEFVHKHLRLKHPDLVLESTSKVREDLYFQNYMKDPNAPGGTPVMQLSAPDRGRRRPSMDSRLKFDRGSNKEHDKAERDGGRYGRDDHSPSRDGPDDQMFDGFRGRPSNAPFVAEFPPPPILMPVPGAGPLGPFVPAPPEIAMHMLREQGPPPPFEPNGAPHGSTGMLGPMLGGSAPIIAMPPNFRHDPRRLRSSYVAFVAVITTSMPLMRKLLSLTTEACRVQHPLEIWAVSSLYEGEKRKVMDK

SEQ ID NO: 185169 - protein, 332 aa, Zea Mays
MCPTKPGRPAQAAAGSGEKSWREQAVAASSLRPVDLDRGTNGWASPPGDLFHLRARGYFSCGGGKRGKAPSAAEWLLRPAGVDWLRSHARLDHVLARHDNRVAAAFRRARLRNDPTAHFLLAVNLQVPGRPDAYSAVFYFAAEAPIAPDSLLGRFVQGDDAYRNARFKIANRIVNGPWLLRATVGNYAACLLGRALTCRYHRGVDYLEIDVDIGSSAIASAILHLALGAVTSVTIDMGFLVESQSEEELPERLFGAVRIARMEMGAARYVELPPNEAMPETVCSGRAGAGFRVSSGKVVNHSRQQDRAGGKVGRSMSCPERERGGWTELLSG

SEQ ID NO: 185170 - protein, 252 aa, Zea Mays
MYTTTRAMEKEEGFGKSWLGLGIGGGGRDLNLMKRSRPLRPVRLDLLFPPSVEGGEAAARSRKAGAGALRNMSLKQVAGDDDGGQSSHGGPSPSDDDDGAGARKKLRLTTEQSKLLEDTFRAHNILSHKHEVARQVDLSARQVEVWFQNRRARTKLKQTEVDCETLRRWRESLADENLRLRLELEQLQRWATAAAGQSSASPSPATATASVCPSCDKVVVVTVTSCGETSGKSSTSSYSSSPPLDMLDRSVQ

SEQ ID NO: 185171 - protein, 88 aa, Zea Mays
MRVGDTFNMVLALTLNLDGSTDTGYYTQVTHLISLIFPLFFTCCNGFVPSQIFISLIIIFFKKNVYAVYVFRFTIMRSISIVYIVHML

SEQ ID NO: 185172 - protein, 162 aa, Zea Mays
MLRIYCVSLFFFNMSPVSSDSYHFLMRVNQCLRDACSISTIPYCDSFIDCGRGIGSGLYRQQWFNDSGAEACFNTGNDATFQYGIYEQAVLLTTEDSAVKRYIYSLFWGFQQISTLAGNLVPSYFIWEVLFTMAIIGLGLLLFALLIGNMQNFLQALGRRCW

SEQ ID NO: 185173 - protein, 60 aa, Zea Mays
MEHLHSSLPLSLRLVLGASAFLLLDSVAVICYVAEGQARADPLAVLSASSAAVPDSGSNY

SEQ ID NO: 185174 - protein, 82 aa, Zea Mays
MEHLHSSLPLSLRLVLGASAFLLLDSVAVICYVAEGQARADPLAVLSASSAAVPVLLDTSTTSYGGPLLETEDRFWELSQFI

SEQ ID NO: 185175 - protein, 486 aa, Zea Mays
MNRLHLTPIYGDDETITHYMGIQFFTDANVDLGPLPCPMTKEPVRSTRFAPDNSFRPISAGPEHSNFCREYSSLFQLTDEVLCQSILSRLTPRDIASVSSVCRCLYHLTRNEDLWRMVCQNAWGSETTRALETVPAARRLGWGRLARELTTLEAVAWRKLTVGGAVEPSRCNFSACAVGNRVVLFGGEGVNMQPMNDTFVLDLNASNPEWRHINVSAAPPGRWGHTLSCLNGSWLVVFGGCGRQGLLNDVFMLDLDAKQPTWREIPGVAPPVPRSWHSSCTLDGTKLVVSGGCADSGVLLSDTYLLDVTMDRPVWREVPASWKPPSRLGHSMSVYDGRKILMFGGLAKSGPLRLRSSDVYTMDLSEEEPCWRCLTGSGMPGAGNPAGAGPPPRLDHVGVSLPGGRILIFGGSVAGLHSASQLYLLDPTEEKPTWRILSVPGHPPRFAWGHSTCVVGGTKAIVLGGQTGEEWMLTEIHELSLANNSV

SEQ ID NO: 185176 - protein, 118 aa, Zea Mays
MPSAVLKLFHVGAPQDGTGRRIRPPSRNALFAVFQREDEGSRAAQVASSWAEQTGESKRMDQELEPQEGSCLSGCPPGTMFPRSRCLGHFWKRSGMTCFQAWRTSPTHHMQICSLLIQ

SEQ ID NO: 185177 - protein, 192 aa, Zea Mays
MFCILFSYKLDLASIMLFSFGTESLSDSSSPLGSPVGTQGLRSATRTSTAALPISSTASGARRCPGDRPSRKSNVQKRKVSRLFQSTSMHPKPVPQKEPLSAALSALTLVVQFNGWLSFFLLLYYKLPLRPETHKTYYEYTGLWHIYGLLAMNSWFWSAIYHSCDTIWTEKAIFFIRCCLSRINHSGTCTNN

SEQ ID NO: 185178 - protein, 132 aa, Zea Mays
MHPKPVPQKEPLSAALSALTLVVQFNGWLSFFLLLYYKLPLRPETHKTYYEYTGLWHIYGLLAMNSWFWSAIYHSCDTIWTEKAIFFIRCCLSRVFPHFDDSWCIREKHFKVNLLSKLEMLDFVFWLLMGGE

SEQ ID NO: 185179 - protein, 169 aa, Zea Mays
MDVQRHPISVCTAILGSTCLRSATRTSTAALPISSTASGARRCPGDRPSRKSNVQKRKVSRLFQSTSMHPKPVPQKEPLSAALSALTLVVQFNGWLSFFLLLYYKLPLRPETHKTYYEYTGLWHIYGLLAMNSWFWSAIYHSCDTIWTEKAIFFIRCCLSRVFPHFDDS

SEQ ID NO: 185180 - protein, 153 aa, Zea Mays
MDVQRHPISVCTAILGSTCLRSATRTSTAALPISSTASGARRCPGDRPSRKSNVQKRKEPLSAALSALTLVVQFNGWLSFFLLLYYKLPLRPETHKTYYEYTGLWHIYGLLAMNSWFWSAIYHSCDTIWTEKAIFFIRCCLSRINHSGTCTNN

SEQ ID NO: 185181 - protein, 170 aa, Zea Mays
MDVQRHPISVCTAILGSTCLRSATRTSTAALPISSTASGARRCPGDRPSRKSNVQKRKVSRLFQSTSMHPKPVPQKEPLSAALSALTLVVQFNGWLSFFLLLYYKLPLRPETHKTYYEYTGLWHIYGLLAMNSWFWSAIYHSCDTIWTEKAIFFIRCCLSRVFPHFDDSW

SEQ ID NO: 185182 - protein, 112 aa, Zea Mays
MLYYGCSEASNFSVYCNTWVHLVTLRQLIAAWFSCRYTRFKKRYADFHGRAADLVHGLRGTAMPRRQALEEEQCTEEKGISTIPKHKYASKACSPKGTFICSSLCAYSCCAI

SEQ ID NO: 185183 - protein, 102 aa, Zea Mays
MHPKPVPQKEPLSAALSALTLVVQFNGWLSFFLLLYYKLPLRPETHKTYYEYTGLWHIYGLLAMNSWFWSAIYHSCDTIWTEKAIFFIRCCLSRVFPHFDDS

SEQ ID NO: 185184 - protein, 164 aa, Zea Mays
MSPPSRSPPSSLLPPRRPPPRSPTRLPSSWISGALSSLRREQGRRLPWHRREPGITLPISWDGTGRRIRPPSRNALFAVFQREDEGSRAAQVASSWAEQTGESKRMDQELEPQEGSCLSGCPPGTMFPRSRCLGHFWKRSGMTCFQAWRTSPTHHMQICSLLIQ

SEQ ID NO: 185185 - protein, 220 aa, Zea Mays
MFCILFSYKLDLASIMLFSFGTESLSDSSSPLGSPVGTQGLRSATRTSTAALPISSTASGARRCPGDRPSRKSNVQKRKVSRLFQSTSMHPKPVPQKEPLSAALSALTLVVQFNGWLSFFLLLYYKLPLRPETHKTYYEYTGLWHIYGLLAMNSWFWSAIYHSCDTIWTEKAIFFIRCCLSRVFPHFDDSWCIREKHFKVNLLSKLEMLDFVFWLLMGGE

SEQ ID NO: 185186 - protein, 87 aa, Zea Mays
MPVRSSLVGSCFMKWMQLERRTSGPTSRGGSPWATGPARPRCRSSRTTPSPPTPLSDNSSPPGSPAWFLHFVFLSVNHVFPYYCRWV

SEQ ID NO: 185187 - protein, 159 aa, Zea Mays
MSPPSRSPPSSLLPPRRPPPRSPTRLPSSWISGALSSLRREQGRRLPWHRREPGITLPISWDGTGRRIRPPSRNALFAVFQREDEGSRAAQVASSWAEQTGESKRMDQELEPQRHASEEQFSRFLLYEVDAIRKTYERANISRWLALGNRTCPTTMQEL

SEQ ID NO: 185188 - protein, 179 aa, Zea Mays
MVQAGGSGHRRGTRSSLCSSEKMRDRGRRRWRARGRNRLVRARGWIRSLSPRDMPVRSSLVGSCFMKWMQLERRTSGPTSRGGSPWATGPARPRCRSSRTTPSPPTPLSDNSSPPVYLRYCLNVWDVGGQKTIMSYWRNYFEQTNGLVWFADSSDIRRLDDCRAELHNLLKEEDKGLPI

SEQ ID NO: 185189 - protein, 191 aa, Zea Mays
MFCILFSYKLDLASIMLFSFGTESLSDSSSPLGSPVGTQGLRSATRTSTAALPISSTASGARRCPGDRPSRKSNVQKRKVSRLFQSTSMHPKPVPQKEPLSAALSALTLVVQFNGWLSFFLLLYYKLPLRPETHKTYYEYTGLWHIYGLLAMNSWFWSAIYHSCDTIWTEKAIFFIRCCLSRVYQREALQG

SEQ ID NO: 185190 - protein, 54 aa, Zea Mays
MCILMEAETLLENLMVYKDHYYAKTINNIIYPKKMQSVFNRRTDCLVRGSHGFF

SEQ ID NO: 185191 - protein, 75 aa, Zea Mays
MLALMVAMRSRNKSLACLIWSKLPSSSMFFRLGLDSWSRMDSLTPVTLLSVDPTLVDYATGQRGVHTDLSIYEIK

SEQ ID NO: 185192 - protein, 68 aa, Zea Mays
MLALMVAMRSRNKSLACLIWSKLPSSSMFFRLGLDSWSRMDSLTPVTLLSVDPTLVDYATGQRGVHTL

SEQ ID NO: 185193 - protein, 548 aa, Zea Mays
MALTDAITYNAALILKASMKLPDKAHELLISISSLETAITKLEEDLHHLHYQLCDARNERLLAENKPECLLPTASDCQPSTACDCTREEPEQTLRYSRFKDYHQVEDGLSTEPEDQQDDEKDAEDGEHVSLNMLVEKHQDVSLTGLLEHILHTMQEACSMENEGKEDQKIDALTFSQPNFKKSDMSGNLWNNPNQLSEEMVRSMKDIFLHLSASPKISREEPFANSSSSAERLSGSTLTTLSDSSIIASVLRSPSIDWNNGDGIIDDVRNFDPYNVKGKEARRDVGSYCSVAEVSWMYIGNEQLEYASGALKKFRFLVEQLSKVDPSCMNCDEQIAFWVNLYNALIMHAYLAYGVPENDIKLFALMQKACYTIGGQPVSAAEIEFVILKMKTPVHRPQLSLMLALHKFKTSENLRRYSIDGTEPRVLFALCCGMFSSPAVRIFSAENVRAELQESMRDYIRASVGINDKGELVVPKLLQSYAKGIVEDSLLADWICRHLTLDQVAAIQDTSSSSSHKQRLLGVRSFSVIPFDSRFRYLFLSNNTRCQN

SEQ ID NO: 185194 - protein, 250 aa, Zea Mays
MYIGNEQLEYASGALKKFLVEQLSKVDPSCMNCDEQIAFWVNLYNALIMHAYLAYGVPENDIKLFALMQKACYTIGGQPVSAAEIEFVILKMKTPVHRPQLSLMLALHKFKTSENLRRYSIDGTEPRVLFALCCGMFSSPAVRIFSAENVRAELQESMRDYIRASVGINDKGELVVPKLLQSYAKGIVEDSLLADWICRHLTLDQVAAIQDTSSSSSHKQRLLGVRSFSVIPFDSRFRYLFLSNNTRCQN

SEQ ID NO: 185195 - protein, 82 aa, Zea Mays
MEEEVRKRIMALARPGWVGVGEWARLCPPFTFGALESVGRCVRLRRCLPRPYGVVSLSTKKKNSTQFYVHSNSSCFNFGPKV

SEQ ID NO: 185196 - protein, 75 aa, Zea Mays
MEHVHIEPHPLKNEWGRNGKKDDDLKNEALPFGDFSCGTISASSDFAGEAALRLCKEHTADAESIWNRSVASVIG

SEQ ID NO: 185197 - protein, 92 aa, Zea Mays
MKLYMVAPFLTGLKAWIATHPPPLHQKPETSARGTVWRAKGSSSGTTPVENPVAKAGSDVQHAADRPGCSFRNFRFDTASILQAMEASFLRT

SEQ ID NO: 185198 - protein, 548 aa, Zea Mays
MKFEIQKDSFRNVMDMSANLGGFAASLKKKNVWVMNVVPFTESGKLKIIYDRGLMGTTHDWCESFSTYPRTYDLLHAWLLFSEIEKRGCSLEDLLIEMDRILRPYGYAIIRDKVDVVTYIKKLLPALRWDDTPAPRQKEQGRRRKAAPAAHTPRGGAMAELRHATAAAAATRATGSPSKRDAEAASSPLVASPRVGGGRDGLRPHQRWPLPPPVRALLACEDPRSPTASASYRILVAAIACFALAALFSAPSLWARLNAPYLCRKEGIRLHCPRVSQPDSLWENPHAAATSWKPCAERQRHEVSDLVSENETSGFIFIHAEGGLNQQRIAICNAVAIAKIMNATLILPVLKQDQIWKDQTKFEDIFDVDHFINYLKEDVHIVRDIPDWFTEKDDLFTSIKRTVKNVPKYASAQFYIDNVLPRIKEKKIMSIKPFVDRLGYDNVPMEINRLRCRVNYHALKFLPDIEEMADKLATRMRNRTGSLNPYMALHLRFEKGMVGLSFCDFAGTREEKAMMATYRQQQWPRRYKNGSHLWPLALQKRKRRPMPP

SEQ ID NO: 185199 - protein, 552 aa, Zea Mays
MVRSTMEGTSGMCLMLAVGLPASALTFFHMMYLRCLLLPTTCMKIKSSLPLREGSRQPLVCWAQGGCHTHYPSRSFEMAHCSRCRIDWLQRDGVLLLEVDRVLRPGGYFVYSSPEAYALDPFNRKIWRQMSDLARRMCWRVASKKNQTVIWAKPLTNGCYMRREPGTLPPMCERDGDSDADWGVPMKVCLTPYSKRVSKAKGSELLPWPQRLTTPPPCLEELGISWNNFSEDNEIWHSRVIQYWKHMKFEIQKDSFRNVMDMSANLGGFAASLKKKNVWVMNVVPFTESGKLKIIYDRGLMGTTHDWCESFSTYPRTYDLLHAWLLFSEIEKRGCSLEDLLIEMDRILRPYGYAIIRDKVDVVTYIKKLLPALRWDDTPAPRQKEQGRRRKAAPAAHTPRGGAMAELRHATAAAAATRATGSPSKRDAEAASSPLVASPRVGGGRDGLRPHQRWPLPPPVRALLACEDPRSPTASASYRILVAAIACFALAALFSAPSLWARLNAPYLCRKEGIRLHCPRVSQPDSLWENPHAAATSWKPCAERQRHEVSDM

SEQ ID NO: 185200 - protein, 662 aa, Zea Mays
MVRSTMEGTSGMCLMLAVGLPASALTFFHMMYLRCLLLPTTCMKIKSSLPLREGSRQPLVCWAQGGCHTHYPSRSFEMAHCSRCRIDWLQRDGVLLLEVDRVLRPGGYFVYSSPEAYALDPFNRKIWRQMSDLARRMCWRVASKKNQTVIWAKPLTNGCYMRREPGTLPPMCERDGDSDADWGVPMKVCLTPYSKRVSKAKGSELLPWPQRLTTPPPCLEELGISWNNFSEDNEIWHSRVIQYWKHMKFEIQKDSFRNVMDMSANLGGFAASLKKKNVWVMNVVPFTESGKLKIIYDRGLMGTTHDWCESFSTYPRTYDLLHAWLLFSEIEKRGCSLEDLLIEMDRILRPYGYAIIRDKVDVVTYIKKLLPALRWDDTPAPRQKEQGRRRKAAPAAHTPRGGAMAELRHATAAAAATRATGSPSKRDAEAASSPLVASPRVGGGRDGLRPHQRWPLPPPVRALLACEDPRSPTASASYRILVAAIACFALAALFSAPSLWARLNAPYLCRKEGIRLHCPRVSQPDSLWENPHAAATSWKPCAERQRHEVSDLVSENETSGFIFIHAEGGLNQQRIAICNAVAIAKIMNATLILPVLKQDQIWKDQTKFEDIFDVDHFINYLKEDVHIVRDIPDWFTEKDDLFTSIKLVVSFSAIHCALTAIY

SEQ ID NO: 185201 - protein, 424 aa, Zea Mays
MLDYDYLVVALGATVSTFNTPGVLEHCCFLKEVEDAQKIRKGVIDCFEKASLPNISEEEKRKILHFVVIGGGPTGVEFAAEMHDFLVEDLVKLYPAIQDLVKITIIQSAEHILTMFDERIASFAEQKFKRDGIEVCTGFRVIKVSDDLITMKRKSDGEELSVPYGMAVWSAGIGTRPVVMDFMQQIGQTNRRALATNEWLRVRECEGVYAIGDCATVSQRKIMDDISTVFKMADKDNSGTLTLKEINGVLDDICIRYPQVELYMKSMHMLDIADLIKGAVGDSHKESMVVDIEEFKKALRHVDSQVKNAPATAQVAAQQGQYLAQCFNKMEKCREEPEGPLRMAGGSGRHFFRPFRYKHFGQFAPLGGEQAAAELPGDWVSMGHSTQWLWYSVYASKQVSWRTRVLVVSDWTRRFIFGRDSSRI

SEQ ID NO: 185202 - protein, 596 aa, Zea Mays
MSGDQGSSEQRRMGFSFFTSRAGARLLDGIARPGFSTAALLLTAASGGGLVAYADSAAESAPDPSQDAPRKKVVVLGTGWAGTSFLKNLDCSRYEVKVISPRNYFAFTPLLPSVTCGTVEPRSIIEPVRRMFEKKNKDVTFCEAECFKIDANRKTVHCRSAVGTNLDGNGDFMLDYDYLVVALGATVSTFNTPGVLEHCCFLKEVEDAQKIRKGVIDCFEKASLPNISEEEKRKILHFVVIGGGPTGVEFAAEMHDFLVEDLVKLYPAIQDLVKITIIQSAEHILTMFDERIASFAEQKFKRDGIEVCTGFRVIKVSDDLITMKRKSDGEELSVPYGMAVWSAGIGTRPVVMDFMQQIGQTNRRALATNEWLRVRECEGVYAIGDCATVSQRKIMDDISTVFKMADKDNSGTLTLKEINGVLDDICIRYPQVELYMKSMHMLDIADLIKGAVGDSHKESMVVDIEEFKKALRHVDSQVKNAPATAQVAAQQGQYLAQCFNKMEKCREEPEGPLRMAGGSGRHFFRPFRYKHFGQFAPLGGEQAAAELPGDWVSMGHSTQWLWYSVYASKQVSWRTRVLVVSDWTRRFIFGRDSSRI

SEQ ID NO: 185203 - protein, 105 aa, Zea Mays
MSPSDQRQNHVSASRKRPISLPRSEEAKTGKRQRENGDDMIPTPENYRPEDALEHVQDSKGTDRLESFTVKKLRVGDYDDEGNIVSSSNIFADRYKGDDEEVDVD

SEQ ID NO: 185204 - protein, 477 aa, Zea Mays
MRAPCRLPTRSTRRSGAPEAHRQARRVHREERAGFRGHDPRQAARQPGLRLRLRRGRSRLLQPGYPPFYDQHQQFAAAHGHGDYEAAAQPFKGLSGPLPADVAAELQDVLINLNGTKESIKGAKSWFMQRLPFAPALAEALKERVFVLEDSERQLHIIFLVNDILFESLQRRTSIRDLDNEAIAFKSVLGPMLARVYNNSQSKDDNQTRVEKILQFWGSKEVYDQETIANFEREMKGGLPYSLVPRHVSPDPTTFSGSAPVPSKWSSEPPEKDKPIHPVAGQNAFAGSLPVQPSSTVPAVAPQSTAAANDSTPPPYPLFPPGLIPGMVRKMQIGSGVPYSSLSPLDIPTTIPPSSVPESEILERVSKFFSDIGEVNPSEGPMRQGEPDDYDDYERELPARKGGACIPPPPNLLLNPETGMHADGSVDSKPGSSGRLGLGASADPNEVSQYDDVYSSYRKQRSSTYHISITARSSTSR

SEQ ID NO: 185205 - protein, 179 aa, Zea Mays
MPRMSTSTERKSYRSLAQCAATTSGDAAGANASMNASTTSSGGDRSTTARAAASFFRNGYRIPLVAEAGPRKHGTPSQAAGGAGERGGEEGGAHARAAQRRERARTLESRSRASAPGRRKRCGLPLPASCWRSGRRAGERRRRSMDGWRRRMGGSGGRLELRAGLGKREGGFDFYEIMR

SEQ ID NO: 185206 - protein, 269 aa, Zea Mays
MSIARRKSLLNDKVLTSLAESSWQILDISGSDVTDAGLATVANVCSNLRAVDISRCEKITTAGVSEIVCHCPSLEILRCGGCPRSEVTARRCLNLLKPKLNALEEDSWEELDTLDIGGGAESLRWLVWPMIDDKSKVTLAVECPRVTVNPQPSLFDLSGYSKVPIEALSSVPLDHSVVEDIDPKTWAVSAAPPRAVAPANPNVPSAPPEIPMAERFRLAYVEREARLAPKRAKRERQRRRRAERDYMMVDIDARSVALAAQASRNLRKS

SEQ ID NO: 185207 - protein, 184 aa, Zea Mays
MGTGGKRWRSSRTPGRRPSKAPRRKSRARRFWLMRQLLSSVPTGGSTGCWARTGRNPRTGAQGKRNRNAGRKGGQARGSGAMERSLGVAARSREARHIGRWNERLITGGWTSGGTTRQRGSTMGAREGEDELQEGDGNDFRGGVAGHRFQQKSTARKKSWRQHRSSSRCLSGGEKNPGRAAGRG

SEQ ID NO: 185208 - protein, 118 aa, Zea Mays
MTSSGQHADTRRDGANATWAWLRERRLTGRKLGVRHQRRRDKFLLDRKERRALGETRPGRELEGERGESHGVAQREGRQSARQSRRELRRVEGAQPWRGDERAGRSGWGRGNPSSAKR

SEQ ID NO: 185209 - protein, 151 aa, Zea Mays
MNIVRGVADLLRKAPPPPPAPDAGAAPTASFSAGDFDDAPTPRVVFSGSLEEGALNALWKNYENALDKVEKEKSLQIFVLQFVETFRDWDPNPIEQLVDQELGNNETVVGCSCGHPSEVILILIQEISLITSTFTEKYSATMVVYRRLLLY

SEQ ID NO: 185210 - protein, 897 aa, Zea Mays
MNIVRGVADLLRKAPPPPPAPDAGAAPTASFSAGDFDDAPTPRVVFSGSLEEGALNALWKNYENALDKVEKEKSLQIFVLQFVETFRDWDPNPIEQLVDQELGNNETVVGCSCGHPSEVILILIQEISLITSTFTESGNSPVSPTNHYSGQQNNLGLSSQILQVLECLEILTRSLHNCRVFSYYGGVQKITSLLKAAVAQLKNLNCLLAAEDQSADEAVKNSRVMLNILVCIITIISNFMKLDITVGRIPHITDTTKHTPSCNHLAAVTSSSPDRTISDTLRHWQQKATVLVMEARCVNWLVELLHTVQRLNLKEQCIDLSLHFITLCILRSTVSGTRAQNHLRSIGGLEILLDGLGLPSSKFSVPRQSSISKNERDEILLLQIQYLQTLSEAVFGNVNNLQILFENGRVHKFANCICWPAFMIQMFHWQNDSTKASLTLDSVSGPTYSLDRTEWIDYSIKLSNAFCSFVLPSEDIGYCSDEIAVSQIVLSIPLAYLEQSVRWIIRILMTVFLCIRACTKETELPHHIKIFAKTLQYYVIRMFKRVLISTPALLPAFREEGVWDLLFSGNFFYFGSSIEDTCFHTVTDIQNGNVSSNRISIHSESLYRTDVKILQVEAISFLEFAATLHENTYNMPECSALLDALEHCISDPLLVSTLLKSFRVILQLATEHTLASFESLDVITRVLKAACRQAQELRNFSNFLCSNVSISQDSSQFKNIEGRTEDTLICTELALSLFMEYVTISIDGRILVLHNADCIDCLFDLFHEQNIREHVLEQVLALFRLPSSSAEDHTAKLQLCSKYLENLARANEKEKVNTELLIDLLVNMREIIMMDHMYYQNLFRDEGCFLHIISLLNGNFNKVTDERLVLNVLQTLTLLLEGNDASKGAFRLLVGAG

SEQ ID NO: 185211 - protein, 773 aa, Zea Mays
MNIVRGVADLLRKAPPPPPAPDAGAAPTASFSAGDFDDAPTPRVVFSGSLEEGALNALWKNYENALDKVEKEKSLQIFVLQFVETFRDWDPNPIEQLVDQELGNNETVVGCSCGHPSEVILILIQEISLITSTFTESGNSPVSPTNHYSGQQNNLGLSSQILQVLECLEILTRSLHNCRVFSYYGGVQKITSLLKAAVAQLKNLNCLLAAEDQSADEAVKNSRVMLNILVCIITIISNFMKLDITVGRIPHITDTTKHTPSCNHLAAVTSSSPDRTISDTLRHWQQKATVLVMEARCVNWLMFHWQNDSTKASLTLDSVSGPTYSLDRTEWIDYSIKLSNAFCSFVLPSEDIGYCSDEIAVSQIVLSIPLAYLEQSVRWIIRILMTVFLCIRACTKETELPHHIKIFAKTLQYYVIRMFKRVLISTPALLPAFREEGVWDLLFSGNFFYFGSSIEDTCFHTVTDIQNGNVSSNRISIHSESLYRTDVKILQVEAISFLEFAATLHENTYNMPECSALLDALEHCISDPLLVSTLLKSFRVILQLATEHTLASFESLDVITRVLKAACRQAQELRNFSNFLCSNVSISQDSSQFKNIEGRTEDTLICTELALSLFMEYVTISIDGRILVLHNADCIDCLFDLFHEQNIREHVLEQVLALFRLPSSSAEDHTAKLQLCSKYLENLARANEKEKVNTELLIDLLVNMREIIMMDHMYYQNLFRDEGCFLHIISLLNGNFNKVTDERLVLNVLQTLTLLLEGNDASKGAFRLLVGAG

SEQ ID NO: 185212 - protein, 922 aa, Zea Mays
MNIVRGVADLLRKAPPPPPAPDAGAAPTASFSAGDFDDAPTPRVVFSGSLEEGALNALWKNYENALDKVEKEKSLQIFVLQFVETFRDWDPNPIEQLVDQELGNNETVVGCSCGHPSEVILILIQEISLITSTFTESGNSPVSPTNHYSGQQNNLGLSSQILQVLECLEILTRSLHNCRVFSYYGGVQKITSLLKAAVAQLKNLNCLLAAEDQSADEAVKNSRVMLNILVCIITIISNFMKLDITVGRIPHITDTTKHTPSCNHLAAVTSSSPDRTISDTLRHWQQKATVLVMEARCVNWLVELLHTVQRLNLKEQCIDLSLHFITLCILRSTVSGTRAQNHLRSIGGLEILLDGLGLPSSKFSVPRQSSISKNERDEILLLQIQYLQTLSEAVFGNVNNLQILFENGRVHKFANCICWPAFMIQMFHWQNDSTKASLTLDSVSGPTYSLDRTEWIDYSIKLSNAFCSFVLPSEDIGYCSDEIAVSQIVLSIPLAYLEQSVRWIIRILMTVFLCIRACTKETELPHHIKIFAKTLQYYVIRMFKRVLISTPALLPAFREEGVWDLLFSGNFFYFGSSIEDTCFHTVTDIQNGNVSSNRISIHSESLYRTDVKILQVEAISFLEFAATLHENTYNMPECSALLDALEHCISDPLLVSTLLKSFRVILQLATEHTLASFESLDVITRVLKAACRQAQELRNFSNFLCSNVSISQDSSQFKNIEGRTEDTLICTELALSLFMEYVTISIDGRILVLHNADCIDCLFDLFHEQNIREHVLEQVLALFRLPSSSAEDHTAKLQLCSKYLENLARANEKEKVNTELLIDLLVNMREIIMMDHMYYQNLFRDEGCFLHIISLLNGNFNKVTDERLVLNVLQTLTLLLEGNDASKNEDAVVLLLNILQKHVTSALWACNLTAVAQTIHYK

SEQ ID NO: 185213 - protein, 1282 aa, Zea Mays
MSKVLLKDAISQIYLNPQIWVYASYEVQRDLYMFVINYFETDGRLLPLLCGLPWVIDIVCRYYWEKADSRHVVASKPLFHSVTKQVIGERPEVVEIRKLRLLLLSLAEMSLKIKVSPDDIRALVAFIERSQDIACISDVLDMIIRALSQGEVFSSFVGNVNYLGGCCIFINLLKREFEPVRLLGLQLLGKLLTGIPSEKKETKLFALPLGQSRPISENLTKEITAAPQFFLNTMSERLFKFPLSDNLCAALFSVLSGTSAQQVPQENSEPDPSRDRNCNILSLPPFSLPQILICIFRFMHSCKDSSARTRILNLLLGLLDSNSSNIEALMEHSWNSWLETSTKLEVFKDYKSVSKGDPDDVKADEISLVRNLYSLVLSYYLRFVRGGWHQLDDTANYFLLKTDQGQLSCSDLLRDILDDIAGSLLHKSVEDNIFLLQPCCDNVLHFLNLIQELLISQMGIRLLFLSPSISEESSHDNIWKEDIKSTVNDILNTESHGQFTRFSDVNEVSDDWWSFFDKVWSIIRNLNGKGPSKFIPKDPNVEVASLGQRARGLVESMNVPAAEKVAVVSGGGGIGTALGIKVNRFAEKATTSREEIIPRIFFHLVILYLCKAGLENASKCVIQFMSLLPILLISEDDQSKNKLHFLIWSLLIVRSQYGQLDDSARFHVFSHLILETIIYGKSMLVTNILERDDSVDVNNKETGFILSFIQKNRVLAAAANEVKHMKAVQADRLKKLQDLRMKLNECSATEIKLAQAIEDEIHLTITAVLSADDNRKTACQLAFREDQQIIRDKWIHISRALMDERGPWSANPFPNDVVTHWKLDKTEDRWRRRFKFKRNYKFDERLCQPSQSRNESTATLADQLYISAKITQKMKQFLVKGVRGITEDSSYEQFEDTNDASESSQSNPSESQNLNNAADTSDHHASAHYKKEPSSTNGDNDYTKVLCSVRCVFVTPKRKLAGQLDITRTVMHFSFEFLVEGTGGSSVFSKFKDKKDSDCKNELGGVDRLDGCRDSMIETNGVLMQNQSNKIKRHKRWNITKIKGVHWTRYLLQYTAMEIFFDDSTAPIFLNFSSQKDTKNAGTLLVSLRNEALFPKGSTKDKNNIISFVDRRVGLEMAENARERWKRREISNFEYLVILNTLAGRSYNDLTQYPIFPWVLADYTSEKLDFNKSSTFRDLSKPVGALDENRFKVFEDRYLSFCDPDIPSFYYGSHYSSMGIVLHYMLRLEPFTTLHLNFQGGKFDHADRLFQSIESAYINSLSNTRWGTYRRCCSPSMGKGIA

SEQ ID NO: 185214 - protein, 742 aa, Zea Mays
MTYCTIGTKLIPVGDGPISIGFEKTSAFTGQMGPVYVFSDALSSEQVKGIYFLGPSYMYSFHGDDSLYRGIVDARDGLSSKIIFGFNAQASEGRSLFSVSSALDNADKNTFQATIMGGTKLCSRHLPQDIIYCVGGVSVFFPLFTQFFDAASDIEKCCHTSVVNDKLVAEVIELVATVLDGNVSNQQQMYLLSGLSILGFLLQSATPQLLTTKTLSALKYMFDILRNCSMSKVLLKDAISQIYLNPQIWVYASYEVQRDLYMFVINYFETDGRLLPLLCGLPWVIDIVCRYYWEKADSRHVVASKPLFHSVTKQVIGERPEVVEIRKLRLLLLSLAEMSLKIKVSPDDIRALVAFIERSQDIACISDVLDMIIRALSQGEVFSSFVGNVNYLGGCCIFINLLKREFEPVRLLGLQLLGKLLTGIPSEKKETKLFALPLGQSRPISENLTKEITAAPQFFLNTMSERLFKFPLSDNLCAALFSVLSGTSAQQVPQENSEPDPSRDRNCNILSLPPFSLPQILICIFRFMHSCKDSSARTRILNLLLGLLDSNSSNIEALMEHSWNSWLETSTKLEVFKDYKSVSKGDPDDVKADEISLVRNLYSLVLSYYLRFVRGGWHQLDDTANYFLLKTDQGQLSCSDLLRDILDDIAGSLLHKSVEDNIFLLQPCCDNVLHFLNLIQELLISQMGIRLLFLSPSISEESSHDNIWKEDIKSTVNDILNTESHGQFTRLLGHGWGKAPWQ

SEQ ID NO: 185215 - protein, 1364 aa, Zea Mays
MGGTKLCSRHLPQDIIYCVGGVSVFFPLFTQFFDAASDIEKCCHTSVVNDKLVAEVIELVATVLDGNVSNQQQMYLLSGLSILGFLLQSATPQLLTTKTLSALKYMFDILRNCSMSKVLLKDAISQIYLNPQIWVYASYEVQRDLYMFVINYFETDGRLLPLLCGLPWVIDIVCRYYWEKADSRHVVASKPLFHSVTKQVIGERPEVVEIRKLRLLLLSLAEMSLKIKVSPDDIRALVAFIERSQDIACISDVLDMIIRALSQGEVFSSFVGNVNYLGGCCIFINLLKREFEPVRLLGLQLLGKLLTGIPSEKKETKLFALPLGQSRPISENLTKEITAAPQFFLNTMSERLFKFPLSDNLCAALFSVLSGTSAQQVPQENSEPDPSRDRNCNILSLPPFSLPQILICIFRFMHSCKDSSARTRILNLLLGLLDSNSSNIEALMEHSWNSWLETSTKLEVFKDYKSVSKGDPDDVKADEISLVRNLYSLVLSYYLRFVRGGWHQLDDTANYFLLKTDQGQLSCSDLLRDILDDIAGSLLHKSVEDNIFLLQPCCDNVLHFLNLIQELLISQMGIRLLFLSPSISEESSHDNIWKEDIKSTVNDILNTESHGQFTRFSDVNEVSDDWWSFFDKVWSIIRNLNGKGPSKFIPKDPNVEVASLGQRARGLVESMNVPAAEKVAVVSGGGGIGTALGIKVNRFAEKATTSREEIIPRIFFHLVILYLCKAGLENASKCVIQFMSLLPILLISEDDQSKNKLHFLIWSLLIVRSQYGQLDDSARFHVFSHLILETIIYGKSMLVTNILERDDSVDVNNKETGFILSFIQKNRVLAAAANEVKHMKAVQADRLKKLQDLRMKLNECSATEIKLAQAIEDEIHLTITAVLSADDNRKTACQLAFREDQQIIRDKWIHISRALMDERGPWSANPFPNDVVTHWKLDKTEDRWRRRFKFKRNYKFDERLCQPSQSRNESTATLADQLYISAKITQKMKQFLVKGVRGITEDSSYEQFEDTNDASESSQSNPSESQNLNNAADTSDHHASAHYKKEPSSTNGDNDYTKVLCSVRCVFVTPKRKLAGQLDITRTVMHFSFEFLVEGTGGSSVFSKFKDKKDSDCKNELGGVDRLDGCRDSMIETNGVLMQNQSNKIKRHKRWNITKIKGVHWTRYLLQYTAMEIFFDDSTAPIFLNFSSQKDTKNAGTLLVSLRNEALFPKGSTKDKNNIISFVDRRVGLEMAENARERWKRREISNFEYLVILNTLAGRSYNDLTQYPIFPWVLADYTSEKLDFNKSSTFRDLSKPVGALDENRFKVFEDRYLSFCDPDIPSFYYGSHYSSMGIVLHYMLRLEPFTTLHLNFQIVCSKALRALT

SEQ ID NO: 185216 - protein, 1227 aa, Zea Mays
MNVPAAEKVAVVSGGGGIGTALGIKVNRFAEKATTSREEIIPRIFFHLVILYLCKAGLENASKCVIQFMSLLPILLISEDDQSKNKLHFLIWSLLIVRSQYGQLDDSARFHVFSHLILETIIYGKSMLVTNILERDDSVDVNNKETGFILSFIQKNRVLAAAANEVKHMKAVQADRLKKLQDLRMKLNECSATEIKLAQAIEDEIHLTITAVLSADDNRKTACQLAFREDQQIIRDKWIHISRALMDERGPWSANPFPNDVVTHWKLDKTEDRWRRRFKFKRNYKFDERLCQPSQSRNESTATLADQLYISAKITQKMKQFLVKGVRGITEDSSYEQFEDTNDASESSQSNPSESQNLNNAADTSDHHASAHYKKEPSSTNGDNDYTKVLCSVRCVFVTPKRKLAGQLDITRTVMHFSFEFLVEGTGGSSVFSKFKDKKDSDCKNELGGVDRLDGCRDSMIETNGVLMQNQSNKIKRHKRWNITKIKGVHWTRYLLQYTAMEIFFDDSTAPIFLNFSSQKDTKNAGTLLVSLRNEALFPKGSTKDKNNIISFVDRRVGLEMAENARERWKRREISNFEYLVILNTLAGRSYNDLTQYPIFPWVLADYTSEKLDFNKSSTFRDLSKPVGALDENRFKVFEDRYLSFCDPDIPSFYYGSHYSSMGIVLHYMLRLEPFTTLHLNFQGGKFDHADRLFQSIESAYINSLSNTSDVKELIPEFFYMPEFLENSNSYHLGVKQDGEPIGDVALPPWAKGSPEEFIHINREALESEYVSSNLHNWIDLIFGYKQRGQPAVEAANIFYYVTYEGAVDLENMDDMLHKSAIEDQIANFGQTPIQIFRTKHPRRGPPIPIAHPLYFAPQSLTLTSSVCSTASHMCAILFISLLENTVVLMNEGLILSVKLWLTTHLQSGGNFTYSGPQEHSFGIGSDVISPRKIGTFLAENVKFGRQFLATMQNSRDNYLILCGNWENSFQIISLSDGRIMQSIRQHKDVVSCVAVSSDGNVVATGSYDTTVMIWHAFRGRPIDKKIRGANFELSEKEQVIVERPVHILCGHDDIITCLFVSTELDIVISGSKDGTCIFHTLREGRYVRSIQHPSGVGLSKLVASQHGRVVLYSENDLSLHMYSINGRHIASSATLGRLNCIELSCSGDFIVCAGELGQIVLRSMHSLGIVWRYDGNGKTITSLAVTPEECILAGTKNGSLLVFSTETSLLRRGSMQRNKIKPSTSG

SEQ ID NO: 185217 - protein, 605 aa, Zea Mays
MPSSVLSSDSMHIGLLAAAAHAASTNSRFTIFYNPRASPSEFVIPLAKYVKAVYHTRISVGMRFRMLFETEESSVRRYMGTITGISDLDSVRWPNSHWRSVKVGWDESTAGDRQPRVSLWEIEPLTTFPTYTSPFPLRLKRPWPTGLPSLHGGKDDDLANSLMWLRDTTNPGFQSLNFGGLGMNSWMQPRLDTSLLGLQPDMYQAMATGAFQDPTKQASPTMLQFQQPQNIAGRAAPLSSQILQQAHPQFQQQPYIQNISESTIQAQGQSEFLKQQIQRSQSFNEQKPQLQPQQESQQQQQSQCLQAPQHQQIQQNIANYQSVSNALSAFSQLSSASQSTPMALQTILPFSQAQSFTDTSASSLSPSNTNTMQNTLRPFSSEAVSHLSMPRPTAIPVPDAWSSKRAAVESLLPSRPQDSSQMQQLDSTPASIPHSSALAPLPGRGCLVDQDANPDPQNHLLFGVSIDSQSLLMEGGIHGLQNGNDSTAIPYSTSNFLSPSQNDFPLDHTLNSSGCLDDSGYVPPCSDNSDQVNRPPATFVKVYKSGTYGRSLDITRFSSYHELRRELGRLFGLEGQLEDPLRSGWQLVFVDREEDVLLVGDDPWQ

SEQ ID NO: 185218 - protein, 860 aa, Zea Mays
MSPVHSPMISRSIRNLQIAVLSYQNKTNTSAVTDVEEHKCLNSELWHACAGPLVSLPAVGSRVVYFPQGHSEQVAASTNKEMESQIPSYPNLPPQLICQLHNVTMQADAETEEVYAQMTLQPLNPQELKDPYLPAELGLVSKQPTNYFCKTLTASDTSTHGGFSVPRRAAEKVFPPLDFTQQPPCQELMATDLHGNEWKFRHIFRGQPKRHLLTTGWSVFVSAKRLVAGDSVLFIWNDNNQLLLGIRRANRPQTVMPSSVLSSDSMHIGLLAAAAHAASTNSRFTIFYNPRASPSEFVIPLAKYVKAVYHTRISVGMRFRMLFETEESSVRRYMGTITGISDLDSVRWPNSHWRSVKVGWDESTAGDRQPRVSLWEIEPLTTFPTYTSPFPLRLKRPWPTGLPSLHGGKDDDLANSLMWLRDTTNPGFQSLNFGGLGMNSWMQPRLDTSLLGLQPDMYQAMATGAFQDPTKQASPTMLQFQQPQNIAGRAAPLSSQILQQAHPQFQQQPYIQNISESTIQAQGQSEFLKQQIQRSQSFNEQKPQLQPQQESQQQQQSQCLQAPQHQQIQQNIANYQSVSNALSAFSQLSSASQSTPMALQTILPFSQAQSFTDTSASSLSPSNTNTMQNTLRPFSSEAVSHLSMPRPTAIPVPDAWSSKRAAVESLLPSRPQDSSQMQQLDSTPASIPHSSALAPLPGRGCLVDQDANPDPQNHLLFGVSIDSQSLLMEGGIHGLQNGNDSTAIPYSTSNFLSPSQNDFPLDHTLNSSGCLDDSGYVPPCSDNSDQVNRPPATFVKVYKSGTYGRSLDITRFSSYHELRRELGRLFGLEGQLEDPLRSGWQLVFVDREEDVLLVGDDPWQ

SEQ ID NO: 185219 - protein, 859 aa, Zea Mays
MSPVHSPMISRSIRNLQIAVLSYQNKTNTSAVTDVEEHKCLNSELWHACAGPLVSLPAVGSRVVYFPQGHSEQVAASTNKEMESQIPSYPNLPPQLICQLHNVTMQADAETEEVYAQMTLQPLNPQELKDPYLPAELGLVSKQPTNYFCKTLTASDTSTHGGFSVPRRAAEKVFPPLDFTQQPPCQELMATDLHGNEWKFRHIFRQPKRHLLTTGWSVFVSAKRLVAGDSVLFIWNDNNQLLLGIRRANRPQTVMPSSVLSSDSMHIGLLAAAAHAASTNSRFTIFYNPRASPSEFVIPLAKYVKAVYHTRISVGMRFRMLFETEESSVRRYMGTITGISDLDSVRWPNSHWRSVKVGWDESTAGDRQPRVSLWEIEPLTTFPTYTSPFPLRLKRPWPTGLPSLHGGKDDDLANSLMWLRDTTNPGFQSLNFGGLGMNSWMQPRLDTSLLGLQPDMYQAMATGAFQDPTKQASPTMLQFQQPQNIAGRAAPLSSQILQQAHPQFQQQPYIQNISESTIQAQGQSEFLKQQIQRSQSFNEQKPQLQPQQESQQQQQSQCLQAPQHQQIQQNIANYQSVSNALSAFSQLSSASQSTPMALQTILPFSQAQSFTDTSASSLSPSNTNTMQNTLRPFSSEAVSHLSMPRPTAIPVPDAWSSKRAAVESLLPSRPQDSSQMQQLDSTPASIPHSSALAPLPGRGCLVDQDANPDPQNHLLFGVSIDSQSLLMEGGIHGLQNGNDSTAIPYSTSNFLSPSQNDFPLDHTLNSSGCLDDSGYVPPCSDNSDQVNRPPATFVKVYKSGTYGRSLDITRFSSYHELRRELGRLFGLEGQLEDPLRSGWQLVFVDREEDVLLVGDDPWQ

SEQ ID NO: 185220 - protein, 665 aa, Zea Mays
MAMSGNSVTYFVPKRHLLTTGWSVFVSAKRLVAGDSVLFIWNDNNQLLLGIRRANRPQTVMPSSVLSSDSMHIGLLAAAAHAASTNSRFTIFYNPRASPSEFVIPLAKYVKAVYHTRISVGMRFRMLFETEESSVRRYMGTITGISDLDSVRWPNSHWRSVKVGWDESTAGDRQPRVSLWEIEPLTTFPTYTSPFPLRLKRPWPTGLPSLHGGKDDDLANSLMWLRDTTNPGFQSLNFGGLGMNSWMQPRLDTSLLGLQPDMYQAMATGAFQDPTKQASPTMLQFQQPQNIAGRAAPLSSQILQQAHPQFQQQPYIQNISESTIQAQGQSEFLKQQIQRSQSFNEQKPQLQPQQESQQQQQSQCLQAPQHQQIQQNIANYQSVSNALSAFSQLSSASQSTPMALQTILPFSQAQSFTDTSASSLSPSNTNTMQNTLRPFSSEAVSHLSMPRPTAIPVPDAWSSKRAAVESLLPSRPQDSSQMQQLDSTPASIPHSSALAPLPGRGCLVDQDANPDPQNHLLFGVSIDSQSLLMEGGIHGLQNGNDSTAIPYSTSNFLSPSQNDFPLDHTLNSSGCLDDSGYVPPCSDNSDQVNRPPATFVKVYKSGTYGRSLDITRFSSYHELRRELGRLFGLEGQLEDPLRSGWQLVFVDREEDVLLVGDDPWQ

SEQ ID NO: 185221 - protein, 844 aa, Zea Mays
MISRSIRNLQIAVLSYQNKTNTSAVTDVEEHKCLNSELWHACAGPLVSLPAVGSRVVYFPQGHSEQVAASTNKEMESQIPSYPNLPPQLICQLHNVTMQADAETEEVYAQMTLQPLNPQELKDPYLPAELGLVSKQPTNYFCKTLTASDTSTHGGFSVPRRAAEKVFPPLELMATDLHGNEWKFRHIFRGQPKRHLLTTGWSVFVSAKRLVAGDSVLFIWNDNNQLLLGIRRANRPQTVMPSSVLSSDSMHIGLLAAAAHAASTNSRFTIFYNPRASPSEFVIPLAKYVKAVYHTRISVGMRFRMLFETEESSVRRYMGTITGISDLDSVRWPNSHWRSVKVGWDESTAGDRQPRVSLWEIEPLTTFPTYTSPFPLRLKRPWPTGLPSLHGGKDDDLANSLMWLRDTTNPGFQSLNFGGLGMNSWMQPRLDTSLLGLQPDMYQAMATGAFQDPTKQASPTMLQFQQPQNIAGRAAPLSSQILQQAHPQFQQQPYIQNISESTIQAQGQSEFLKQQIQRSQSFNEQKPQLQPQQESQQQQQSQCLQAPQHQQIQQNIANYQSVSNALSAFSQLSSASQSTPMALQTILPFSQAQSFTDTSASSLSPSNTNTMQNTLRPFSSEAVSHLSMPRPTAIPVPDAWSSKRAAVESLLPSRPQDSSQMQQLDSTPASIPHSSALAPLPGRGCLVDQDANPDPQNHLLFGVSIDSQSLLMEGGIHGLQNGNDSTAIPYSTSNFLSPSQNDFPLDHTLNSSGCLDDSGYVPPCSDNSDQVNRPPATFVKVYKSGTYGRSLDITRFSSYHELRRELGRLFGLEGQLEDPLRSGWQLVFVDREEDVLLVGDDPWQ

SEQ ID NO: 185222 - protein, 779 aa, Zea Mays
MESQIPSYPNLPPQLICQLHNVTMQADAETEEVYAQMTLQPLNPQELKDPYLPAELGLVSKQPTNYFCKTLTASDTSTHGGFSVPRRAAEKVFPPLDFTQQPPCQELMATDLHGNEWKFRHIFRGQPKRHLLTTGWSVFVSAKRLVAGDSVLFIWNDNNQLLLGIRRANRPQTVMPSSVLSSDSMHIGLLAAAAHAASTNSRFTIFYNPRASPSEFVIPLAKYVKAVYHTRISVGMRFRMLFETEESSVRRYMGTITGISDLDSVRWPNSHWRSVKVGWDESTAGDRQPRVSLWEIEPLTTFPTYTSPFPLRLKRPWPTGLPSLHGGKDDDLANSLMWLRDTTNPGFQSLNFGGLGMNSWMQPRLDTSLLGLQPDMYQAMATGAFQDPTKQASPTMLQFQQPQNIAGRAAPLSSQILQQAHPQFQQQPYIQNISESTIQAQGQSEFLKQQIQRSQSFNEQKPQLQPQQESQQQQQSQCLQAPQHQQIQQNIANYQSVSNALSAFSQLSSASQSTPMALQTILPFSQAQSFTDTSASSLSPSNTNTMQNTLRPFSSEAVSHLSMPRPTAIPVPDAWSSKRAAVESLLPSRPQDSSQMQQLDSTPASIPHSSALAPLPGRGCLVDQDANPDPQNHLLFGVSIDSQSLLMEGGIHGLQNGNDSTAIPYSTSNFLSPSQNDFPLDHTLNSSGCLDDSGYVPPCSDNSDQVNRPPATFVKVYKSGTYGRSLDITRFSSYHELRRELGRLFGLEGQLEDPLRSGWQLVFVDREEDVLLVGDDPWQ

SEQ ID NO: 185223 - protein, 268 aa, Zea Mays
MSCFSHLFKRKRGPQQQDDPSDNYFTGSENITRFSYRELVRATSNFDQGNKIGEGGYGPVYKGTLKDGTLIAVKVLSLHSRQGAKEFLNELLAISDVTHENLVKLYGCCVEGNHRILVYNYLENNSLAHTLLDSRHSNIQFNWRTRVNICIGVAQGLAFLHGSVSPHIVHRDIKASNILLDKDMTPKISDFGLAKLLPPDVSHVSTRVAGTLGYLAPEYAIRGHVTRKADVYSYGVLLIEIVSGRCNTDTKLPYDDQILLEKASLHTL

SEQ ID NO: 185224 - protein, 841 aa, Zea Mays
MESTTARALLYFCCLALYLCRRAPPCLWAEAAAGGYAARAAAVDEGGARLRAQLAAIAAAGDDDVRNLDVYASLETDSRLHVRITDADHRRWEVPQSVIPREAPRDDVPLEASTGASPPHSRVLSAATSDLAFTLHASPFRFTVSRRSSGDALFDTSAALVFKDRYLELTTALPPEGGASLYGLGEHTKRTFRLQRNDTFTMWNADIPAANADVNLYGSHPFYLDVYFFAGPSPLDVVDQYTQLIGRPAPMPYWSFGFHQCRYGYKNLADLEGVVAGYAKARIPLEVMWTDIDYMDAFKDFTLDPVNFPAGPMRQFVDRLHRNGQKYVVIIDPGISVNETYGTYVRGMQQDVFLKRNGTNYLGKVWPGYVYFPDFLNPRAAEFWAREIALFRRTLPVDGLWIDMNEVSNFVDPAPLNALDDPPYRINNSGVHRPINNKTTPASAVHYGGVRDYDAHNLYGFLEARATHGALLADTGRRPFVLSRSTFVGSGRYTAHWTGDNAATWDDLRYSINTMLSFGLFGIPMVGADICGFGGNTTEELCSRWIQLGAFYPFARDHSAIGTVRRELYLWELVARSARKALGLRYRLLPYMYTLMYEAHTTGAPIARPLFFSYPKDEATYGVDRQFLLGRGVLVSPVLEPGATTVEAYFPAGRWFSLFDHEVVVASATGKHVTLPGPADTVNVHVAGGNILPLQLPELTTSRARQTAFHLLVALAEDGSASGELFLDGGDLPEMAGPRGEWSLVRFSCTQGRDGVKLMSHVVHDAYGPSRKLVIGKVMFLGLPSLAPPGEFAVYVNGVKMANSTGATLGYQRRGALGAAQVEGLSLVVVEEFELKVVTSS

SEQ ID NO: 185225 - protein, 107 aa, Zea Mays
MAWPWSPPPRQTARFVVVVVVAVVLLFAAAPWPRAAAQAGYHVVSVSGTGGQLSARLELTGAGQKAELGPDVRRLSLTARGDSVDVLKTTKRCSSARLLDSPGTSIL

SEQ ID NO: 185226 - protein, 880 aa, Zea Mays
MAWPWSPPPRQTARFVVVVVVAVVLLFAAAPWPRAAAQAGYHVVSVSGTGGQLSARLELTGAGQKAELGPDVRRLSLTASLETDSRLHVRITDADHRRWEVPQSVIPREAPRDDVPLEASTGASPPHSRVLSAATSDLAFTLHASPFRFTVSRRSSGDALFDTSAALVFKDRYLELTTALPPEGGASLYGLGEHTKRTFRLQRNDTFTMWNADIPAANADVNLYGSHPFYLDVRHAGAAHGVLLLNSNGMDVEYGGSYLTYKVIGGVLDLYFFAGPSPLDVVDQYTQLIGRPAPMPYWSFGFHQCRYGYKNLADLEGVVAGYAKARIPLEVMWTDIDYMDAFKDFTLDPVNFPAGPMRQFVDRLHRNGQKYVVIIDPGISVNETYGTYVRGMQQDVFLKRNGTNYLGKVWPGYVYFPDFLNPRAAEFWAREIALFRRTLPVDGLWIDMNEVSNFVDPAPLNALDDPPYRINNSGVHRPINNKTTPASAVHYGGVRDYDAHNLYGFLEARATHGALLADTGRRPFVLSRSTFVGSGRYTAHWTGDNAATWDDLRYSINTMLSFGLFGIPMVGADICGFGGNTTEELCSRWIQVQAFHALQDQHAMSTDMYELSFRCLLVKLGAFYPFARDHSAIGTVRRELYLWELVARSARKALGLRYRLLPYMYTLMYEAHTTGAPIARPLFFSYPKDEATYGVDRQFLLGRGVLVSPVLEPGATTVEAYFPAGRWFSLFDHEVVVASATGKHVTLPGPADTVNVHVAGGNILPLQLPELTTSRARQTAFHLLVALAEDGSASGELFLDGGDLPEMAGPRGEWSLVRFSCTQGRDGVKLMSHVVHDAYGPSRKLVIGKNQLSKRTNRLVDESKGALQEVDRSGRLFPSV

SEQ ID NO: 185227 - protein, 84 aa, Zea Mays
MRVPSSALGAIRLLGHEGSLRRCSYRSCGQRGRTIATQPTSRRHISGSSPKGKNQLSKRTNRLVDESKGALQEVDRSGRLFPSV

SEQ ID NO: 185228 - protein, 60 aa, Zea Mays
MRATGKDDSYAAHITKAYKWEFAEREGLQLVVLNPGTTLGPFFMSSVNTSLNNLLQHLRG

SEQ ID NO: 185229 - protein, 101 aa, Zea Mays
MDHGRRVGCWGAGLHCNGQRDYVRGMRSLTNGAVEWTCCLLPERIPQERSGDKWRRSCMPVWNARNGQTVPDVSELTVSGLGTAGEERHLIEMLILDPSDD

SEQ ID NO: 185230 - protein, 64 aa, Zea Mays
MLGRQPHKKGRRRRDMAEKEAPRSFLARLPPLDRSADIGNEEKQRCVVITHHADPVLTAPLLIQ

SEQ ID NO: 185231 - protein, 68 aa, Zea Mays
MLGRQPHKKGRRRRDMAEKEAPRSFLARLPPLDRSADIGNEEKQRCVVITHHADPVLTAPLLIQYRMA

SEQ ID NO: 185232 - protein, 123 aa, Zea Mays
MLGRQPHKKGRRRRDMAEKEAPRSFLARLPPLDRSADIGNEEKQRCVVITHHADPVLTAPLLIQYEIRLPPLPQSFVSYCAILICTDFFFVVWLTYLTPLSPRHVSSSYTPNTTLQRYINLDR

SEQ ID NO: 185233 - protein, 72 aa, Zea Mays
MLGRQPHKKGRRRRDMAEKEAPRSFLARLPPLDRSADIGNEEKQRCVVITHHADPVLTAPLLIQLLSSNDKK

SEQ ID NO: 185234 - protein, 75 aa, Zea Mays
MLGRQPHKKGRRRRDMAEKEAPRSFLARLPPLDRSADIGNEEKQRCVVITHHADPVLTAPLLIQMTKLKNDEAEV

SEQ ID NO: 185235 - protein, 68 aa, Zea Mays
MLGRQPHKKGRRRRDMAEKEAPRSFLARLPPLDRSADIGNEEKQRCVVITHHADPVLTAPLLIQERFG

SEQ ID NO: 185236 - protein, 53 aa, Zea Mays
MAEKEAPRSFLARLPPLDRSADIGNEEKQRCVVITHHADPVLTAPLLIQYRMA

SEQ ID NO: 185237 - protein, 60 aa, Zea Mays
MAEKEAPRSFLARLPPLDRSADIGNEEKQRCVVITHHADPVLTAPLLIQMTKLKNDEAEV

SEQ ID NO: 185238 - protein, 57 aa, Zea Mays
MAEKEAPRSFLARLPPLDRSADIGNEEKQRCVVITHHADPVLTAPLLIQLLSSNDKK

SEQ ID NO: 185239 - protein, 536 aa, Zea Mays
MVKSGYFSEDEKKLIRFGGEETTPKPEKDEIVIFKSFLKAGLRFPLNRMIADVLQKFGIYFHQLTPNAIVRLSVYIWALRSQAVEPFAEGFCRVHELHYQTKDRKDGLHENFGCYNFAYRKTTKFPIISYQSKWLAGWKSEWFYVKVDDDKEKLVQSPLELIFGETRPQCNMTPEGPTQKALAEFRNIAEHIGTRDLVQEFLAFRVFPTMKEWTMPKPTGEKKEGELVHLPYHYKFKKYFKAPCQEWLDTIEIMSTEILGNYSKKEDQLMTAAFGTRPKRRLNRVLDAIGFEYSDYGRLDGDADGPKRKRIASAVDEESTKVAKKKKEISEKLSPEKLSPEPKVAAARKRKTASPEPKTLVREEDTPTTPSTADVEEIMKVMTEPLPVKLSPLAPELTKFFQKDKAASAEEGPTLRKKRRIIQIADVIHQTPPPTTVSKVAFVETAEAKGAAAEATRVETPEAETGAAEATGAETGATEDLNLEDTLEVIDNILLKMAEEEAVVVTVSTATEKGKNKLKRLWKKKILTFKIYLGKN

SEQ ID NO: 185240 - protein, 358 aa, Zea Mays
MPPRPSLHSLLLMAASAAAASGDSGPLLAARRRLAATAAAGGHRIRLLHSFSPGRVPRRPEVVCCVRSAPDSRRSAPAPPCSRNVLSAKNYSTASEERLGKIIQKLKNEGINPKQWRLGNFQRMLCPQCNGGSSEELSLSVYIRKDGINATWNCFRSKCGWRGFVQADGVTNISQGKSGIESETDQEVEAKKAANKVYRKISDEDLNLEPLCDELVEYFATRMISAETLRRNKVMQRNWNNKISIAFTYRRDGALVGCKYRAVDKTFSQEANTEKIFYGLDDIKRAHDVIIVEGEIDKLSMDEAGYRNCVSVPDGAPPKVSSKIPDQEQVRTILYFPMLLKVLVPVIIYICLCTTIGQ

SEQ ID NO: 185241 - protein, 727 aa, Zea Mays
MPPRPSLHSLLLMAASAAAASGDSGPLLAARRRLAATAAAGGHRIRLLHSFSPGRVPRRPEVVCCVRSAPDSRRSAPAPPCSRNVLSAKNYSTASEERLGKIIQKLKNEGINPKQWRLGNFQRMLCPQCNGGSSEELSLSVYIRKDGINATWNCFRSKCGWRGFVQADGVTNISQGKSGIESETDQEVEAKKAANKVYRKISDEDLNLEPLCDELVEYFATRMISAETLRRNKVMQRNWNNKISIAFTYRRDGALVGCKYRAVDKTFSQEANTEKIFYGLDDIKRAHDVIIVEGEIDKLSMDEAGYRNCVSVPDGAPPKVSSKIPDQEQDKKYSYLWNCKDYLDSASRIILATDNDRPGQALAEELARRLGKERCWRVNWPKKNDTDTCKDANEVLMFLGPQALRKVIEDAELYPIRGLFSFEQFFPEIDNYFLGIHGDELGIHTGWKSMDDLYKVVPGELTVVTGVPNSGKSEWIDALLCNINKQSGWKFVLCSMENKVKEHARKLLEKHIQKPFFNARYGGSAQRMTPDEFEAGKQWLNKTFHLIRCEDDSLPSINWVLDLAKAAVLRHGVRGLVIDPYNELDHQRPSNQTETEYVSQILTKIKRFAQHHSCHLQNWNGGPPNIYDISGSAHFINKCDNGIVIHRNRDPNAGPLDTVQVCVRKVRNKVVGQIGDAFLTYDRVTGEFKDAGKATTAPSAKAAKQSRKEAYKMPFQHAAEDGENSGL

SEQ ID NO: 185242 - protein, 343 aa, Zea Mays
MPPRPSLHSLLLMAASAAAASGDSGPLLAARRRLAATAAAGGHRIRLLHSFSPGRVPRRPEVVCCVRSAPDSRRSAPAPPCSRNVLSAKNYSTASEERLGKIIQKLKNEGINPKQWRLGNFQRMLCPQCNGGSSEELSLSVYIRKDGINATWNCFRSKCGWRGFVQADGVTNISQGKSGIESETDQEVEAKKAANKVYRKISDEDLNLEPLCDELVEYFATRMISAETLRRNKVMQRNWNNKISIAFTYRRDGALVGCKYRAVDKTFSQEANTEKIFYGLDDIKRAHDVIIVEGEIDKLSMDEAGYRNCVSVPDGAPPKVSSKIPDQEQITSLTLFWHMGIGI

SEQ ID NO: 185243 - protein, 331 aa, Zea Mays
MFLGPQALRKVIEDAELYPIRGLFSFEQFFPEIDNYFLGIHGDELGIHTGWKSMDDLYKVVPGELTVVTGVPNSGKSEWIDALLCNINKQSGWKFVLCSMENKVKEHARKLLEKHIQKPFFNARYGGSAQRMTPDEFEAGKQWCEDDSLPSINWVLDLAKAAVLRHGVRGLVIDPYNELDHQRPSNQTETEYVSQILTKIKRFAQHHSCHVWFVAHPRQLQNWNGGPPNIYDISGSAHFINKCDNGIVIHRNRDPNAGPLDTVQVCVRKVRNKVVGQIGDAFLTYDRVTGEFKDAGKATTAPSAKAAKQSRKEAYKMPFQHAAEDGENSGL

SEQ ID NO: 185244 - protein, 340 aa, Zea Mays
MFLGPQALRKVIEDAELYPIRGLFSFEQFFPEIDNYFLGIHGDELGIHTGWKSMDDLYKVVPGELTVVTGVPNSGKSEWIDALLCNINKQSGWKFVLCSMENKVKEHARKLLEKHIQKPFFNARYGGSAQRMTPDEFEAGKQWLNKTFHLIRCEDDSLPSINWVLDLAKAAVLRHGVRGLVIDPYNELDHQRPSNQTETEYVSQILTKIKRFAQHHSCHVWFVAHPRQLQNWNGGPPNIYDISGSAHFINKCDNGIVIHRNRDPNAGPLDTVQVCVRKVRNKVVGQIGDAFLTYDRVTGEFKDAGKATTAPSAKAAKQSRKEAYKMPFQHAAEDGENSGL

SEQ ID NO: 185245 - protein, 170 aa, Zea Mays
MPARGQTEGERTELSAARKMEQADRGPSRGSSGARRGAWTGATAGAAMEEERAQQLEAELGRSRLQGRKSAGRAARLEEQGRDAAEQQISPGPSRAQRTGTGASRRARHGRSEGAGASSAGGGCAQGGRPRRGTGGEQTPGCAARREMGARSGEPEAVRRPGRKTDGRQA

SEQ ID NO: 185246 - protein, 53 aa, Zea Mays
MTLYYLSLLSERQIHDFTQTESDTPSWLKHTERGLPTSGYSKLIAHVTGVNVE

SEQ ID NO: 185247 - protein, 113 aa, Zea Mays
MLLLTLLHMSTIPTDPPPHEQVRATREHTTPFRRSFARRVRATLAISPLPVRDCLFMYGIAGFKLTHDEVCGQIKGPRSAGQQSVRSLNDSDGDTTSRLLSRASHPPGLSLII

SEQ ID NO: 185248 - protein, 310 aa, Zea Mays
MGQSKAEFLEQFGGDYGYPDAPRGIDDLRAAEFKRLEGMVYLDHAGATLYSEAQMTDVARDLMSNVYGNPHSQNDPSMATSDIVTSARHQVLKYFNASPKDYKCIFTSGATAALKLVGECFPWSRDSCYMYTMENHNSVLGIREYALSKGATASAVDVQEVIDPSKSHESDSMFKVSKHLNQRRGDDVLLHKYQNGSLAPISGNSLNLFAFPSECNFSGHKFNLSLVKFIKEGKFMDLPSQQQGQWMVLIDAAKGCTTEPPNLTLYSADFVVCSFYKIFGYPTGLGALIVKNEAASLLNKTYFSGEKKKH

SEQ ID NO: 185249 - protein, 537 aa, Zea Mays
MVYLDHAGATLYSEAQMTDVARDLMSNVYGNPHSQNDPSMATSDIVTSARHQVLKYFNASPKDYKCIFTSGATAALKLVGECFPWSRDSCYMYTMENHNSVLGIREYALSKGATASAVDVQEVIDPSKSHESDSMFKVSKHLNQRRGDDVLLHKYQNGSLAPISGNSLNLFAFPSECNFSGHKFNLSLVKFIKEGKFMDLPSQQQGQWMVLIDAAKGCTTEPPNLTLYSADFVVCSFYKIFGYPTGLGALIVKNGTVAASIADIDFVQKRKSIEQALEDGTISFLSISSLRHGFKIINMLTISAIARHTASLATYVRNKMLELKHSNGKNVCMIYGQTSKVNHLKMGPTITFNLKREDDTWFGYREVEKLASLSRIHLRTGCFCNPGACAKYVGLSHSDLVSNFEAGHVCWDGNDVINGKPTGAVRISFGYMSTYEDAEEFLKFLRSSFVSKPVGLNNEYMVNMDTLNLVDDWSQQALSVIRLKSITIYPVKSCQGFSVQSWPLTTGGLKYDREWLLQGLGGEILTQKKVTVLCSER

SEQ ID NO: 185250 - protein, 222 aa, Zea Mays
MHCLTGLEATPKQILQLMGVKGVSICHIKSHLQMYRSSSSSSSSTHNQSSSLQKLTSTTASNSKRVFLSREDHASQADGSTPASDENIYTTMLCGCSHSTPYQIRPSLEGVFRGLEQTRMLATTEKSISRPSHTEKQHTGCDLTLSIGLWAEDASSNDVDGSSSISEELMPAAPAAGARRAAAVKEESEAAALNLDLTISSSYWLALTSDDGARRRTAGWRR

SEQ ID NO: 185251 - protein, 180 aa, Zea Mays
MSANMLLALSNQHPTLFLIYSFPWNKNPIRCLLPCCDARLLEASLPTASSIFGSLLCTASCSSISHGAQPSSPWRLPPHAQPSLLVAAAPSPLVAYGCLLCSIRGAIVGSRPAPSRPPARQQPSSMDGDFLSCSKKPCRSPLSQFPLTAMDIGCSFPPMAAPTPSMDANSSSPSLPDILR

SEQ ID NO: 185252 - protein, 102 aa, Zea Mays
MLGAKITVFHRTPFIKFRLWPCLIRIIGHDLFDSLLIIILTGRVSLYIVTLAQSICLARDVLLVTSGNGVMTKTDGAAMKPRASCECTHMVVLLGTRWYHGE

SEQ ID NO: 185253 - protein, 209 aa, Zea Mays
MERDGFLSDILLNGHDGGVTGMQDLNIPSTQDINYEVEQADVEVMPSRGTKGSKRTKNFNSTEDEVVCSGWLNISKDPIHGANQSRPTFWSRVHAFFEEHMQEHIKDKVPRTQSSVMHRWLTIQTQVNKFCSCYDAILRRNQSGSTIHDKDEDKWKAKRLELAELEKQPNKKKQKSTKMSRPRDDEATNNEEVPEDVAPQTESKKGHRG

SEQ ID NO: 185254 - protein, 334 aa, Zea Mays
MEHDGTTNLAVTEAVRSVQLLKIDGYCATATMGASEFIKFRWHIDGHEWERDDDKVRVNLSCRLVCPSPTSQRPHLDTCWSEEKRVSHVFASDSKCSPELLLILKHELPSSGYLVDDSLTVECTVTVLRDLDAATDKALSSLPVPPPSDLHQHLGDLLQSEDGADVTFRVSGESFAAHRAILAARSPVFKAEFFGGMEERSSASVEVKGMEAAVFRSMLRFIYTDTAPELDGAQDQEPEAAVAMAQHLLVAADRLKLMCECKLSGGIDIGTAAATLALAEQHNCSLLKAKCLEFVTRSPETLDAILATDGYEHLVASCPSVLAELLRAARGRKI

SEQ ID NO: 185255 - protein, 119 aa, Zea Mays
MKTGDLAARMALWAANDFPETRNVTSAPFLLCNSSSKCWCRSEGGGSGTGRDSTLAVASKSRSTVTVHSTVSESFTRCWCRSERSGCGCGTGRGGSFTEASKPRSSVSVHSTVSESSTR

SEQ ID NO: 185256 - protein, 61 aa, Zea Mays
MAVRSCPGSSKPIYVSVGHRISLDSATAIVKSCCRYRVPEPTRQADIRSKVFLQKLQKPRQ

SEQ ID NO: 185257 - protein, 116 aa, Zea Mays
MVDGNGLLHPRGFGLACHLGVLADIPTVGVGKNLHHVDGLNQSEVRRLLGSKENCNRELVLLTGQSGTKWGMAVRSCPGSSKPIYVSVGHRISLDSATAIVKSCCRYRVPEPTRRI

SEQ ID NO: 185258 - protein, 314 aa, Zea Mays
MSTWLVEASKSTFFGVCLNMPWSTRMKIALGAARGLEYLHRAERSIIYRDFKTSNILLDADYNAKLSDFGLARTGPSGDQTHVSTRVMGTYGYAAPEYVMTGHLTARSDVYGFGVVLLEMIIGRRAVDDSRPSREHNLVDWARPLLVHNRKLFRIIDPRMEGQYSTKAATEVASLAYRCLSQNPKGRPTMSQVVETFEAVQNMPECQDILLQNGITGAVTLYEVPKEPADRVELEKAKQEPAVKTAAIPPVNGKPAPQSRRTRPGNGRSKSEPSLECKMYIPSPDSDEQQLGLEALASPNGSMKDHPDEDLYKI

SEQ ID NO: 185259 - protein, 71 aa, Zea Mays
MLTCSACGAEGEYYSSLAAMNSHSLWCAAARKKAEANTKKAAAAAHRKPHREKKAKKNGGTWKSGNPKYGK

SEQ ID NO: 185260 - protein, 175 aa, Zea Mays
MVDPHKNTFWTVDSLRNDNNKSEAHDDSNREILNGVTLQLDHRASNELLPRSMATNVPQLPTQSCHIPPMMSVRDYFPACPDINIPSVRGRSVHPINISSVSHTIEAFEIGERFTCQKASPCRGWKVVKMAMASSSSESGYRLIALFKFLAYLPRTVHHLLLNSCEILYRKRHYL

SEQ ID NO: 185261 - protein, 295 aa, Zea Mays
MPMPMSKNPKIALMFLTPGSLPFEKLWETFLQGHEGRYSIYVHASREKPVHTSSLFAGRDIHSDAIVWGLISMVDAEKRLLANALEDVDNQVFVLLSDSCVPLHSFDYVYNYLMGTNVSFIDCFKDPGPHGSGRYPIEMYPEIDESDFRKGAQWFAVTRRHALMILADSLYYKKFKLYCKPAEGRNCIADEHYLPTLFNMVDPGGISNWSVTHVDWSEGKWHPRSYSADDVTYDLLKNITTTDENFHVTSDDKKLVMQKPCLWNGSKRPCYLFARKFNPEALDNLLKLFTSYTSV

SEQ ID NO: 185262 - protein, 223 aa, Zea Mays
MTVMMPQRHRATAKKPMWIIVLLSMVCIMLIGAYVFPPRRFSKCYLSASSVCTSFKDWLPSMGHRERADEEIISSVVIRDILSMPMPMSKNPKIALMFLTPGSLPFEKLWETFLQGHEGRYSIYVHASREKPVHTSSLFAGRDIHSDAIVWGLISMVDAEKRLLANALEDVDNQVFVLLSDSCVPLHSFDYVYNYLMGTNVSFIDWIQVHMAVEGTLLRCILK

SEQ ID NO: 185263 - protein, 242 aa, Zea Mays
MTVMMPQRHRATAKKPMWIIVLLSMVCIMLIGAYVFPPRRFSKCYLSASSVCTSFKDWLPSMGHRERADEEIISSVVIRDILSMPMPMSKNPKIALMFLTPGSLPFEKLWETFLQGHEGRYSIYVHASREKPVHTSSLFAGRDIHSDAIVWGLISMVDAEKRLLANALEDVDNQVFVLLSDSCVPLHSFDYVYNYLMGTNVSFIDCFKDPGPHGSGRYPIEMYPEIDESDFRKGAQLRGDML

SEQ ID NO: 185264 - protein, 272 aa, Zea Mays
MSHSSLYTVGHEGRYSIYVHASREKPVHTSSLFAGRDIHSDAIVWGLISMVDAEKRLLANALEDVDNQVFVLLSDSCVPLHSFDYVYNYLMGTNVSFIDCFKDPGPHGSGRYPIEMYPEIDESDFRKGAQWFAVTRRHALMILADSLYYKKFKLYCKPAEGRNCIADEHYLPTLFNMVDPGGISNWSVTHVDWSEGKWHPRSYSADDVTYDLLKNITTTDENFHVTSDDKKLVMQKPCLWNGSKRPCYLFARKFNPEALDNLLKLFTSYTSV

SEQ ID NO: 185265 - protein, 174 aa, Zea Mays
MLASLIGPHGSGRYPIEMYPEIDESDFRKGAQWFAVTRRHALMILADSLYYKKFKLYCKPAEGRNCIADEHYLPTLFNMVDPGGISNWSVTHVDWSEGKWHPRSYSADDVTYDLLKNITTTDENFHVTSDDKKLVMQKPCLWNGSKRPCYLFARKFNPEALDNLLKLFTSYTSV

SEQ ID NO: 185266 - protein, 96 aa, Zea Mays
MVDPGGISNWSVTHVDWSEGKWHPRSYSADDVTYDLLKNITTTDENFHVTSDDKKLVMQKPCLWNGSKRPCYLFARKFNPEALDNLLKLFTSYTSV

SEQ ID NO: 185267 - protein, 496 aa, Zea Mays
MLHRLAHTRVCHFFIIPTPRAFSNAPAATPPAAPPLSAADLEQLLRRCHYSASSHRFHSLLPLLSHPSVLLSCALHLSHRAHPSLPVPPQPPPITIAAAAAAFSSPSSHLRLLLPSRIKGQPLPVPTLPLRLALRCAASVLDAVFAPRAATFAYRGRHTAVRYLKSIPSASWFFRVAIPRQPFAPRHVCRLLGAISSKVDDPGFLEFLNELFVSDAVAFELGGCELGRGLPQESELTSTLVNIFFNRVDGEIMALREEVHKKHPRMKDDSVRHTPVRVYAIRYLDDILVVTSGSKMLTIEIRNRIIAVLERDLEVRVDRLGSSIHSAVSEKIEFLGIEFQAVPPSVLHPPMSEKAKRARKKYLKMKAEKAQELKNARETRRKKLGLKILNHLSKRMRRGEEFEFDFRIEKEVQQVFRDWAEETVAEYFESREHCRYWHRLLASGHDLTEEEEILAEEEEEEQYEKRIVEDLTELKMRANVPIDLVRKEISSNGMLA

SEQ ID NO: 185268 - protein, 116 aa, Zea Mays
MLSTDSAAKHRNELLSSRDENGFGIFRNSGNQFRNFSIGFTGNGIFRKRNRFSEFSTGIGIGIGVVFYRPFPSVTGFLSEITGFVSRKFPELCLRIFSEFFRNFTVCDFFASPVHF

SEQ ID NO: 185269 - protein, 814 aa, Zea Mays
MKSLDLADKLSCGGEANSKKTSGFGRISLVPACKKISKGQVLFPYDEFLKLYNWKDLDVVPCGLMNCGNSCFANVVLQCLSCTRPLVAYLLGKDHSRECSVRHEDWCFLCELQCHIQRASGSLHPFAPTNILSHLPNIGGNLGVGRQEDAHEFMRFAIDKMQSACLDEYGGEKAVDLSIQETTIIQHIFGGRLQSQVQCTTCGMVSNRYDNMMDLTVEIQGDAESLERCLDQFTAVEWLDGDNKYKCDGCNDYVKARKHLSVQQAPNILTITLKRFQTGRFGKLNKRVTFPMELDLTPYMSCTDGSDLYDLYAVVVHLDMLNASFFGHYICYIKGYQGRWYKIDDCKVMVVDEEEVHAQGAYMLLYSRRTARPRSLLTVDESVKQQQQCKSLLSNGQSHMILADTTLNCESSLKIPEDMLQQDCESNNESLHEMGIKDQESDMDLRTSIEDDKFISNGNLRLPGSLVSHVLEDTRAPDSVLEGSVQLGPPLEGGPTTMSSVQFGNCTSEASSEHSFAEQCEVPASCIDSVDYMDVDTEAGAEVERCDEQRPVLNDSVGRPNNNTATPTANGVPGEPKPSFSSGFFDKPSRKRSSFTEEASAGSPRKLNGYCNGHISSLEQEVLCNSGSEKCNGDAPVTSSNGKFCAANVDMQSIDDSLHEDKRDVPSVSHGFEPRPYKLQSDSNNNCGRTCNGKPKACQGDMSFLPRGFLGRPSSRGISVKADDSLPFSTDASSSFGNGNSKSSNNSSSMGGLSPGFLTRHRRESTVIGTSSDIPMDKKSNGATVVPDHAEKKVSDCTTNGSSFQIRAASDHLD

SEQ ID NO: 185270 - protein, 850 aa, Zea Mays
MIVCTPHQTISNPFSKSSQECQTKHWQIDHKFKCKQMKSLDLADKLSCGGEANSKKTSGFGRISLVPACKKISKGQVLFPYDEFLKLYNWKDLDVVPCGLMNCGNSCFANVVLQCLSCTRPLVAYLLGKDHSRECSVRHEDWCFLCELQCHIQRASGSLHPFAPTNILSHLPNIGGNLGVGRQEDAHEFMRFAIDKMQSACLDEYGGEKAVDLSIQETTIIQHIFGGRLQSQVQCTTCGMVSNRYDNMMDLTVEIQGDAESLERCLDQFTAVEWLDGDNKYKCDGCNDYVKARKHLSVQQAPNILTITLKRFQTGRFGKLNKRVTFPMELDLTPYMSCTDGSDLYDLYAVVVHLDMLNASFFGHYICYIKGYQGRWYKIDDCKVMVVDEEEVHAQGAYMLLYSRRTARPRSLLTVDESVKQQQQCKSLLSNGQSHMILADTTLNCESSLKIPEDMLQQDCESNNESLHEMGIKDQESDMDLRTSIEDDKFISNGNLRLPGSLVSHVLEDTRAPDSVLEGSVQLGPPLEGGPTTMSSVQFGNCTSEASSEHSFAEQCEVPASCIDSVDYMDVDTEAGAEVERCDEQRPVLNDSVGRPNNNTATPTANGVPGEPKPSFSSGFFDKPSRKRSSFTEEASAGSPRKLNGYCNGHISSLEQEVLCNSGSEKCNGDAPVTSSNGKFCAANVDMQSIDDSLHEDKRDVPSVSHGFEPRPYKLQSDSNNNCGRTCNGKPKACQGDMSFLPRGFLGRPSSRGISVKADDSLPFSTDASSSFGNGNSKSSNNSSSMGGLSPGFLTRHRRESTVIGTSSDIPMDKKSNGATVVPDHAEKKVSDCTTNGSSFQIRAASDHLD

SEQ ID NO: 185271 - protein, 347 aa, Zea Mays
MVAMIMLRTLYRDISKYNQLEDQEEAQEESGWKLLHGDVFRPPANADLLCVYVGTGVQFFGMLLVTLLIAILGLLSPSNRGGFMTAMILLWVFMGLLAGYSIARLHKMFGGLEWEKVAIKTVLVFPGVVFVIFFALNRLLWGVKSSGAVPFTTMLALVFLWLGISMPLIFVGSYLGFRKPAIQGPVRTNKIPRLIPQQPWYMNPAVSVLVGGILPFGAVFMELFFILTTIWMHQFYYIFGFLFLVFVILIVTCAEITIVLCYFQLCSEDYQWWWRSYLTPGSSALYLFLYAAFYFFTKLQITKAVSGVLYFGYMLIAAYAFFVLTGTIGFYACFWFTRLIYSSVKID

SEQ ID NO: 185272 - protein, 109 aa, Zea Mays
MEAASSATDPPPMAARFVSPLPCQNISTAMPSSLHRRRLLLLVVAAAALRGAPLADAGADTCKAWLVQSIPTDMPHLSRIPGVLSTGSSLSLSLSLSRLWGFASLGNGE

SEQ ID NO: 185273 - protein, 98 aa, Zea Mays
MNTMDWLGQSQYATQTVYWSSLSSAISEVVFSKNATVRLLVAYWAHLIPNTEKYLKSLLYSNVLCASSAYNHCGGKVEIKYYVVPGHNETGPALSQGG

SEQ ID NO: 185274 - protein, 84 aa, Zea Mays
MQTRSGKGQGESTVFAKFGSSHGAPHAPFLCKQELASAGARNHPDRHGRRRNRARTRESEKRTPEQARAETARASWNNGYSVQR

SEQ ID NO: 185275 - protein, 234 aa, Zea Mays
MTAADGEACAVVATAADIICSLRGADLAGWTPPWSQRQHEPDPARDGVQAEGGDDARDLAWPAVARGKRSRSRRESPSASGSAASAGATTTATKKKTARRGARGSPASPLDYSGASGSGSGASTSGGEDGAFCSRPDPALPPAAACQQLAAPPPPSKVGGLAGRRTIPAVPVPLPPPRPAGQRARKKMRLPEIQQMVRSLSVENDALRKEMRALQRDCTALSQENGKLELKIRF

SEQ ID NO: 185276 - protein, 87 aa, Zea Mays
MRLPEIQQMVRSLSVENDALRKEMRALQRDCTALSQENGKLETRLHQSITLSEAISVENKGKPRPLQPEQEAPSGFVLPDLNLPADV

SEQ ID NO: 185277 - protein, 559 aa, Zea Mays
MDKFQPCMPKWPRQAAQQGSHGTVRVRQKLARRPRRRLCNPLRPCVSCGVRHDDDRAGGGAHAAEGPPGRAQVLHRRLEHQQQALPGVGRFQRGARVRVRRALVHRGGGGARLLLLLLLLPRRRQRQQLLLLAPGVRALAPAAARLHSRSRRRVRGPVRRAAQAERQHDGDAGLRGGPGGRRRGHHAQLHGPPGGGEDGGRRRGLAAPRRRAGRRRRRAPGGRGRRRHRRARGQQLPQDPDVAGRRKEGPDRRRGRDAGPRPRWLRVLVDGEEVACVHSGVSCMDHNYGDPNTVRHFPSPAQRDRRHLRGDGRVGGPAAGAGAEPHRAGRHPALRRRGGDGGGAAAEQGGELPAGLQAQPAALQRVERQRASAGRAPALLQPVGASRAAPLQPLQRRPLRPALRRRRGHRRRRAAGLAALRVPRGGGVGPGRGVLDGGAPDAGDVLADGRRGRPQRRAEAAVPGPGRRRELRDRAARVPDGGPARLPPAAAGQPPGVPGAARGVGGRDARRGRVARALPGAAAAAGQRAVQGVAVQAPHRGQGAAQQPQTAVQASVAVV

SEQ ID NO: 185278 - protein, 94 aa, Zea Mays
MSLSVGGLPVLDILRLWVLVLQFSDQGFYWGLSEEKLCGCAACWLLCCCFHVQKAAAFLCVACISGLVFGQVLVVLCLAFCAIVLWSILDCFFS

SEQ ID NO: 185279 - protein, 62 aa, Zea Mays
MGAWCLWLHRNKAVFDGVSPSISRTKRVFLEELDCWGLASGKHLEGLGLGAAIIRSREFLGE

SEQ ID NO: 185280 - protein, 118 aa, Zea Mays
MPTSPPLSPISAALAACRVSSSRSPLSLHQAHRRTDVGHEPPSQDLLLLGNCRVHSPPRRSSVKLLPRHSPSRSVSRLRSVSELQGIKNRALATKRSSFLRSTTLNTLSICLMKASVL

SEQ ID NO: 185281 - protein, 762 aa, Zea Mays
MYGNDNWINSYLDAILDAGKGAGPARGRGGGGGGGGDRPSLLLRERGHFSPARYFVEEVITGYDETDLYKTWLRANAMRSPQEKNTRLENMTWRIWNLARKKKEFEKEEANRLSKRRLEAEKPQNDATADMSEDLFEGVKGEDVGDPSVAYGDSTAGNTPRISSFDKLYIVLISLHGLIRGENMELGRDSDTGGQVKYVVELAKALSSCPGVYRVDLLTRQIIAPNFDRGYGEPDEMLALTSFKNFKCERGENSGAHIIRIPFGPKEKHLAKENIWPFIQEFVDGALGHIVRMSKTLGEETGSVCPVWPAVIHGHYASAGVAAALLSGALNVPMVFTGHFLGKDKLEGLLKQGRQTREQINVTYKIMRRIEAEELSLDASEIVIASTRQEIEEQWNLYDGFEVMLARKLRALVKRGANCYGRYMPRMVIIPPGVEFGQLIHDFDIYGDEDNPSPASEDPSIWFEIMRFFTNPRKPMILAIARPYAEKNIATLVKAFGECHPLRELANLTLIMGNREAISKMNKISAAVLTSVLTLIDEYDLYGQVAYPKHHKHSEVPDIYRLAARTKGAFINVAYFEQFGVTLIEAAMHGLPVIATKNGAPVEIHQVLENGLLVDPHDQHAIADALYKMLSEKQFWSRCRENGLKNIHQFSWPEHCKNYLSRILTLGPRHPAFACKEDHKVPVKCRKHIFVIAVDSVNKEDLIQIIRNSVEATRSGTMSDLTVGVTYIIHHSLVMCQAIPVLHLHRTITTDHILSIVGVEKV

SEQ ID NO: 185282 - protein, 206 aa, Zea Mays
MSRASYQALAIGLQTRCFTRIHPLQIASNLPRESCEALHQSIEEVVKYAVEVDADMDRFPKEWLFHHRWGKKPGKVDGKKIEFITAGGRTTAYVPQLQKLVGTQSSKTISVAENGDAKDSGTEGEDADADVLKPRKRAATSRGQRNKDTAGSRKARGNGADAEAAEPATGVVGSNSEQAFGQANSDAVDKSDRATRRSSRKVKARK

SEQ ID NO: 185283 - protein, 162 aa, Zea Mays
MASEEVATTVCADADQEAAAAAAAAMKEEGGRGKRRRRRQPRKGEEEGGRKKYALVSYHELPEYMKENEFILNYYRSEWPVLNAVLSLFSWHNETINVWTHLLGFMLFFGLTLVHLGQYFPQVADLIGHLSWPISKVAENVSSNIGDVLSGWQARYISKAFL

SEQ ID NO: 185284 - protein, 151 aa, Zea Mays
MDRFPKEWLFHHRWGKKPGKVDGKKIEFITAGGRTTAYVPQLQKLVGTQSSKTISVAENGDAKDSGTEGEDADADVLKPRKRAATSRGQRNKDTAGSRKARGNGADAEAAEPATGVVGSNSEQAFGQANSDAVDKSDRATRRSSRKVKARK

SEQ ID NO: 185285 - protein, 184 aa, Zea Mays
MPELPEVEAARRALQAHCVGRRIARCAVADDAKVVVAAAGRAAFERAMVGRTIVAARRRGKNLWLQLDAPPFPSFQFGMAGAIYIKGIPVTNYKRSVVNSEEEWPSKHSKFFAELDDGLEFSFTDKRRFARVRLFEDPETLPPISELGPDALFEPMSVDSFLDSLGRKKIGIKALLLDQFFFIK

SEQ ID NO: 185286 - protein, 109 aa, Zea Mays
MMLVLLPERPGADAELEAVAAPQVAGPVAAERLERGEGAAAGPAHEQAIPWRSRMATRGRGHPTPFRSGTFLGANEDSTRTLAEIEKKIARATVLPRNHGENGRNYVPI

SEQ ID NO: 185287 - protein, 191 aa, Zea Mays
MVGKNCFAIASDRRLGVQLQTIATDFQRVFKIHDKLYIGLSGLATDAQTLYQRLVFRHKLYQLREERDMKPETFASLVSALLYEKRFGPYFCQPVIAGLGDDNVPFICTMDCLGAKELAKDFVVSGTASESLYGACESMYKPDMQPDELFETISQALNSSVDRDCLSGWGGYVLIVTPTEVREHVIKSRMD

SEQ ID NO: 185288 - protein, 208 aa, Zea Mays
MSIFEYNGSAVVAMVGKNCFAIASDRRLGVQLQTIATDFQRVFKIHDKLYIGLSGLATDAQTLSLRRYQRLVFRHKLYQLREERDMKPETFASLVSALLYEKRFGPYFCQPVIAGLGDDNVPFICTMDCLGAKELAKDFVVSGTASESLYGACESMYKPDMQPDELFETISQALNSSVDRDCLSGWGGYVLIVTPTEVREHVIKSRMD

SEQ ID NO: 185289 - protein, 82 aa, Zea Mays
MDCLGAKELAKDFVVSGTASESLYGACESMYKPDMQPDELFETISQALNSSVDRDCLSGWGGYVLIVTPTEVREHVIKSRMD

SEQ ID NO: 185290 - protein, 360 aa, Zea Mays
MHLLYDMDAQVILPNDQKQKLTRLLITMQQRIGAAKTDMEDLIARLNQEAAVKEYLTTKVKDLEVELEAAKQKGRETLQQAILTERERITQMQWDMDELRRKYSEMESNLKAEQNEKTRAESEKTTASDKNETLLEELEIKRKEVETLKHHLVEAEAKSKADKKVLVKEVKSLRNSQTEMKKVLNQYLEQKTGLERVIIRDKQRSARAKLCRVKFLHECRLLHERLLECSAKFLAEEQGNFTIDPSSLPDALDLLATSDNRVRLLIAEAQLLARDDEQGSSDDGDNSDSISSLTMSWEDAKVTDEDATKILSDLLIDNAQLRLRLNAVIRNAVNTAVKPEKEGSGEVLPKKTVLNWLLDR

SEQ ID NO: 185291 - protein, 645 aa, Zea Mays
MIPSWITQTPETGVTADSFLKSVVFYRIHVGIQSPEGFSSSHGILRRFSDFLNLSSDLKSAFPRKDAPSAPPKHAFLRINSSRLLLEERRHALEEWMQKLLSDIDLSRSAPVAAFFELEAAARSYFQERNGRPSEVGSSTKSSTASSPHPDGPASGSLAESNQINQTLTRGSSLTGATGNGVLGEAILDQSDELVSNALNHRKGNLVLEHDGRNGSAASYRGVVSDEDRVSNPGHARKDSAESIGSDLSSLRGIELSIPGVSSSLWDGAVVDGHISQTEHLTGLDMHLLYDMDAQVILPNDQKQKLTRLLITMQQRIGAAKTDMEDLIARLNQEAAVKEYLTTKVKDLEVELEAAKQKGRETLQQAILTERERITQMQWDMDELRRKYSEMESNLKAEQNEKTRAESEKTTASDKNETLLEELEIKRKEVETLKHHLVEAEAKSKADKKVLVKEVKSLRNSQTEMKKVLNQYLEQKTGLERVIIRDKQRSARAKLCRVKFLHECRLLHERLLECSAKFLAEEQGNFTIDPSSLPDALDLLATSDNRVRLLIAEAQLLARDDEQGSSDDGDNSDSISSLTMSWEDAKVTDEDATKILSDLLIDNAQLRLRLNAVIRNAVNTAVKPEKEGSGEVLPKKTVLNWLLDR

SEQ ID NO: 185292 - protein, 286 aa, Zea Mays
MSAVVCGKRSSSIFADELLPPSPSSPHSSHQPAAKRSRRSPSHRGGSDGLRPEALVDYLLALFPDMDPQLLEKALEASGDDLDSAIKSLNLLRLESAEAILSSTGFKPENCLQTAIQPSLEGIPNGGVDTATEHPPSVDNYQTSYNGSEWVELLVTEMRNASDINDARARASRALEALEKTIVERAGAEATQNLHKENMMLKEQLTVVLRENSVLKRAVAIQHERQKEFDERSHEVQNLKQLVLQYQEQVRTLEVIFLMNNYALTMHLKQAQQNSSIPGRFNPDVF

SEQ ID NO: 185293 - protein, 166 aa, Zea Mays
MPSVEGIPNGGVDTATEHPPSVDNYQTSYNGSEWVELLVTEMRNASDINDARARASRALEALEKTIVERAGAEATQNLHKENMMLKEQLTVVLRENSVLKRAVAIQHERQKEFDERSHEVQNLKQLVLQYQEQVRTLEMNNYALTMHLKQAQQNSSIPGRFNPDVF

SEQ ID NO: 185294 - protein, 981 aa, Zea Mays
MVGVGMKACHVFQFILRLAFVLSVWLMIIPFITYWIWRLTFVRSLSEAQRLFLSHISAQLILSDCLHGFLLSAIIVLIFLGATSLRDYIRHLRELGGHDAERDDGGRERHGARAVRRLAGPNNRVPADGNVDELAEAQGIGAGELLRRNAENVAARLERLEAQVEQMLDGLDDADGAEDVPFDELVGMQGPVFHLVENAITVLASNAIFLIVVIFVPFSLGRIILYYLSWFFSSASTPMLAKVMPFTETAISIANDTLKSALNVVKNFSSDSNNEGVIGHVIEVVTQSLKINATGLSVIQGTGKNSLMKGTTIASSYLSDLTTLAVGYMFIFCLVFLYIGSLALLRYARGERFTIGRLYGIATILEAIPSLCRQFFAGMKHLMTMVKVAFLLVIELGVFPLMCGWWLDVCTLKMLGTTIAQRVEFFTMSPLASSSIHWLVGIVYMLQISIFVSLLRGVLRNGVLYFLRDPADPNYNPFRDLIDDPVHKHARRVLLSVAVYGSLIVMLVFLPVKVAMRVAPSMFPLDITIFDPFTEIPVDVLLFQICIPFAIEHFKPRATIKALLHHWFSVVGWGLGLTDFLLPKSEENGGQENLNARAERRDRGHGGREMVAPQVEQLMIQHVAAEDNGRGDSNEANDVTEDSDVDDQGDSEYGFVLRIVLLLVLAWMTLLIFNAGMIVFPISLGRLVFEAVPRLPITHGIKCNDLFSFSIGCYILWSVAAGTRYAIDYITSRQLGFLVQQICKWCSIVLKSSVLLSIWIFVIPVLIGLLFELLVIVPMRVPIDESPVFLLYQDWALGLIFLKIWTRLVMLDQMAPLVDESWRSKFERVRDDGFSRLKGLWVLHEIIMPIVTKLLTALCVPYVLARGIFPLLGYPLIVNSAVYRFAWLGSLIFSALFFWGKRFHVWFTNLHNSIRDDRYLIGRRLHNFGEDSHSPERSESGASIGSDDQDRDIVLRDQEEEVGLRMRRNNMHANQQPRFAL

SEQ ID NO: 185295 - protein, 201 aa, Zea Mays
MATASSRWRRCSRRRPTSSAPRVRACTRPCSPTAPRWRSGASATAAAPKSSRTSRCRCAPSPGSATPTSSGCAASTGASTRSSSSTTTPPMAALPTSHSAGGCGVVIEPGDAAADRARRGVHPRENILLGPGVPTWSPGSATWAWTGWCRVRRRRTPARARRRGCSGASGRCTRRVACSHRHVSPGSVSIRQETVGSKPRH

SEQ ID NO: 185296 - protein, 172 aa, Zea Mays
MASPRGHRHRRANVLQRAAAAAALLLALSCCCSSADPWPPPPPPPKVPAVIVFGDSTVDTGNNNAIGTVLKSNFAPYGRDMAGGARPTGRFCNGRLPPDFVSEALGLPPLVPAYLDPAYGIQDFARGVCFASAGTGLDNKTAGVLCRAAGIEGARLDRPGGSGWLMDAAASV

SEQ ID NO: 185297 - protein, 998 aa, Zea Mays
MKSRTATLAVGILLLVALVVVAEADTDAGDVAALGNLYSSWNSPAQLTGWSASGGDPCGAAWAGVSCSGSAVTSIKLSGMELNGTLGYQLSSLQALKTMDLSNNHLHDSIPYQLPSNLTYLNLAKNNFSGNLPYSISNLVSLEYLNLSHNSLFQEIGELFGSLNSLSELDVSFNNLTGNLPFSMGALSKLSSLYMQNNQLSGTVDVLSNISLATLNIADNNFSGMIPQEFSSIPNLIVGGNSFVNMPASPPSTLKPPLEEPQGPVSAPTSPDTPIDQDDRKIQTGPLIGIAVGSIAAASCVLFVLVFCLHNARRRNDDEISEPKDLVGSLAVSIETAASSREVLNNNHENSAVATSDLQHAGKMMMTPDRVLHDTTNGSSTAKRPKVPVTVTSYTVADLQVATNSFCEDSLLGEGSLGRVYKAGFPNGKVLAVKKVDDSALLSLYGGGEDAFLELVSNVSRLRHPNIVPLTGYCVEHGQRLLVYEYVGNGTLRDVLQHCLSDDEGASKKLTWNTRVRIALGTARALEYLHEVCIPPVVHSRTFKASNILLDEEYSPHLSDCGLAALTTVVSPEAVGSFGYSAPELAMSGTYTAKSDVYSFGVVMLELLTGRKPLDSSRERSEQSLVRWAAPQLHDIDLLARMVDPALDGLYPSKSLSRFADIIAICVQPEPEFRPPMSEVVQQLRAVQEMVEDPLGCWHARRPQLLMDLEPGTMDSVRSGPFGQIFCPDNFVFQSGAGNNWAKGHYTEGAGNNRNRTRHPRPSTTYLHPLSASDVGAPTGNRQVSLWGSSTKEITRDTLLQKVSEENQLHRHLCRAAAAALSIQVIFTNDCYVFALCPFAGPQFQMNLKDEETTVETDSTQAPISQVLYTFHSVHHSMPKLEYSSSKMDMEKEIRKQVDDAIAKAKLDEASRALLMKVLEDATQDVVQRQAKLNARALQRGYIIPVYYDNLSTDESSPAELIGDWSCAEMLVLFETPARFTLFKVLDKVEVSDPRCNF

SEQ ID NO: 185298 - protein, 443 aa, Zea Mays
MGALSKLSSLYMQNNQLSGTVDVLSNISLATLNIADNNFSGMIPQEFSSIPNLIVGGNSFVNMPASPPSTLKPPLEEPQGPVSAPTSPDTPIDQDDRKIQTGPLIGIAVGSIAAASCVLFVLVFCLHNARRRNDDEISEPKDLVGSLAVSIETAASSREVLNNNHENSAVATSDLQHAGKMMMTPDRVLHDTTNGSSTAKRPKVPVTVTSYTVADLQVATNSFCEDSLLGEGSLGRVYKAGFPNGKVLAVKKVDDSALLSLYGGGEDAFLELVSNVSRLRHPNIVPLTGYCVEHGQRLLVYEYVGNGTLRDVLQHCLSDDEGASKKLTWNTRVRIALGTARALEYLHEVCIPPVVHSRTFKASNILLDEEYSPHLSDCGLAALTTVVSPEAVGSFGYSAPELAMSGTYTAKSDVYSFGVVMLELLTGRKPLDSVCVCVCLPYQ

SEQ ID NO: 185299 - protein, 719 aa, Zea Mays
MKSRTATLAVGILLLVALVVVAEADTDAGDVAALGNLYSSWNSPAQLTGWSASGGDPCGAAWAGVSCSGSAVTSIKLSGMELNGTLGYQLSSLQALKTMDLSNNHLHDSIPYQLPSNLTYLNLAKNNFSGNLPYSISNLVSLEYLNLSHNSLFQEIGELFGSLNSLSELDVSFNNLTGNLPFSMGALSKLSSLYMQNNQLSGTVDVLSNISLATLNIADNNFSGMIPQEFSSIPNLIVGGNSFVNMPASPPSTLKPPLEEPQGPVSAPTSPDTPIDQDDRKIQTGPLIGIAVGSIAAASCVLFVLVFCLHNARRRNDDEISEPKDLVGSLAVSIETASSREVLNNNHENSAVATSDLQHAGKMMMTPDRVLHDTTNGSSTAKRPKVPVTVTSYTVADLQVATNSFCEDSLLGEGSLGRVYKAGFPNGKVLAVKKVDDSALLSLYGGGEDAFLELVSNVSRLRHPNIVPLTGYCVEHGQRLLVYEYVGNGTLRDVLQHCLSDDEGASKKLTWNTRVRIALGTARALEYLHEVCIPPVVHSRTFKASNILLDEEYSPHLSDCGLAALTTVVSPEAVGSFGYSAPELAMSGTYTAKSDVYSFGVVMLELLTGRKPLDSSRERSEQSLVRWAAPQLHDIDLLARMVDPALDGLYPSKSLSRFADIIAICVQPEPEFRPPMSEVVQQLVRLMQRAAIIRRQSDDLGYSYRVPDRDGGAAAGDVL

SEQ ID NO: 185300 - protein, 858 aa, Zea Mays
MPLCSYWQDLWKEFTTSDSARKVVELKAFNKFENTSDALSAATLIIDSKPSKGLRKFLQKHCEGETLAVADSKLGNAIKEKLKIDCLHNSVVMELMRGLRNQLTELITGLGAQDLGPMSLGLSHSLSRYKLKFSPEKVDTMIIQDIGLLDDLDKELNTYAMRVREWYGWHFPELTKIVTDNIQYAKVVKMMGNRVNAVNLDFSEILSDEELETQLKEAAVISMGTEVSDLDLSNIRELCDQVLALSEYRAQLYDYLRSRMNTIAPNLTALALFRALKTKHSTPKYGLIYHASLIGKASQKHKGKISRSLAAKTALAIRYDALGDGENKILLVLRWFCVDWFLEHEPEPAPSETTTPFLSSLIMVHPPPRDEMHRTSRTYLPERCSLEEEPSWSMQSAKVALAAPFVEEALVAPSAGPDEMLFEAAPSAKSAQSARVALAAPFAEDALVTPSAGPEEMLADAAPSTKLGEEVLAEVAFTRAANAAPTVALGEEVTLDSAASPALPVTTMDVVSENVTTPMDAGSSPTTIDLVRSLLPNISSPTVQYNLPVLPVQRSNVEPVENMPRVDWNSLHIVETHDDEGRIALLSENQIYALLGLREEGTTNESEYVEHGVDNDDDCFRTSDVLPSEMVISYDKDHPIMDIGTIYPTMEEFKMAVRQFAINKEFTLGTEKSDKKRYRCFCKSSLDCPWKINGTKHKEESIVEVTALTNHHTCMSNMRMKTITPSQKWVASKAVTILRESPKMGAKELQDKLQKQYSVTISYDTVWRGKEKALAEIYGKWEDNFELLFRWKAEVLKRSPGSVVEIDVLDVDGQVYFNRFFCALKPCIDGFLEGCRPYLSIDSTTLNGRWNGHLAAAV

SEQ ID NO: 185301 - protein, 120 aa, Zea Mays
MEGSVRLGDLKPSPSHIKPSPSPDTGEPFLASQPPPSLGSRDLARTDVCSPAVSSRTLPPCPVADVSRPAPPGQMTPPCPAPVVPTLAAPHRGPKPNTESCFRYDVPRPMKWIPAGESWI

SEQ ID NO: 185302 - protein, 269 aa, Zea Mays
MKRAAPSQEPLDVSSGDSSGSDSDQLGGKDKGGSASKAAAGAEDVKRVVLHKESQDVSSDDDLSSDSDDDAGKGNAWNAFGLPNSSKAASTAEGALIRRAEMYQQYMKRIPVPAYRDSVIPFTSWLGLAGSLKQLQVKEEEENRCGFQRSEPARIPWRPIRLDSSSGSGGTELVLVHWERPRRQRGRTRTRVLRGTRAYQGRSNRRGEVHRAAERAAEPAVAGERQEGEGRLLLAEREAEEGPGPSQQGEELRRGGEAAPEGQRRVLWL

SEQ ID NO: 185303 - protein, 134 aa, Zea Mays
MSSQHGPDYDWRTSPIDPQVVYASGGKGHGRYTIFANVNDSIQIQQQQTLIQQLAQAQGIHVPVSPPPPPPPPVHYSWSSHPPTPTSPPTEHQTPPATFPTHEREDGLDFVKTLFASGGIDHHSSLYPNGDRRS

SEQ ID NO: 185304 - protein, 1252 aa, Zea Mays
MASASFQPVAASAASAPPRPAPRHPFAAAAAARRSSLSLRPAAHRPVIPLRSSAVAANTLRATHRRAVSARSRRRAQGLGAAPALAASTWGGGDKGGCLSCFPKSRRGRSGLAPCALPHASGLSFRSRLSGSKVVRPSHILHAAGPDEPHVASPTWSDTSLDTTDMDHAISKEELEDVLNTPLPEHPKLIRGQLKNGLRYLILPNKVPANRFEAHMEVHVGSIDEEEDEQGIAHMIEHVAFLGSKKREKILGTGARSNAYTDFHHTVFHIHSPTKTKEYGEDLLPFVLDALSEIAFHPKFSSSRVEKERRAILSELQMMNTIEYRVDCQLLQHLHSENKLSNRFPIGLEEQIHKWDPDKIRRFHERWYYPANATLYLVGEIDDIPRAVREIEAVFEHTLSENEGNPVPSANPFGAMASLFAPKLPGGFTSNLTGEKSPATDKIKPAKRERQAVRPPVEHKWSLPGVAQDAKPPAIFQHELIQSFSINMFCKIPVSKVQSYKDLRSVLMKRIFLSALHFRINTRYKSSNPPFTSVELDHSDSGREGCTVTTLTVTAEPQNWRSAIKVAVHEVRRLKEFGVTMGEMTRYMDALIKDSEQLAMMIDSVPSVDNLDFIMESDALGHTVMDQLQGHESLLAVAETVTLEEVNTVGAEVLEFISDFGKLNAPLPAAIVACVPQKVHVDGAGETEFEIYPEEITEAIKAGLEEPIYREPELEVPKELITQSELDDLKSQCNPSFVPLTKEENAVKVFDSETGIAQRRLSNGISINYKITQNEARVGVMRLIVGGGRATEDSESKGSVIVGVRTLSEGGCVGNFSREQVELFCVNNLINCSLESNEEFIFMEFRFALRDNGMRAAFQLLHMVLEHNVWLEDAFNRATQLYLSYYRSIPKSLERSTAHKLMLAMLNHDERFVEPSPHSLQKLTLQSVKNAVMNQFVGGNMEVSIVGDFTEEEVESCVLDYLGTVRASSSLNTEERIEKISFRPFPSDVHFQQVYIKDTDERACAYIAGPAPNRWGFTTEGNDLFNVIRISDADAEVSEPVSLDLTGKRHVDVRSHPLFFGITLSLLAEIINSRLFTTVRDSMGLTYDVSFELNLFDKLGLGWYVIAVTSTPSKVHKAVDACKGVLRGLHSSRIVERELDRAKRTLLMKHEAETKTNAYWLGLLAHLQSSSVPRKDVSCIRELTTLYESATIEDLYLAYEHLKVDDSSLFACIGIAGAESGEDTNDDELDVDLHGMAPMGGRGLSTMTRPTT

SEQ ID NO: 185305 - protein, 1224 aa, Zea Mays
MASASFQPVAASAASAPPRPAPRHPFAAAAAARRSSLSLRPAAHRPVIPLRSSAVAANTLRATHRRAVSARSRRRAQGLGAAPALAASTWGGGDKGGCLSCFPKSRRGRSGLAPCALPHASGLSFRSRLSGSKVRPSHILHAAGPDEPHVASPTWSDTSLDTTDMDHAISKEELEDVLNTPLPEHPKLIRGQLKNGLRYLILPNKVPANRFEAHMEVHVGSIDEEEDEQGIAHMIEHVAFLGSKKREKILGTGARSNAYTDFHHTVFHIHSPTKTKEYGEDLLPFVLDALSEIAFHPKFSSSRVEKERRAILSELQMMNTIEYRVDCQLLQHLHSENKLSNRFPIGLEEQIHKWDPDKIRRFHERWYYPANATLYLVGEIDDIPRAVREIEAVFEHTLSENEGNPVPSANPFDKIKPAKRERQAVRPPVEHKWSLPGVAQDAKPPAIFQHELIQSFSINMFCKIPVSKVQSYKDLRSVLMKRIFLSALHFRINTRYKSSNPPFTSVELDHSDSGREGCTVTTLTVTAEPQNWRSAIKVAVHEVRRLKEFGVTMGEMTRYMDALIKDSEQLAMMIDSVPSVDNLDFIMESDALGHTVMDQLQGHESLLAVAETVTLEEVNTVGAEVLEFISDFGKLNAPLPAAIVACVPQKVHVDGAGETEFEIYPEEITEAIKAGLEEPIYREPELEVPKELITQSELDDLKSQCNPSFVPLTKEENAVKVFDSETGIAQRRLSNGISINYKITQNEARVGVMRLIVGGGRATEDSESKGSVIVGVRTLSEGGCVGNFSREQVELFCVNNLINCSLESNEEFIFMEFRFALRDNGMRAAFQLLHMVLEHNVWLEDAFNRATQLYLSYYRSIPKSLERSTAHKLMLAMLNHDERFVEPSPHSLQKLTLQSVKNAVMNQFVGGNMEVSIVGDFTEEEVESCVLDYLGTVRASSSLNTEERIEKISFRPFPSDVHFQQVYIKDTDERACAYIAGPAPNRWGFTTEGNDLFNVIRISDADAEVSEPVSLDLTGKRHVDVRSHPLFFGITLSLLAEIINSRLFTTVRDSMGLTYDVSFELNLFDKLGLGWYVIAVTSTPSKVHKAVDACKGVLRGLHSSRIVERELDRAKRTLLMKHEAETKTNAYWLGLLAHLQSSSVPRKDVSCIRELTTLYESATIEDLYLAYEHLKVDDSSLFACIGIAGAESGEDTNDDELDVDLHGMAPMGGRGLSTMTRPTT

SEQ ID NO: 185306 - protein, 106 aa, Zea Mays
MRQLMAGPPGLAMAPLQLPSLSLSLLRGGSATEGRRSVYTHRQRALEWVECGEEGDDGAIATERGDRSQSRDLTLCTGGQAHEIPGMGGAQSPLCVWEHRDDARHL

SEQ ID NO: 185307 - protein, 77 aa, Zea Mays
MAGPPGLAMAPLQLPSLSLSLLRGGSATEGRRSVYTHRQRALEWVECGEEGDDGAIATERGDRSQETMTDTRSSREL

SEQ ID NO: 185308 - protein, 76 aa, Zea Mays
MAGPPGLAMAPLQLPSLSLSLLRGGSATEGRRSVYTHRQRALEWVECGEEGDDGAIATERGDRSQGPDPLHWWTSP

SEQ ID NO: 185309 - protein, 61 aa, Zea Mays
MAPLQLPSLSLSLLRGGSATEGRRSVYTHRQRALEWVECGEEGDDGAIATERGDRSQIDRG

SEQ ID NO: 185310 - protein, 242 aa, Zea Mays
MTSVSHMDFPEIVEGGIKQMLELLGDDNAPFDVHLIGGFADASTKVVRSSGKKHIKQEGYSYPLCCKIVEVLHKSQLQFHLRSFCVLENNTKSDSFGNALPIIGGFVVETSSGVVIPATFDMDSRCPDEVVRRIRVSVSSYDPTWQGRLLETYDTQDDVFQIAPACWMPDWADIASSLNQLSDSEVLLRCSTSPAAEPPHFVENERRIWKYLIDNPDWEETFPKHKPRVFHRASDGSWSRYS

SEQ ID NO: 185311 - protein, 286 aa, Zea Mays
MLLLDGDLVLSSSGSTGAASRTSDSGRELVAALLESPGIRHAVDRLKVAPERRISAGQEGAPKHVYVFQREYATVDPARVELVGTDEATTCIGVVIRNNKTGMTSVSHMDFPEIVEGGIKQMLELLGDDNAPFDVHLIGGFADASTKVVRSSGKKHIKQEGYSYPLCCKIVEVLHKSQLQFHLRSFCVLENNTKSDSFGNALPIIGGFVVETSSGVVIPATFDMDSRCPDEVVRRIRVSVSSYDPTWQGRLLETYDTQDDVFQIAPACCTCLVCLQFSLTIKSIAC

SEQ ID NO: 185312 - protein, 131 aa, Zea Mays
MHRVFFDLETRWCARKLGSWFPLHHFSSLKHTFQLSSDKDSDRRRHAPPRRRPCPLLLRKHRRCLSHERQREGARGGALGEPRDPPRGRPAEGRAGEADLGRAGGGAEARLRVPAGVRHGGSGARRVSWHR

SEQ ID NO: 185313 - protein, 151 aa, Zea Mays
MHWCCNSQQQDWNVSEKEVSIYLILTSVSHMDFPEIVEGGIKQMLELLGDDNAPFDVHLIGGFADASTKVVRSSGKKHIKQEGYSYPLCCKIVEVLHKSQLQFHLRSFCVLENNTKSDSFGNALPIIGGFVVSDFLSSASVTLLVSWHQSA

SEQ ID NO: 185314 - protein, 121 aa, Zea Mays
MDSRCPDEVVRRIRVSVSSYDPTWQGRLLETYDTQDDVFQIAPACWMPDWADIASSLNQLSDSEVLLRCSTSPAAEPPHFVENERRIWKYLIDNPDWEETFPKHKPRVFHRASDGSWSRYS

SEQ ID NO: 185315 - protein, 324 aa, Zea Mays
MRHASPPQELPAAGREIQAALAPANGNAAGARGGGGSFTALLGLPTPQAMELLLPRTTPPALALAPAAAPAPTPTFPSDPHLVDRAGRFSTFAPPSPPSPSPTQQPPPPPPAAVAGKRKADPVDRASKGKAAKKGKTAEEKPAAAGGEDEKPAYVHVRARRGQATDSHSLAERARREKINARMELLKELVPGCSKVSGTALVLDEIINHVQSLQRQVEYLSMRLATVNPRGDFGGLDSFLTTECGRIASFNCKNGIDLEQVTWPEMGVHGARQLMQLQQQFWHGDLAHPHQVASQWEKRGDGHPPVFSNSSPSLFGYDLTSSGL

SEQ ID NO: 185316 - protein, 76 aa, Zea Mays
MLYHGLLAREATQDEEFEVMYGEDDDEDKDDEDDDDYDTKTKGATGGGRAAANDLLSASRSECCTLNIGMHWLWSN

SEQ ID NO: 185317 - protein, 370 aa, Zea Mays
MIEQFVNFVIRPPRAEYNPDQYLWEPEFTLAGRKYKRLDLELTNERSQTLKCSHYVPAVIPENTSLPCVVYCHGNSGCRADANEAAVILLPSNITLFTLDFAGSGLSSGDYVSLGWHEKQDLKCAVSFLRKNKQVSCIGLWGRSMGAVTSLLYGAEDPSIAGMVLDSAFANLYDLMMELVEVYKIRVPKFTVKMAVQYMRCVIQRRAKFDIMDLNVVQFAPKTFIPALFGHASNDMFIQPHHTDHIHQAYAGDKNLIKFEGDHNSPRPQFYYDSVSIFFYNVLHPPQFPSTCTHKLDKYYNLGAFKGAAGTNESLLYEIINGLRAAGTDAGSSSAATASFTNATKSVVELLTERVNQLSVKNDNDLESVI

SEQ ID NO: 185318 - protein, 334 aa, Zea Mays
MGAVTSLLYGAEDPSIAGMVLDSAFANLYDLMMELVEVYKIRVPKFTVKMAVQYMRCVIQRRAKFDIMDLNVVQFAPKTFIPALFGHASNDMFIQPHHTDHIHQAYAGDKNLIKFEGDHNSPRPQFYYDSVSIFFYNVLHPPQFPSTCTHKLDKYYNLGAFKGAAGTNESLLYEIINGLRAAGTDAGSSSAATASFTNATKSVVELLTERVNQLSVKNDNDLDKSNRQTDECCSYTSSNRESWGRCSSLGGASDGLSSGEQPEIPNHKLKSLTLRALATPLRRVQRKPLAIPKEKNRSLWKRLKKERQQMGENISQRLRLCLQGQARHKRTKSS

SEQ ID NO: 185319 - protein, 516 aa, Zea Mays
MNWQCIYSAEYNPDQYLWEPEFTLAGRKYKRLDLELTNERSQTLKCSHYVPAVIPENTSLPCVVYCHGNSGCRADANEAAVILLPSNITLFTLDFAGSGLSSGDYVSLGWHEKQDLKCAVSFLRKNKQVSCIGLWGRSMGAVTSLLYGAEDPSIAGMVLDSAFANLYDLMMELVEVYKIRVPKFTVKMAVQYMRCVIQRRAKFDIMDLNVVQFAPKTFIPALFGHASNDMFIQPHHTDHIHQAYAGDKNLIKFEGDHNSPRPQFYYDSVSIFFYNVLHPPQFPSTCTHKLDKYYNLGAFKGAAGTNESLLYEIINGLRAAGTDAGSSSAATASFTNATKSVVELLTERVNQLSVKNDNDLVSQSLPALPLLLEIFNSTRVQDFLLDENHNLTEMDGNTGECHLEDKSNRQTDECCSYTSSNRESWGRCSSLGGASDGLSSGEQPEIPNHKLKSLTLRALATPLRRVQRKPLAIPKEKNRSLWKRLKKERQQMGENISQRLRLCLQGQARHKRTKSS

SEQ ID NO: 185320 - protein, 339 aa, Zea Mays
MVLDSAFANLYDLMMELVEVYKIRVPKFTVKMAVQYMRCVIQRRAKFDIMDLNVVQFAPKTFIPALFGHASNDMFIQPHHTDHIHQAYAGDKNLIKFEGDHNSPRPQFYYDSVSIFFYNVLHPPQFPSTCTHKLDKYYNLGAFKGAAGTNESLLYEIINGLRAAGTDAGSSSAATASFTNATKSVVELLTERVNQLSVKNDNDLDFLLDENHNLTEMDGNTGECHLEDKSNRQTDECCSYTSSNRESWGRCSSLGGASDGLSSGEQPEIPNHKLKSLTLRALATPLRRVQRKPLAIPKEKNRSLWKRLKKERQQMGENISQRLRLCLQGQARHKRTKSS

SEQ ID NO: 185321 - protein, 307 aa, Zea Mays
MNMFAPKTFIPALFGHASNDMFIQPHHTDHIHQAYAGDKNLIKFEGDHNSPRPQFYYDSVSIFFYNVLHPPQFPSTCTHKLDKYYNLGAFKGAAGTNESLLYEIINGLRAAGTDAGSSSAATASFTNATKSVVELLTERVNQLSVKNDNDLVSQSLPALPLLLEIFNSTRVQDFLLDENHNLTEMDGNTGECHLEDKSNRQTDECCSYTSSNRESWGRCSSLGGASDGLSSGEQPEIPNHKLKSLTLRALATPLRRVQRKPLAIPKEKNRSLWKRLKKERQQMGENISQRLRLCLQGQARHKRTKSS

SEQ ID NO: 185322 - protein, 143 aa, Zea Mays
MLRKSLKFKATPMPSFYKEPPPPKVELKKIPTTRARSPKLGRSKNTPSGGTEGNSNPPARSARLSLDQRVPQNGAKKAPAANAAKKPQRKSLPKLPSEQTAKVVDIAASVPSGEELGKKPSLTGLVREPIRAQLTPDEPGLSV

SEQ ID NO: 185323 - protein, 243 aa, Zea Mays
MAGYLPFEENDLPSLYEKITAAKYSCPYWFSPGAKSLIQRLLDPNPRTRITIGEIRADPWFEKNYVAIRRGEDENVSLDDVQAVFDNIEDKYVSEEVTHKDGGPLMMNAFEMITLSQGLDLSALFDRQQEYVKRQTRFVSRKPAKTIVATIEVVAESMSLKVHSQNYKLRLEGASSNRTSQFAVVLEVFQVAPSLFMVDVRKVAGDTLEYHRFYKNLCSRLDSIIWRPIEVSAKSKLLRTTTC

SEQ ID NO: 185324 - protein, 228 aa, Zea Mays
MAYAARRKKRVGRYEVGRTIGQGTFAKVKFAVDADTGAPVAMKVLDKETIFAHRMLHQIKREISIMKIVRHPNIVRLNEVLAGKTKIYIILELVNGGELFDKIARYGKLRENEARKYFQQLIDAIDYCHSKGVYHRDLKPENMLLDSRGNLKVSDFGLSTLSQNGAGLLHTTCGTPNYVAPEVLGSDGYDGPAADIWSCGVILYVLMAGYLPFEENDLPSLYEKEPSH

SEQ ID NO: 185325 - protein, 322 aa, Zea Mays
MKIVRHPNIVRLNEVLAGKTKIYIILELVNGGELFDKIARYGKLRENEARKYFQQLIDAIDYCHSKGVYHRDLKPENMLLDSRGNLKVSDFGLSTLSQNGAGLLHTTCGTPNYVAPEVLGSDGYDGPAADIWSCGVILYVLMAGYLPFEENDLPSLYEKITAAKYSCPYWFSPGAKSLIQRLLDPNPRTRITIGEIRADPWFEKNYVAIRRGEDENVSLDDVQAVFDNIEDKYVSEEVTHKDGGPLMMNAFEMITLSQGLDLSALFDRQQEYVKRQTRFVSRKPAKTIVATIEVVAESMSLKVHSQNYKVHHRTERANSLLF

SEQ ID NO: 185326 - protein, 156 aa, Zea Mays
MPISLESVHPVLCCAISYFVEAMESFTNGNVRLLKHERSIVAEDDLDQRWQEATGESVSEVIFLSKHTAVSKRPALTVHPIGVPHLKEDETPPQGGTPGWAAIPSPRIGPWLRLMQKIAVEQGLVPEFEVTLEATHHGPVTSTPTMFVEIELITAL

SEQ ID NO: 185327 - protein, 296 aa, Zea Mays
MPISLESVHPVLCCAISYFVEAMESFTNGNVRLLKHERSIVAEDDLDQRWQEATGESVSEVIFLSKHTAVSKRPALTVHPIGVPHLKEDETPPQGGTPGWAAIPSPRIGPWLRLMQKIAVEQGLVPEFEVTLEATHHGPVTSTPTMFVEIGSTEDHWGRQDAAQVLWKGLGLEDGNAVGTWQRNCEKVLLGIGGGHYVPRHMDIVIKDGVWVGHLLSGYSLPMDMSSQVNVKSSEEVAGMWKHSIKVSYEATKAAFPGGEVIAHLDHKSFKGWQKNAVTCFLQEQNIRIGKPSDFL

SEQ ID NO: 185328 - protein, 199 aa, Zea Mays
MPPRKRPPSPPEEPSLASKPRPDAQPSKPDPDSEQSTINPRILAQLPNQGAPGVQAHLRGGQQGHVDAGHPQEAADGPQRRHQGRAHPRGKRAPQRGQRRAPPQQEDLHGHRLPALRRDHRGHLVPRRPPGHRRRNHRAPLLPGAGPEARRRDRADDPPRHSQGRPQGRVHYRQGQGYHQDHGARQGARGGQEHRRGGF

SEQ ID NO: 185329 - protein, 73 aa, Zea Mays
MESSSFTSRQFFGSLKAILSWTGLAQRYILYTTNAQCNLSQHNAVLIFFLYMSLFFFWTFYFYTSIHVDVIVS

SEQ ID NO: 185330 - protein, 278 aa, Zea Mays
MRFLKGSKVEVLQEADVPFGSWRPGEIVSGNGHAYFVRYDESPVDSSVAVERVPRRLMRPRPPADDPVRWSLGSIIEAFDSYSWKVAEVVRVLGKNQYLVRLLGSSLELSAHASVLRMRKLWLDDIWIVTQKYSARCLDGGAFRGQSKDKNLDHNFRMDSRQLENQNAFEGDTSRGIKRKSSAISTHPQCSEITKRLRTPNRDGRYSKLVDRSFSPLAEKGQGWRLVKHPSIGSCKWRSLPHVLQCDKCGNISNELPLVKLGQDWFQINTGCWIKWSN

SEQ ID NO: 185331 - protein, 211 aa, Zea Mays
MRFLKGSKVEVLQEADVPFGSWRPGEIVSGNGHAYFVRYDESPVDSSVAVERVPRRLMRPRPPADDPVRWSLGSIIEAFDSYSWKVAEVVRVLGKNQYLVRLLGSSLELSAHASVLRMRKLWLDDIWIVTQKYSARCLDGGAFRGQSKDKNLDHNFRMDSRQLENQNAFEGDTSRGIKRKSSAISTHPQCSEITKRLRTPNRDGRAKVGGL

SEQ ID NO: 185332 - protein, 290 aa, Zea Mays
MCLDLSVKDKSVKPPRRHSIQTKPGASPRPIPSGTVTPVSGVRSKRSDGQGRFDTPTSEVSMSMSRRKFSTLSSISYWMTQIRLAEAASKHSVSLGFFKLALESECEPLDRMREELKSYVVRHCLATELEDPVKDILQVYDIVDDFEKLKISAEPSEQQKKSEKAARNVSNVSANCNLKPRSLNSGATESKEAGKKEGIQKAKPDARVRGSNNRNPVKCTTAKEVVAKNTGKKTKKEAKGQEEVSNGDSDASSALPDQESVDVVKEITHEDKENMDENEMAMDVAIAQEF

SEQ ID NO: 185333 - protein, 179 aa, Zea Mays
MREELKSYVVRHCLATELEDPVKDILQVYDIVDDFEKLKISAEPSEQQKKSEKAARNVSNVSANCNLKPRSLNSGATESKEAGKKEGIQKAKPDARVRGSNNRNPVKCTTAKEVVAKNTGKKTKKEAKGQEEVSNGDSDASSALPDQESVDVVKEITHEDKENMDENEMAMDVAIAQEF

SEQ ID NO: 185334 - protein, 102 aa, Zea Mays
MAAARRGRADGANGVVRPRPRDRVVGVSGSMAGRVAVLAFCVAGIWSAYIYQGVLQETLLLGLSSDPRSGSGRRRGGSRLRAPCVPQLRAECRMLRLVLPND

SEQ ID NO: 185335 - protein, 120 aa, Zea Mays
MIKLWSSGSGSSSDGRAPLSKYWGVSVTNTIGPTMGIEALKYINYPAQVLAKSSKMIPVMLMGTLLYGVKYTLPEYFCTFLVAGGVSSFALLKTSSKRPRQLRSLPTLMHLLAIHCASST

SEQ ID NO: 185336 - protein, 130 aa, Zea Mays
MLGMNLWGTIYNAVVMFVAPLLFSNWPYADGFEALRFCQENPEVAWDIFLFCLCGAVRQNYIFLTISRFGALTNTTITTTRKFMSIVVSSVISGNPLSSKQRGSVTMVFLGLSVQIYLKWKREKGRHPSE

SEQ ID NO: 185337 - protein, 374 aa, Zea Mays
MAAARRGRADGANGVVRPRPRDRVVGVSGSMAGRVAVLAFCVAGIWSAYIYQGVLQETLSTKRFGPEARRFEHLAFLNFAQNVVCFVWSFLSESSLPPTLPLAPHGCLIAHFAQRRGLVVIGSVSSSPLRGWRLHTRVPDISAAFPVTKLWSGGSGSSSDGRAPLSKYWGVSVTNTIGPTMGIEALKYINYPAQTSSKTVKKLVNPNAPLGYTLCFLNLAFDGYTNSTQDIIKSRYPNTNPWDIMLGMNLWGTIYNAVVMFVAPLLFSNWPYADGFEALRFCQENPEVAWDIFLFCLCGAVRQNYIFLTISRFGALTNTTITTTRKFMSIVVSSVISGNPLSSKQRGSVTMVFLGLSVQIYLKWKREKGRHPSE

SEQ ID NO: 185338 - protein, 189 aa, Zea Mays
MAAARRGRADGANGVVRPRPRDRVVGVSGSMAGRVAVLAFCVAGIWSAYIYQGVLQETLSTKRFGPEARRFEHLAFLNFAQNVVCFVWSFLMTKLWSGGSGSSSDGRAPLSKYWGVSVTNTIGPTMGIEALKYINYPAQVWFRLLLPSHLGCYMHCPGHCVMLMLGSCRGHMGNIVTDAYGLRCSDRVN

SEQ ID NO: 185339 - protein, 185 aa, Zea Mays
MTALNKTTQTSFPFPLAHATVAMASAGNLSAARSFQIGGHIRAAEEPVLGTRAEGQTPPAQLCPPLCRIDEPAVHAGGGQVAGEEHGQELYAKGSWERKEREGGREWSPVGTKKRSAASERPRKGTSSTTTCRSRTKADCKAGRGREEKKLAQISRGEWKPCVSVQPPAQPTLDSFGRSCARGPA

SEQ ID NO: 185340 - protein, 77 aa, Zea Mays
MNSIALLSYPVHVHSNLRALRQGLVYVGLITWEGCHSHDHWKPLLHDKWKALYFSQHPLHNSEQKQCCILQSISSEA

SEQ ID NO: 185341 - protein, 378 aa, Zea Mays
MALVLHSGAGNKNAFKALIAAEYSGIKVELTKDFEMGVSNKTPEFLKMNPLGKVPVLETPDGPVFESNAIARYVARLKDDNPLFGSSRIEQAHVEQWMDFAATEVDPGVAWYLYPRLGYLPYVSTTEETAISSLKRSLGALNTHLASNTYLVGHAVTLADIVMTCNLYHGIARILTKTFTSDFPHVERYFWTMVNQPNFKKVIGEVKQAESAPPIPKKAAPSKEPKAKDVKKEAPKEAPKPKVVEAPAEEEAPKPKPKNPLDLLPPSKMVLDDWKRLYSNTKTNFREVAIKGFWDMYDPEGYSLWFCDYKYNDENTVSFVTLNKDVPKFVMDEVYDMELYEWTKVDISDEAQKERVNAMIEDQEPFEGEALLDAKCFK

SEQ ID NO: 185342 - protein, 412 aa, Zea Mays
MALVLHSGAGNKNAFKALIAAEYSGIKVELTKDFEMGVSNKTPEFLKMNPLGKTPDGPVFESNAIARYVARLKDDNPLFGSSRIEQAHVEQWMDFAATEVDPGVAWYLYPRLGYLPYVSTTEETAISSLKRSLGALNTHLASNTYLVGHAVTLADIVMTCNLYHGIARILTKTFTSDFPHVERYFWTMVNQPNFKKVIGEVKQAESAPPIPKKAAPSKEPKAKDVKKEAPKEAPKPKVVEAPAEEEAPKPKPKNPLDLLPPSKMVLDDWKRLYSNTKTNFREVAIKGFWDMYDPEGYSLWFCDYKYNDENTVSFVTLNKVGGFLQRMDLCRKYAFGKMLVIGSEPPFKLKGLWLFRGQDVPKFVMDEVYDMELYEWTKVDISDEAQKERVNAMIEDQEPFEGEALLDAKCFK

SEQ ID NO: 185343 - protein, 410 aa, Zea Mays
MALVLHSGAGNKNAFKALIAAEYSGIKVELTKDFEMGVSNKTPEFLKMNPLGKVPVLETPDGPVFEIARLKDDNPLFGSSRIEQAHVEQWMDFAATEVDPGVAWYLYPRLGYLPYVSTTEETAISSLKRSLGALNTHLASNTYLVGHAVTLADIVMTCNLYHGIARILTKTFTSDFPHVERYFWTMVNQPNFKKVIGEVKQAESAPPIPKKAAPSKEPKAKDVKKEAPKEAPKPKVVEAPAEEEAPKPKPKNPLDLLPPSKMVLDDWKRLYSNTKTNFREVAIKGFWDMYDPEGYSLWFCDYKYNDENTVSFVTLNKVGGFLQRMDLCRKYAFGKMLVIGSEPPFKLKGLWLFRGQDVPKFVMDEVYDMELYEWTKVDISDEAQKERVNAMIEDQEPFEGEALLDAKCFK

SEQ ID NO: 185344 - protein, 274 aa, Zea Mays
MGVSNKTPEFLKMNPLGKVPVLETPDGPVFESNAIARYVARLKDDNPLFGSSRIEQAHVEQWMDFAATEVDPGVAWYLYPRLGYLPYVSTTEETAISSLKRSLGALNTHLASNTYLVGHAVTLADIVMTCNLYHGIARILTKTFTSDFPHVERYFWTMVNQPNFKKVIGEVKQAESAPPIPKKAAPSKEPKAKDVKKEAPKEAPKPKVVEAPAEEEAPKPKPKNPLDLLPPSKMVLDDWKRLYSNTKTNFREVAIKADGPVPQVRLWEDARDRL

SEQ ID NO: 185345 - protein, 436 aa, Zea Mays
MGLVKEGVDMEEGTLEIGMEYRTVSGVAGPLVILDKVKGPKYQEIVNIRLGDGTTRRGQVLEVDGEKAVVQVFEGTSGIDNKYTTVQFTGEVLKTPVSLDMLGRIFNGSGKPIDNGPPILPEAYLDISGSSINPSERTYPEEMIQTGISTIDVMNSIARGQKIPLFSAAGLPHNEIAAQICRQAGLVKTLEKGKHAEGGEDDNFAIVFAAMGVNMETAQFFKRDFEENGSMERVTLFLNLANDPTIERIITPRIALTTAEYLAYECGKHVLVILTDMSSYADALREVSAAREEVPGRRGYPGYMYTDLATIYERAGRIEGRTGSITQIPILTMPNDDITHPTPDLTGYITEGQIYIDRQLHNRQIYPPINVLPSLSRLMKSAIGEGMTRRDHSDVSNQLYANYAIGKDVQAMKAVVGEEALSSEDLSSLTSLRGSL

SEQ ID NO: 185346 - protein, 279 aa, Zea Mays
MWWNCLCLPWATGSIIGPGGFSFVNEMVQVETVAQFGVIFLLFALGLEFSTAKLRVVRAVAVLGGLLQIMLFMFLCGILATLCGGKTKEGVFVGVLLSMSSTAVVLKFLMERNSINALHGQVTVGILILQDCAVGLLFALLPILSGTSGLLHGVASMMKSLVVLITFLTILSILSRTGVPWFLKLMISLSSQTNELYQLAAVAFCLLFAWCSDKLGLSLELGSFAAGVMISTTDLAQHTLEQVTFYMYLACFFCPLSRKRGELLSTTPSFKPQATLALF

SEQ ID NO: 185347 - protein, 613 aa, Zea Mays
MLTRRRSNHPGCSFPLPFLVCGLLLAAAVAFSPAAAAEAADGGAGHEGRAGKPEVEAEAEARGDGVAVAEAGGEVVAQGNATEAKEGSLADMIDRALEKEFPESEGEQGGGETDPGSFNNTVAEKQGVLETVARRVTKKNETKDNKSFPFKEVFLDRTEQEDVPTLIDRKDNVFIISNPKSKYPVLQLDLRLISDLVVVIVSATCGGIAFACLGQPVITGYLLAGSIIGPGGFSFVNEMVQVETVAQFGVIFLLFALGLEFSTAKLRVVRAVAVLGGLLQIMLFMFLCGILATLCGGKTKEGVFVGVLLSMSSTAVVLKFLMERNSINALHGQVTVGILILQDCAVGLLFALLPILSGTSGLLHGVASMMKSLVVLITFLTILSILSRTGVPWFLKLMISLSSQTNELYQLAAVAFCLLFAWCSDKLGLSLELGSFAAGVMISTTDLAQHTLEQIEPIRNFFAALFLASIGMLINVHFLWNHVDILLAAVILVITVKTFIVAIVVKGFGYSNKTSLLVGMSLAQIGEFAFVLLSRASSIHLIEGKLYLLLLGTTALSLVTTPLLFKMIPAMVHLGVLLRWFSVDTNQLGLKNDVLRIDSGKRINLIVQGSHDS

SEQ ID NO: 185348 - protein, 491 aa, Zea Mays
MLTRRRSNHPGCSFPLPFLVCGLLLAAAVAFSPAAAAEAADGGAGHEGRAGKPEVEAEAEARGDGVAVAEAGGEVVAQGNATEAKEGSLADMIDRALEKEFPESEGEQGGGETDPGSFNNTVAEKQGVLETVARRVTKKNETKDNKSFPFKEVFLDRTEQEDVPTLIDRKDNVFIISNPKSKYPVLQLDLRLISDLVVVIVSATCGGIAFACLGQPVITGYLLAGSIIGPGGFSFVNEMVQVETVAQFGVIFLLFALGLEFSTAKLRVVRAVAVLGGLLQIMLFMFLCGILATLCGGKTKEGVFVGVLLSMSSTAVVLKFLMERNSINALHGQVTVGILILQDCAVGLLFALLPILSGTSGLLHGVASMMKSLVVLITFLTILSILSRTGVPWFLKLMISLSSQTNELYQLAAVAFCLLFAWCSDKLGLSLELGSFAAGVMISTTDLAQHTLEQVTFYMYLACFFCPLSRKRGELLSTTPSFKPQATLALF

SEQ ID NO: 185349 - protein, 218 aa, Zea Mays
MLTRRRSNHPGCSFPLPFLVCGLLLAAAVAFSPAAAAEAADGGAGHEGRAGKPEVEAEAEARGDGVAVAEAGGEVVAQGNATEAKEGSLADMIDRALEKEFPESEGEQGGGETDPGSFNNTVAEKQGVLETVARRVTKKNETKDNKSFPFKEVFLDRTEQEDVPTLIDRKDNVFIISNPKSKYPVLQLDLRLISDLVVVIVSATCGGIAFACLGQPDL

SEQ ID NO: 185350 - protein, 489 aa, Zea Mays
MLTRRRSNHPGCSFPLPFLVCGLLLAAAVAFSPAAAAEAADGGAGHEGRAGKPEVEAEAEARGDGVAVAEAGGEVVAQGNATEAKEGSLADMIDRALEKEFPESEGEQGGGVACANLSSGFAETDPGSFNNTVAEKQGVLETVARRVTKKNETKDNKSFPFKEVFLDRTEQEDVPTLIDRKDNVFIISNPKSKYPVLQLDLRLISDLVVVIVSATCGGIAFACLGQPVITGYLLAGSIIGPGGFSFVNEMVQVETVAQFGVIFLLFALGLEFSTAKLRVVRAVAVLGGLLQIMLFMFLCGILATLCGGKTKEGVFVGVLLSMSSTAVVLKFLMERNSINALHGQVTVGILILQDCAVGLLFALLPILSGTSGLLHGVASMMKSLVVLITFLTILSILSRTGVPWFLKLMISLSSQTNELYQLAAVAFCLLFAWCSDKLGLSLELGSFAAGVMISTTDLAQHTLEQACSFCRSNPSATFSLLFSLPALGC

SEQ ID NO: 185351 - protein, 574 aa, Zea Mays
MLTRRRSNHPGCSFPLPFLVCGLLLAAAVAFSPAAAAEAADGGAGHEGRAGKPEVEAEAEARGDGVAVAEAGGEVVAQGNATEAKEGSLADMIDRALEKEFPESEGEQGGGVACANLSSGFAETDPGSFNNTVAEKQGVLETVARRVTKKNETKDNKSFPFKEVFLDRTEQEDVPTLIDRKDNVFIISNPKSKYPVLQLDLRLISDLVVVIVSATCGGIAFACLGQPVITGYLLAGSIIGPGGFSFVNEMVQVETVAQFGVIFLLFALGLEFSTAKLRVVRAVAVLGGLLQIMLFMFLCGILATLCGGKTKEGVFVGVLLSMSSTAVVLKFLMERNSINALHGQVTVGILILQDCAVGLLFALLPILSGTSGLLHGVASMMKSLVVLITFLTILSILSRTGVPWFLKLMISLSSQTNELYQLAAVAFCLLFAWIEPIRNFFAALFLASIGMLINVHFLWNHVDILLAAVILVITVKTFIVAIVVKGFGYSNKTSLLVGMSLAQIGEFAFVLLSRASSIHLIEGKLYLLLLGTTALSLVTTPLLFKMIPAMVHLGVLLRWFSVDTNQVEVHDHTS

SEQ ID NO: 185352 - protein, 1245 aa, Zea Mays
MEGVENSLQTDYTLRILGLDICADTIVGDQMQRGISGGQKKRVTTANDTVECHILRFDRAAKKKKRAPCFCAVPLRSTHTRDTVPLIGTQQLVAYHLVVQGFQGEMIVGPTKVLFMDEISTGLDSSTTFQIVKCLQQIVHLGEATILMSLLQPAPETFDLFDDIILLSEGQIVYQGPREYVLEFFDSCGFCCPERKGTADFLQEVTSRKDQEQYWADKQMPYRYVSVPEFAQRFKRFHVGLQLENHLSLPFDKSRCHQAALVFSKHSVSTTELLKASFDKEWLLIKRNSFVYIFKTIQLIIVALIASTVFLRTHMHTTNLDDGFVYIGALLFTLIVNMFNGFAELSLTITRLPVFYKHRDLLFYPAWVFTVPNVILRIPFSIIESIVWVLVTYYTIGFAPDADRFFKHLLLVFLIQQMAGGLFRATAGLCRSMIIAQTGGALFLLIFFVLGGFVLPKVFIPNWWIWGYWISPLMYGYNALAVNEFYAPRWMNKFVLDQNGVPKRLGIAMLEGANIFVDKNWYWIGAAGLLGFTIFFNVLFTLSLMYLNPLGKPQAVISEETAKEAEGNGHSKGAIRNGSTKPKDGSHNSLVISEEMKEMRLSARLSNCSSNGVSRLMSIGSNEAAPTRGMVLPFNPLAMSFDNVNYYVDMPAEMKHQGVQDDRLQLLREVTGSFRPGVLTALMGVSGAGKTTLMDVLAGRKTGGYIEGDIRIAGYPKNQATFARISGYCEQNDIHSPQVTVRESLIYSAFLRLPGKIGDQEITDDIKMQFVDEVMELVELDNLRDALVGLPGITGLSTEQRKRLTIAVELVANPSIIFMDEPTSGLDARAAAIVMRTVRNTVDTGRTVVCTIHQPSIDIFESFDELLLLKRGGQVIYSGKLGRNSQKMVEYFEAIPGVPKIKDKYNPATWMLEVSSVATEVRLKMDFAKYYETSDLYKQNKVLVNQLSQPEPGTSDLYFPTEYSQSTIGQFKACLWKQWLTYWRSPDYNLVRYSFTLLVALLLGSIFWRIGTNMEDATTLGMVIGAMYTAVMFIGINNCSTVQPVVSIERTVFYRERAAGMYSAMPYAIAQVVIEIPYVFVQTTYYTLIVYAMMSFQWTAVKFFWFFFISYFSFLYFTYYGMMAVSISPNHEVASIFAAAFFSLFNLFSGFFIPRPRIPGWWIWYYWICPLAWTVYGLIVTQYGDLEDLISVPGESEQTISYYVTHHFGYHRDFLPVIAPVLVLFAVFFAFLYAVCIKKLNFQQR

SEQ ID NO: 185353 - protein, 1210 aa, Zea Mays
MQRGISGGQKKRVTTANDTVECHILRFDRAAKKKKRAPCFCAVPLRSTHTRDTVPLIGTQQLVAYHLVVQGFQGEMIVGPTKVLFMDEISTGLDSSTTFQIVKCLQQIVHLGEATILMSLLQPAPETFDLFDDIILLSEGQIVYQGPREYVLEFFDSCGFCCPERKGTADFLQEVTSRKDQEQYWADKQMPYRYVSVPEFAQRFKRFHVGLQLENHLSLPFDKSRCHQAALVFSKHSVSTTELLKASFDKEWLLIKRNSFVYIFKTIQLIIVALIASTVFLRTHMHTTNLDDGFVYIGALLFTLIVNMFNGFAELSLTITRLPVFYKHRDLLFYPAWVFTVPNVILRIPFSIIESIVWVLVTYYTIGFAPDADRFFKHLLLVFLIQQMAGGLFRATAGLCRSMIIAQTGGALFLLIFFVLGGFVLPKVFIPNWWIWGYWISPLMYGYNALAVNEFYAPRWMNKFVLDQNGVPKRLGIAMLEGANIFVDKNWYWIGAAGLLGFTIFFNVLFTLSLMYLNPLGKPQAVISEETAKEAEGNGHSKGAIRNGSTKPKDGSHNKEMKEMRLSARLSNCSSNGVSRLMSIGSNEAAPTRGMVLPFNPLAMSFDNVNYYVDMPAEMKHQGVQDDRLQLLREVTGSFRPGVLTALMGVSGAGKTTLMDVLAGRKTGGYIEGDIRIAGYPKNQATFARISGYCEQNDIHSPQVTVRESLIYSAFLRLPGKIGDQEITDDIKMQFVDEVMELVELDNLRDALVGLPGITGLSTEQRKRLTIAVELVANPSIIFMDEPTSGLDARAAAIVMRTVRNTVDTGRTVVCTIHQPSIDIFESFDELLLLKRGGQVIYSGKLGRNSQKMVEYFEAIPGVPKIKDKYNPATWMLEVSSVATEVRLKMDFAKYYETSDLYKQNKVLVNQLSQPEPGTSDLYFPTEYSQSTIGQFKACLWKQWLTYWRSPDYNLVRYSFTLLVALLLGSIFWRIGTNMEDATTLGMVIGAMYTAVMFIGINNCSTVQPVVSIERTVFYRERAAGMYSAMPYAIAQVVIEIPYVFVQTTYYTLIVYAMMSFQWTAVKFFWFFFISYFSFLYFTYYGMMAVSISPNHEVASIFAAAFFSLFNLFSGFFIPRPRIPGWWIWYYWICPLAWTVYGLIVTQYGDLEDLISVPGESEQTISYYVTHHFGYHRDFLPVIAPVLVLFAVFFAFLYAVCIKKLNFQQR

SEQ ID NO: 185354 - protein, 926 aa, Zea Mays
MHTTNLDDGFVYIGALLFTLIVNMFNGFAELSLTITRLPVFYKHRDLLFYPAWVFTVPNVILRIPFSIIESIVWVLVTYYTIGFAPDADRFFKHLLLVFLIQQMAGGLFRATAGLCRSMIIAQTGGALFLLIFFVLGGFVLPKVFIPNWWIWGYWISPLMYGYNALAVNEFYAPRWMNKFVLDQNGVPKRLGIAMLEGANIFVDKNWYWIGAAGLLGFTIFFNVLFTLSLMYLNPLGKPQAVISEETAKEAEGNGHSKGAIRNGSTKPKDGSHNKEMKEMRLSARLSNCSSNGVSRLMSIGSNEAAPTRGMVLPFNPLAMSFDNVNYYVDMPAEMKHQGVQDDRLQLLREVTGSFRPGVLTALMGVSGAGKTTLMDVLAGRKTGGYIEGDIRIAGYPKNQATFARISGYCEQNDIHSPQVTVRESLIYSAFLRLPGKIGDQEITDDIKMQFVDEVMELVELDNLRDALVGLPGITGLSTEQRKRLTIAVELVANPSIIFMDEPTSGLDARAAAIVMRTVRNTVDTGRTVVCTIHQPSIDIFESFDELLLLKRGGQVIYSGKLGRNSQKMVEYFEAIPGVPKIKDKYNPATWMLEVSSVATEVRLKMDFAKYYETSDLYKQNKVLVNQLSQPEPGTSDLYFPTEYSQSTIGQFKACLWKQWLTYWRSPDYNLVRYSFTLLVALLLGSIFWRIGTNMEDATTLGMVIGAMYTAVMFIGINNCSTVQPVVSIERTVFYRERAAGMYSAMPYAIAQVVIEIPYVFVQTTYYTLIVYAMMSFQWTAVKFFWFFFISYFSFLYFTYYGMMAVSISPNHEVASIFAAAFFSLFNLFSGFFIPRPRIPGWWIWYYWICPLAWTVYGLIVTQYGDLEDLISVPGESEQTISYYVTHHFGYHRDFLPVIAPVLVLFAVFFAFLYAVCIKKLNFQQR

SEQ ID NO: 185355 - protein, 1140 aa, Zea Mays
MIVGPTKVLFMDEISTGLDSSTTFQIVKCLQQIVHLGEATILMSLLQPAPETFDLFDDIILLSEGQIVYQGPREYVLEFFDSCGFCCPERKGTADFLQEVTSRKDQEQYWADKQMPYRYVSVPEFAQRFKRFHVGLQLENHLSLPFDKSRCHQAALVFSKHSVSTTELLKASFDKEWLLIKRNSFVYIFKTIQLIIVALIASTVFLRTHMHTTNLDDGFVYIGALLFTLIVNMFNGFAELSLTITRLPVFYKHRDLLFYPAWVFTVPNVILRIPFSIIESIVWVLVTYYTIGFAPDADRFFKHLLLVFLIQQMAGGLFRATAGLCRSMIIAQTGGALFLLIFFVLGGFVLPKVFIPNWWIWGYWISPLMYGYNALAVNEFYAPRWMNKFVLDQNGVPKRLGIAMLEGANIFVDKNWYWIGAAGLLGFTIFFNVLFTLSLMYLNPLGKPQAVISEETAKEAEGNGHSKGAIRNGSTKPKDGSHNSLVISEEMKEMRLSARLSNCSSNGVSRLMSIGSNEAAPTRGMVLPFNPLAMSFDNVNYYVDMPAEMKHQGVQDDRLQLLREVTGSFRPGVLTALMGVSGAGKTTLMDVLAGRKTGGYIEGDIRIAGYPKNQATFARISGYCEQNDIHSPQVTVRESLIYSAFLRLPGKIGDQEITDDIKMQFVDEVMELVELDNLRDALVGLPGITGLSTEQRKRLTIAVELVANPSIIFMDEPTSGLDARAAAIVMRTVRNTVDTGRTVVCTIHQPSIDIFESFDELLLLKRGGQVIYSGKLGRNSQKMVEYFEAIPGVPKIKDKYNPATWMLEVSSVATEVRLKMDFAKYYETSDLYKQNKVLVNQLSQPEPGTSDLYFPTEYSQSTIGQFKACLWKQWLTYWRSPDYNLVRYSFTLLVALLLGSIFWRIGTNMEDATTLGMVIGAMYTAVMFIGINNCSTVQPVVSIERTVFYRERAAGMYSAMPYAIAQVVIEIPYVFVQTTYYTLIVYAMMSFQWTAVKFFWFFFISYFSFLYFTYYGMMAVSISPNHEVASIFAAAFFSLFNLFSGFFIPRPRIPGWWIWYYWICPLAWTVYGLIVTQYGDLEDLISVPGESEQTISYYVTHHFGYHRDFLPVIAPVLVLFAVFFAFLYAVCIKKLNFQQR

SEQ ID NO: 185356 - protein, 525 aa, Zea Mays
MEIERRISTQAEHIRNQNSLIRAREEKYKSRIRVLEALASGTGGQMQINSSAANGKINIAEDHVLQMMINKSKIGERRLVDKDMSSLMAQKEDVARLTKDKEDMVRLLKDKEDIIRLMKEKEEMVLLIKEKDDMVTSRKEKIDGRDQSANAYANKSTTYNDETIRMIKEKEDSNITIMKLKSKLEAVKSLFEESHNQLESAKEEVLKLQKDKENSANIISKLRQELSLAHESYKTHIQELESSALQASKFFEHRIKEVDLMLEDSIKKRTDLEEVLKSRMDTWKKKEIMVNQVLRLQIQSIQDLRLSSVSIRHEIQNCQRRWSEELNGLGQSLNILINDSENYHAALEENRKLYNEIQELKGNIRVYCRIRPFIPGEDQKSTTIKYVGDNGDLIIANPTRHGKEGSKSFKFNKVFGPTTSQDDVFKDIEPLIRSVLDGYNVCIFAYGQTGSGKTYTMTGPENATENEWGVNYRALNDLFHISHNRGDTIMYEINVQMIEIYNEQIRDLLCSNGSEKKYPFPLHLF

SEQ ID NO: 185357 - protein, 512 aa, Zea Mays
MEIERRISTQAEHIRNQNSLIRAREEKYKSRIRVLEALASGTGGQMQINSSAANGKINIAEDHVLQMMINKSKIGERRLVDKDMSSLMAQKEDVARLTKDKEDMVRLLKDKEDIIRLMKEKEEMVLLIKEKDDMVTSRKEKIDGRDQSANAYANKSTTYNDETIRMIKEKEDSNITIMKLKSKLEAVKSLFEESHNQLESAKEEVLKLQKDKENSANIISKLRQELSLAHESYKTHIQELESSALQASKFFEHRIKEVDLMLEDSIKKRTDLEEVLKSRMDTWKKKEIMDLRLSSVSIRHEIQNCQRRWSEELNGLGQSLNILINDSENYHAALEENRKLYNEIQELKGNIRVYCRIRPFIPGEDQKSTTIKYVGDNGDLIIANPTRHGKEGSKSFKFNKVFGPTTSQDDVFKDIEPLIRSVLDGYNVCIFAYGQTGSGKTYTMTGPENATENEWGVNYRALNDLFHISHNRGDTIMYEINVQMIEIYNEQIRDLLCSNGSEKKYPFPLHLF

SEQ ID NO: 185358 - protein, 738 aa, Zea Mays
MALGLGRGKGRRQGVVAAHQQGTTFPRHPHVAHSPTSPSVFPIRARPFLLHVSRLPVANYASVSDPGTAAQFEAPNSPERRSDAVAWLRSLLAGSGLPLPPPHVSDDDLRSFLADGVILGAALRRLGCASTSNQGGASAAAAAGSDVERFVAAMERLGLPSFAASDHDRGPMLAVIVCLLALRGLFGSNVGEGLHCSLEAKSRMHNMEFPIRVNGCCTQNCQSREKGEGSIPKVSRSPATSEPSSPISMPELSSISRHTRHNFHEVFHLRQGIYSDMPISKVLEIMKSTNLDNIACLLRKVIMEIERRISTQAEHIRNQNSLIRAREEKYKSRIRVLEALASGTGGQMQINSSAANGKINIAEDHVLQMMINKSKIGERRLVDKDMSSLMAQKEDVARLTKDKEDMVRLLKDKEDIIRLMKEKEEMVLLIKEKDDMVTSRKEKIDGRDQSANAYANKSTTYNDETIRMIKEKEDSNITIMKLKSKLEAVKSLFEESHNQLESAKEEVLKLQKDKENSANIISKLRQELSLAHESYKTHIQELESSALQASKFFEHRIKEVDLMLEDSIKKRTDLEEVLKSRMDTWKKKEIMDLRLSSVSIRHEIQNCQRRWSEELNGLGQSLNILINDSENYHAALEENRKLYNEIQELKGNIRVYCRIRPFIPGEDQKSTTIKYVGDNGDLIIANPTRHGKEGSKSFKFNKVFGPTTSQGRNEFDICNIPMLLILIASLYLVRIVYL

SEQ ID NO: 185359 - protein, 545 aa, Zea Mays
MALGLGRGKGRRQGVVAAHQQGTTFPRHPHVAHSPTSPSVFPIRARPFLLHVSRLPVANYASVSDPGTAAQFEAPNSPERRSDAVAWLRSLLAGSGLPLPPPHVSDDDLRSFLADGVILGAALRRLGCASTSNQGGASAAAAAGSDVERFVAAMERLGLPSFAASDHDRGPMLAVIVCLLALRGLFGSNVGEGLHCSLEAKSRMHNMEFPIRVNGCCTQNCQSREKGEGSIPKVSRSPATSEPSSPISMPELSSISRHTRHNFHEVFHLRQGIYSDMPISKVLEIMKSTNLDNAPTQSLLSFVNAILDRIIENENGEIPYNIACLLRKVIMEIERRISTQAEHIRNQNSLIRAREEKYKSRIRVLEALASGTGGQMQINSSAANGKINIAEDHVLQMMDLRLSSVSIRHEIQNCQRRWSEELNGLGQSLNILINDSENYHAALEENRKLYNEIQELKGNIRVYCRIRPFIPGEDQKSTTIKYVGDNGDLIIANPTRHGKEGSKSFKFNKVFGPTTSQGRNEFDICNIPMLLILIASLYLVRIVYL

SEQ ID NO: 185360 - protein, 722 aa, Zea Mays
MSATTTESPESPERRSDAVAWLRSLLAGSGLPLPPPHVSDDDLRSFLADGVILGAALRRLGCASTSNQGGASAAAAAGSDVERFVAAMERLGLPSFAASDHDRGPMLAVIVCLLALRGLFGSNVGEGLHCSLEAKSRMHNMEFPIRVNGCCTQNCQSREKGEGSIPKVSRSPATSEPSSPISMPELSSISRHTRHNFHEVFHLRQGIYSDMPISKVLEIMKSTNLDQNSLIRAREEKYKSRIRVLEALASGTGGQMQINSSAANGKINIAEDHVLQMMINKSKIGERRLVDKDMSSLMAQKEDVARLTKDKEDMVRLLKDKEDIIRLMKEKEEMVLLIKEKDDMVTSRKEKIDGRDQSANAYANKSTTYNDETIRMIKEKEDSNITIMKLKSKLEAVKSLFEESHNQLESAKEEVLKLQKDKENSANIISKLRQELSLAHESYKTHIQELESSALQASKFFEHRIKEVDLMLEDSIKKRTDLEEVLKSRMDTWKKKEIMDLRLSSVSIRHEIQNCQRRWSEELNGLGQSLNILINDSENYHAALEENRKLYNEIQELKGNIRVYCRIRPFIPGEDQKSTTIKYVGDNGDLIIANPTRHGKEGSKSFKFNKVFGPTTSQDDVFKDIEPLIRSVLDGYNVCIFAYGQTGSGKTYTMTGPENATENEWGVNYRALNDLFHISHNRGDTIMYEINVQMIEIYNEQIRDLLCSNGSEKKYPFPLHLF

SEQ ID NO: 185361 - protein, 789 aa, Zea Mays
MSATTTESPESPERRSDAVAWLRSLLAGSGLPLPPPHVSDDDLRSFLADGVILGAALRRLGCASTSNQGGASAAAAAGSDVERFVAAMERLGLPSFAASDHDRGPMLAVIVCLLALRGLFGSNVGEGLHCSLEAKSRMHNMEFPIRVNGCCTQNCQSREKGEGSIPKVSRSPATSEPSSPISMPELSSISRHTRHNFHEVFHLRQGIYSDMPISKVLEIMKSTNLDNAPTQSLLSFVNAILDRIIENENGEIPYNIACLLRKVIMEIERRISTQAEHIRNQNSLIRAREEKYKSRIRVLEALASGTGGQMQINSSAANGKINIAEDHVLQMMINKSKIGERRLVDKDMSSLMAQKEDVARLTKDKEDMVRLLKDKEDIIRLMKEKEEMVLLIKEKDDMVTSRKEKIDGRDQSANAYANKSTTYNDETIRMIKEKEDSNITIMKLKSKLEAVKSLFEESHNQLESAKEEVLKLQKDKENSANIISKLRQELSLAHESYKTHIQELESSALQASKFFEHRIKEVDLMLEDSIKKRTDLEEVLKSRMDTWKKKEIMVNQVLRLQIQSIQDLRLSSVSIRHEIQNCQRRWSEELNGLGQSLNILINDSENYHAALEENRKLYNEIQELKGNIRVYCRIRPFIPGEDQKSTTIKYVGDNGDLIIANPTRHGKEGSKSFKFNKVFGPTTSQDDVFKDIEPLIRSVLDGYNVCIFAYGQTGSGKTYTMTGPENATENEWGVNYRALNDLFHISHNRGDTIMYEINVQMIEIYNEQIRDLLCSNGSEKKYPFPLHLF

SEQ ID NO: 185362 - protein, 111 aa, Zea Mays
MLSAEALGPFHLTSTTIVALSCAGAASLSSSASAAGFLLLQSSPHPDPASNPISLPSRGPHPPRFSTMTAALPSVTARSIETSAEALGPFHLTSMATMALSFVAPGASHSG

SEQ ID NO: 185363 - protein, 63 aa, Zea Mays
MCVLEMVTFEYPHNECTHQIHIYKKVISVRRSLDPMSHFTTIVIQGAMLLALLIGYQALIGYD

SEQ ID NO: 185364 - protein, 394 aa, Zea Mays
MLHRSNSRNQRNRGSRIKTLLQATLLIGVIFWLLYQGRKEKADHHSDTFNYNEKTGETVFDKDSTNLNEDDKRNTERSEAEGQVNSADGNTEVNNNNNEDETTGHAEEGKHDTESNSAAESKSEVNSTGDDMSRNNYAQEENTGEASGTSHEVVQGEQSTSASGSGNGSDGDGEKNEAVDIKSGSESLPDDAKAEATDDRATVSLPDETGNIPSVHTDNSQNDASENQGDATYTTSDSSEHGIVEAVHIETGLEDESATASSGTGSGDDNGNSSDSASAEENTETVSGDDEKGMGTGTTTEASYSIQQNSENSSVSAEAENSQGDSSSGVNGSSEETSNKGDGATETYNKGEQVDPKIETSTSTNAEHNESQGADGSSGSNGNGPEQTGKSESQ

SEQ ID NO: 185365 - protein, 131 aa, Zea Mays
MIKEEKVEAAIISIRSFSLPSVHPRPCYRHLRSLPILQYIFSTARAVGKAKGGHVVLSSAPRHPRRWWRRLLQSPFVSLRCSSTRLVVVSTVGPALNKANFPAAFEKELLKKNQVNRTFCKFYSKEVFSIQ

SEQ ID NO: 185366 - protein, 154 aa, Zea Mays
MIKEEKVEAAIISIRSFSLPSVHPRPCYRHLRSLPILQYIFSTARAVGKAKGGHVVLSSAPRHPRRWWRRLLQSPFVSLRCSSTRLVVVSTVGPGMNTLFPSNLPQICVLFVLGFASAPPHRALSLHSFTLGMEVVNSGRVGALYGSALLLVVQ

SEQ ID NO: 185367 - protein, 136 aa, Zea Mays
MIKEEKVEAAIISIRSFSLPSVHPRPCYRHLRSLPILQYIFSTARAVGKAKGGHVVLSSAPRHPRRWWRRLLQSPFVSLRCSSTRLVVVSTVGPALNKANFPAAFEKELLKKNQVIHYTLIFVVLLHYYFASTMKF

SEQ ID NO: 185368 - protein, 127 aa, Zea Mays
MIKEEKVEAAIISIRSFSLPSVHPRPCYRHLRSLPILQYIFSTARAVGKAKGGHVVLSSAPRHPRRWWRRLLQSPFVSLRCSSTRLVVVSTVGPAFEKELLKKNQVIHYTLIFVVLLHYYFASTMKF

SEQ ID NO: 185369 - protein, 82 aa, Zea Mays
MGGGGIASLAVRTCGSTSFSLSSHNLMGWMIAIAFSPTSRFCTPTKGQREVSTGARPCLRPAAPDNDPHRHFVRKHNIRTFL

SEQ ID NO: 185370 - protein, 87 aa, Zea Mays
MGWVLVMDLNGLIDPSELGMPNSCLAGCVDWLTFEARDPLIGSLLSSKPDEEVPYNCRRIILQSAAYHIHFFVLDFRVGQTFGKEKS

SEQ ID NO: 185371 - protein, 150 aa, Zea Mays
MAEHKSSSSVACCTSVELPTLAATPSPSPPWIWPSLHLSFQPWTATSPAYSRAPGCCFLYIVRLPGACSRPSPWSSSSHDTPSCRALDVFDEILQRAPTRSAQPLRDVTNSARCRCRASGIECSTKIPSPWTAHTQLKSDRPGTLIAHVL

SEQ ID NO: 185372 - protein, 187 aa, Zea Mays
MAEHKSSSSVACCTSVELPTLAATPSPSPPWIWPSLHLSFQPWTATSPAYSRSAPHLLNISAPCPISLSRATLLVLHGVDMGLAPATSPRWVSSGRRDAASYTSCASLVLALALVHGAAAATTLLRVAPSTCSMKYCSELQLDLHSPCATSQTPLVVDVVLRASSVRRKSQVHGQHIHNSNPIGQVR

SEQ ID NO: 185373 - protein, 95 aa, Zea Mays
MARRERERERESERYAPSSASGAAAVVGAGRRPGTAQAAWPRGAAAGATRARCGRSRSRRRWCPRTCRGARPRRPSAPAAPTSRRRRRRRSSSLL

SEQ ID NO: 185374 - protein, 118 aa, Zea Mays
MTRKRSLSSTSQETTSLLTQARVKRRGKGRRRGASRRSYTTTVMPRLLHHTTTMTLQKGKRSIKTIHLITLVFHLIQTLICYQFHLGNLHTLMEKTTLSRVIKCIVIYFLSILVSGNC

SEQ ID NO: 185375 - protein, 552 aa, Zea Mays
MGKVKQKVATAAEDIVLEDEDDAERSSENSVPPVILDLNQSFGEGSEEGEAGEDGSYDEEDGDCDGGSMSRVAGGSSSSNSSSTNHHTSMSNKNYDTNNSSSCKGEGSGETAQTVRQYNRSKLPRLRWTPDLHMAFVHAVERLGGQERATPKLVLQTMNVRGLSIAHVKSHLQMYRSKKLDHESAGAGHDRAAIYSVFKPMDLHMMMRRGDHRFHDMFLHRAAAAGSVISSPLLHNGDLFGSRDAVSPEASRLYALLQRRQQPSSTQTFALMNYSSSLIDMIDQVWTFSRHAAAAAAAARAGAIDDDHGPTKGLIHDMILRKDGRLTSHLFGLWDAIACNRTSSNAAGAASHGARVVTSTDWNGTCSSSRPLSVTMSAAASTGLAMGSHHLMSRGRGGSANDVTSLDHAVVTNEALGSRLQTLLERNNAAKLTGEEMCGGTRTKMLKTAMEGKNGGMQEPDLQLSFSPNDDMEGDANKQIKKRKIIDGIGFSQQEVDSDKSMLPLSLSLSLRGGDIGGEDAGRFEAAAGSGGKKAALGRSTLDLTMSIKALE

SEQ ID NO: 185376 - protein, 71 aa, Zea Mays
MLVSYSLSSSFPDSRLPPSPQPPPAWCPRRGLGPPPPRTVTIAAQPNSADPKPIAAAHRKKNSRGNRELSF

SEQ ID NO: 185377 - protein, 75 aa, Zea Mays
MAPSQNTRTEATTPAHKPQPPSTCRQRRSTGGARWSSARPWPRSAARWCSRRTRCCCSSSSWPRSSGSTSADRSR

SEQ ID NO: 185378 - protein, 253 aa, Zea Mays
MNSTVHSSPARHSLHCSRSPVPVAAMPAWPTTTRASGQAPAPRACQASSRARPRTQARPSQTALLLLAPHASLDSSRQFRETGHAGRRGSSWKREVGLRGPFGVPASSGGGPGKVPRGVQFRGLAGGRRQPGHGGHPGLPRHRAPALRPDLLRLPHRQVLRRPPRRRFHRAGVGPPAAAAVQGQERQLRAGRQLRHHRRHRARHRLLPEARARQHRVELRLPPHANPVAARPQAIALQLRARHTSSSPSACSS

SEQ ID NO: 185379 - protein, 441 aa, Zea Mays
MNSTVHSSPARHSLHCSRSPVPVAAMPAWPTTTRASGQAPAPRACQASSRARPRTQARPSQTALLLLAPHASLDSSRQFRETGHAGRRGSSWKREVGLRGPFGVPASSGGGPGKVPRGVQFRGLAGGRRQPGHGGHPGLPRHRAPALRPDLLRLPHRQVLRRPPRRRFHRAGVGPPAAAAVQGQERQLRAGRQLRHHRRHRARHRLLPEARARQHRVELRLPPHANPVAARPQAIALQLRARHTMQGVLRRVPVRRRRIRWERLQRPAVRRQGPQGGIQADVPRDPSHLRWSRRCFPVYLTMYADPKEGHGSRTGCLKRFNTFSWVHNAMLKRALVKLRAKHPGARIIYGDYFTPIIQFILQPKKFGFYKQPPRACCGAPGRGPYNFNLTAKCGEPGASACADPKTHWSWDGIHLTEAAYLHIARGWLHGPFADQPVVQAS

SEQ ID NO: 185380 - protein, 326 aa, Zea Mays
MPRLTPRANFGKQAMPGDGGAAGSARWVCAVLSVFPLLAAAAQGRYRAVFSFGDSLVDAGNLVTEGIPDYLATARPPYGQTYFGYPTGRCSDGRLVVDFIAQELGLPLPPPSKAKNASFAQGANFAITGATALDTDFFRKRGLGSTVWNSGSLRTQIQWLRDLKPSLCSSAQGTRCKEFFAECLFVVGEFGGNDYNAPLFAGKDLREAYKLTSHVIRAISDGVEQLIAEGAKDLIVPGVMPSGCFPVYLTMYADPKEGHGSRTGCLKRFNTFSWVHNAMLKRALVKLRAKHPGARIIYGDYFTPIIQFILQPKKFGELLGFLFALH

SEQ ID NO: 185381 - protein, 92 aa, Zea Mays
MPRIPLIRFPKRNLKAPSPSAPAASQPADQHATLMFRLAEAPSSGEIKNYRFRSDVPCPPSHTAVGGPASLLPKRKPLTEEEIEAIMLGGSI

SEQ ID NO: 185382 - protein, 91 aa, Zea Mays
MPRIPLIRFPKRNLKAPSPSAPAASQPADQHATLMFRLEAPSSGEIKNYRFRSDVPCPPSHTAVGGPASLLPKRKPLTEEEIEAIMLGGSI

SEQ ID NO: 185383 - protein, 89 aa, Zea Mays
MPRIPLIRFPKRNLKAPSPSAPDQHATLMFRLGAKAEAPSSGEIKNYRFRSDVPCPPSHTAVGGPASLLPKRKPLTEEEIEAIMLGGSI

SEQ ID NO: 185384 - protein, 152 aa, Zea Mays
MARPFSSPHIPSSSWVTRRPPPWTSSPSVSTTRTSASSITACRPRRRAVAPAASLHLGPGEIAELARNKVLIAATVASAIGQLSKPFTSVKNGGVGAGLDLRTVFRSGGMPSTHSASVVAVATSLGLERFSVQGVCRLHIWNVSGVCSNCNV

SEQ ID NO: 185385 - protein, 150 aa, Zea Mays
MARPFSSPHIPSSSWVTRRPPPWTSSPSVSTTRTSASSITACRPRRRAVAPAASLHLGPGEIAELARNKVLIAATVASAIGQLSKPFTSVKNGGVGAGLDLRTVFRSGGMPSTHSASVVAVATSLGLESVQGVCRLHIWNVSGVCSNCNV

SEQ ID NO: 185386 - protein, 128 aa, Zea Mays
MSVVFAAIVMYDAQGVRREVGNHAKVLNRFWILKEKAPLEYSEVDMAAPEFVSVSEEASSNASPSLKRGCSTESPRVNGLRGSELTELKQAYVEEDYRLSESVGHTELQVTVGALLGFAVSLAVYATL

SEQ ID NO: 185387 - protein, 222 aa, Zea Mays
MAPSSRRACHGWAWALTMVVVLALSASSADDAACDLFRGRWVADKSYPLYDASACPFVPDVFDCRRNGRPDDAYLKFRWSPANNCQLPRFDGADFLRRWRGKTVMFVGDSLSMNQWVSLACMLHAAAPAPVRATFTSGEPVSAVRFEVRSVAVVTRLRPVTGALPHHVPGGRRAGGHRPGAEAGLHAQRQRLARRAPARLQHVALVDLQGRQPSVGLRAGRE

SEQ ID NO: 185388 - protein, 300 aa, Zea Mays
MAKSLRDIHQQLHLSRLRRTSRNCSRHKYFQVFQLRHFRSSFEWRPWETISQQTWSQTRRSSAPLLFVLATDLLQSIVNKACDCGILRLPLSNTCGSDFPIIQYADDTILIMEACPKQLFFLKAMLNSFAESTELHVNYHKSNIYPINVTDQKMKILANTFHCKIGSMLFTYLGLPLGLQRPNLGAFLPLIQKIEKRLASTSVFLSQAGRLQMINAVFSLPTYYMSILKLPKMVIKHIDKFRRHCLWRGADLNAKKHPQVAWKTVCKPKFQGGLGVINLELQNKALLMKNLHKFYNRADI

SEQ ID NO: 185389 - protein, 837 aa, Zea Mays
MPRLFVTLIAVAVAAVSSVDSHATDRAALLAFKSGVRGNLSDWGSRSPRMCNWTGVTCDSTGRVTRLLLKNSNLSGVISPSIGNLSALRKLDLRFNHLSGTIPRELGMLSQLLELRLGHNSLTGTIPEAVVCNCTSLTSIILSNNSLTGEIPFSARCRLPRLQQLSLYENRLEGGIPSPMSNFTSLSWVLLQYNRLGGVLPSQMFSKMPSLRYLYLSGNSFSSDGGNTDLEPFLASLANCTGLQELGVGSNGIGGEIPAVIGNLSSANLSLLYLDDNEITGAIPRAIGNLASLTDLELQDNMLEGPIPSELFHPRGLTKIVLSNNQINAEIPKSIGLLAQQLATISISNSGLRGEIPETLSNLTNLDYVLLDHNQLSGAIPPGGLSCQMILDLSYNKLTGQIPSGMPGLLGSFNMYLNLSNNLLEGPVSSLEFGSMEMIQALDLSGNKLSGGLPSSMGALKNLRFLDVSSNGLTGVIPRSLQGLPLQFANFSHNNFTGEVCGGGSFANLTGDSFLGNPGLCGSVPGMAPCGGRKRGRFLYIAIGVVVAVAVGLLAMVCAVVDHYLMRSSRSRLAMAAPSSLLPRFSTTGLVKATGDGEKESGEHPRISYWELADATDGFSEVNLIGKGGYGHVYRGVLHGESETVIAVKVLRQDQAAGGEVVAGSFERECRVLRSIRHRNLIRVVTACSTPEFKAVVLPFMPNGSLDSLIHGPPAAAAGGPRHLGLDLDLLLGVASNVAEGMAYLHHHAPVKVVHCDLKPSNVLLDGDMTAVVSDFGISKLVATDDGARGPEVTGEASTSSVCNSITRLLQGSVGYIAPGMAWEAALRRKATCTASG

SEQ ID NO: 185390 - protein, 59 aa, Zea Mays
MLQRRHSFTVYVIVLFIQVRQCTRAKLCMKLLWACLVQLFFLPAFLRIWLWRESSCGKN

SEQ ID NO: 185391 - protein, 211 aa, Zea Mays
MDQLTMSESTWSRDFDEAIRFEPFIEHQVCVILPKINIRQEHRCRSSQHATSTGPLILLNGELQGRIASGHEETTIAGSELAARHDVTVVFRELGNHDVRSRRTAGASPTENSRASDARELGTVEHATKEWWGIDYEIKNHGIHISQHGEGYRALIPEIWFSFSLCFLNEKKQTTNYSEGSSHPLSHGGSPPWNQPSQRQGDYSYMKRLFR

SEQ ID NO: 185392 - protein, 560 aa, Zea Mays
MSGAALCAALTELGFDGEDPLDADALEWPFQYEEARPLLAWICSCLRPSNVLSPSHLAQYEQLVEEGRLLEGEDLDSAFDSISAFSSKKDNQEAVFGSEETILDIREAKLAYRAEVFELQKQLVRQQAQFDLLAGQASTLIQGRRSRVSAMSAVSGELISLDEILSSRNLEGPFRLVAEEGKSKCSWVSLDDITNCLIRGDSEKSHHHQRVAELQRLRSIFATSERQWIEAQVENAKQQAILSILKAQVSSDEAHIHRDIHSLRRKGSELAGELSTLSQKVQALVSETIPCLCSELAQLQGTYILQGDYDLKVMRQEYYINRQKTFINHLVNQLARHQFLKIACQLERKNIASAYSLLRVIESELQSYLSAVNTRLGHYNSLIQAASEVREQGAIDDRDTFLHAVRDLLCIHSNVQATVPTYMSAHALVQQISALQSDLLSLQSELENTLPADRKRCINELCTLIQTVEQLLFASSTTAEPILTPWPLMRALDDMENANAQVEVSVEEVTKARTQKIKIFENRAHEVGRERQIFVDFFCNPERLKNQVRELTSRVKALQD

SEQ ID NO: 185393 - protein, 783 aa, Zea Mays
MDLVASPSRSKSKPRSSPAKPVAAPAESRMDLCTPSKPTPRRKSKTTASPAPMSPATPSTVRRSRRLLETPTKASPEVQVKATPISRAKRTAPSPKTPVQRETKRQRRHPRKRAYYRKVVYDGGEFEVGDDVYVKRRETAESDAEDPEEEECRVCFRTGGGVMVECDACLGGFHLRCVRPPLRRVPEGDWACPYCEAERAGKVVERPRPPEGKRVVRTAKEKLLSSDLWAARIESLWREPDGTFWAKVRWYIIPEETAAGRQLHNLRRELYRTNDLADIEMETILRHCSIMCPKDFRDANNGGDDVFYCEYEYDIHWHNFKRLADIDDEPETKEDLSDEPYNAGDDYNSDTDEDSDYDEEEESTSSFSVRRNQSHESAANSRKGRIYGLQKIGIQKIPEHARCHQKTELEKAKATLLLATLPKSLPCRDKEMDEISIFVKDAICNNQCLGRCLYIHGVPGTGKTMSVLAVMRRLRSEFDSGTLRPYCFIEINGLKLASPENIYKGGTKIGKQANQPIVLLIDELDLLMTRNQSVLYNILDWPTKPNSNLVVIGIANTMDLPEKLLPRISSRMGIQRLCFGPYNYRQLQEIITSRLKGIDAFEEQAIEFASRKVAAMSGDARRALEICRRAAEFADYRVKQSRQSAQTTVSAKKGDAVVSMGDIEAAIQEVFQAPHIQVMKNCPKFGKVILVAMVHELYKSGLGEIMFDKLATTVFSWCHANRELLPGYDTLLKICCKLGESKIILCEEGSKHKLQKVQLNYPSDDVTFALKESPDLPWLSKYL

SEQ ID NO: 185394 - protein, 647 aa, Zea Mays
MDLVASPSRSKSKPRSSPAKPVAAPAESRMDLCTPSKPTPRRKSKTTASPAPMSPATPSTVRRSRRLLETPTKASPEVQVKATPISRAKRTAPSPKTPVQRETKRQRRHPRKRAYYRKVVYDGGEFEVGDDVYVKRRETAESDAEDPEEEECRVCFRTGGGVMVECDACLGGFHLRCVRPPLRRVPEGDWACPYCEAERAGKVVERPRPPEGKRVVRTAKEKLLSSDLWAARIESLWREPDGTFWAKVRWYIIPEETAAGRQLHNLRRELYRTNDLADIEMETILRHCSIMCPKDFRDANNGGDDVFYCEYEYDIHWHNFKRLADIDDEPETKEDLSDEPYNAGDDYNSDTDEDSDYDEEEESTSSFSVRRNQSHESAANSRKGRIYGLQKIGIQKIPEHARCHQKTELEKAKATLLLATLPKSLPCRDKEMDEISIFVKDAICNNQCLGRCLYIHGVPGTGKTMSVLAVMRRLRSEFDSGTLRPYCFIEINGLKLASPENIYKVVYEQLSGHRVGWKKALHYLTEHFSGGTKIGKQANQPIVLLIDELDLLMTRNQSVLYNILDWPTKPNSNLVVIGIANTMDLPEKLLPRISSRMGIQRLCFGPYNYRQLQEIITSRLKGIDAFEEQAIEFASRKLLCQVMLGEL

SEQ ID NO: 185395 - protein, 124 aa, Zea Mays
MGDIEAAIQEVFQAPHIQVMKNCPKFGKVILVAMVHELYKSGLGEIMFDKLATTVFSWCHANRELLPGYDTLLKICCKLGESKIILCEEGSKHKLQKVQLNYPSDDVTFALKESPDLPWLSKYL

SEQ ID NO: 185396 - protein, 69 aa, Zea Mays
MELSEAEDIPCTESELQFGCCPSFFEPVSAEFKTPFGPLLDIDSLLLLRMLPSDLALFINLLTNIYNLR

SEQ ID NO: 185397 - protein, 474 aa, Zea Mays
MQSMESLAQLEVLCEKLYNSRDSAERAHAESTLKCFSENSEYISQCQYILDNASTPYALMLASSSLLKQVSDRSLSLMLRLDIRNYVINYLGTRGPKLQNFVIVSLIQLVCRITKFGWFDDDRFRETVKEATDFLGLASQDHYFIGLKILNNLVTEMNQPNPAMPLTLHRKIAGSFKDQFLLQIFQISLTSLNQLKSEAPDDFGHIPLDLALKCLSFDFVGSPVDESSEEFGTVQLPASWRPLLQDPSTLQIFFDYYKVNDIRVSKEALECLVRLASVRRSIFVEDPARSQFLSHLMLGTKEILLTGQGLADHDNYHEFCRLLGRFKVNYQLAELLNVEFYGEWIGLVAEFTTRSLLSWQWASNSVYYLLSLWSRLVTSVPYLKGETPSLLDETVPKITEGFITSRINSVQAILADNSLENPLDSVEVLQDQLEFLPFLCRFQYQSSSLYIINIMEPLLQAYTVCLCCFTQSFF

SEQ ID NO: 185398 - protein, 573 aa, Zea Mays
MQSMESLAQLEVLCEKLYNSRDSAERAHAESTLKCFSENSEYISQCQYILDNASTPYALMLASSSLLKQVSDRSLSLMLRLDIRNYVINYLGTRGPKLQNFVIVSLIQLVCRITKFGWFDDDRFRETVKEATDFLGLASQDHYFIGLKILNNLVTEMNQPNPAMPLTLHRKIAGSFKDQFLLQIFQISLTSLNQLKSEAPDDFGHIPLDLALKCLSFDFVGSPVDESSEEFGTVQLPASWRPLLQDPSTLQIFFDYYKVNDIRVSKEALECLVRLASVRRSIFVEDPARSQFLSHLMLGTKEILLTGQGLADHDNYHEFCRLLGRFKVNYQLAELLNVEFYGEWIGLVAEFTTRSLLSWQWASNSVYYLLSLWSRLVTSVPYLKGETPSLLDETVPKITEGFITSRINSVQAILADNSLENPLDSVEVLQDQLEFLPFLCRFQYQSSSLYIINIMEPLLQAYTERSRLPAPGDADELSVIEGQIAWMVHIIAAIVKVRQVTGVSQETQELIDAELSARVLQLISVTDTGAHTQMEPSSSKSGIFLEYTASLASPKTIVPGRSQVQCSFPCCCQ

SEQ ID NO: 185399 - protein, 1052 aa, Zea Mays
MQSMESLAQLEVLCEKLYNSRDSAERAHAESTLKCFSENSEYISQCQYILDNASTPYALMLASSSLLKQVSDRSLSLMLRLDIRNYVINYLGTRGPKLQNFVIVSLIQLVCRITKFGWFDDDRFRETVKEATDFLGLASQDHYFIGLKILNNLVTEMNQPNPAMPLTLHRKIAGSFKDQFLLQIFQISLTSLNQLKSEAPDDFGHIPLDLALKCLSFDFVGSPVDESSEEFGTVQLPASWRPLLQDPSTLQIFFDYYKVNDIRVSKEALECLVRLASVRRSIFVEDPARSQFLSHLMLGTKEILLTGQGLADHDNYHEFCRLLGRFKVNYQLAELLNVEFYGEWIGLVAEFTTRSLLSWQWASNSVYYLLSLWSRLVTSVPYLKGETPSLLDETVPKITEGFITSRINSVQAILADNSLENPLDSVEVLQDQLEFLPFLCRFQYQSSSLYIINIMEPLLQAYTERSRLPAPGDADELSVIEGQIAWMVHIIAAIVKVRQVTGVSQETQELIDAELSARVLQLISVTDTGAHTQRYQELSKQRLDRAILIFVQSFRRSYVGDQAMHSSKQLYGRLSELLGLNDHLILLNVIVGKIATNMKCYAESEDVIDHTLSLFLDLATGYMTGKLLLKLESVKFIIANHSPENFPFLAEYKCSRSRTTFYYILGSLVFMEDSPVKFRTFMEPLQQVALNLEATPDAAFRTDVAKRAFVGWMRDLRGIAMATNSRKTYGLLFDWLYPSRMPLLLRAISLCTDEPEVTTPLLKFTYEFVLNKAQRLTFDSSSPNGILLFREVSKIIVAYGSRILLLPNGTDIYGSKYKGIWISLTVLSRALCGNYVNFGVFELYGDRALADALDISLKMTLSVPLSDILAFKKLSKAYFGYMEVLFNNHIKFVLNLDTNTFIHIVSSLESGLKGLDAGISSQCASAIDNLAAFYFNNITSGDSPPSPASVNLARHIGECPNLFPQILKTLFEIMLFEDAGNQWSLSRPILSLIMTSEQMFSELRAHILASQQQRLSQCFDKLMTDVNRNLEPKNRDRFTQNLTAFRRDFRLK

SEQ ID NO: 185400 - protein, 900 aa, Zea Mays
MNQPNPAMPLTLHRKIAGSFKDQFLLQIFQISLTSLNQLKSEAPDDFGHIPLDLALKCLSFDFVGSPVDESSEEFGTVQLPASWRPLLQDPSTLQIFFDYYKVNDIRVSKEALECLVRLASVRRSIFVEDPARSQFLSHLMLGTKEILLTGQGLADHDNYHEFCRLLGRFKVNYQLAELLNVEFYGEWIGLVAEFTTRSLLSWQWASNSVYYLLSLWSRLVTSVPYLKGETPSLLDETVPKITEGFITSRINSVQAILADNSLENPLDSVEVLQDQLEFLPFLCRFQYQSSSLYIINIMEPLLQAYTERSRLPAPGDADELSVIEGQIAWMVHIIAAIVKVRQVTGVSQETQELIDAELSARVLQLISVTDTGAHTQRYQELSKQRLDRAILIFVQSFRRSYVGDQAMHSSKQLYGRLSELLGLNDHLILLNVIVGKIATNMKCYAESEDVIDHTLSLFLDLATGYMTGKLLLKLESVKFIIANHSPENFPFLAEYKCSRSRTTFYYILGSLVFMEDSPVKFRTFMEPLQQVALNLEATPDAAFRTDVAKRAFVGWMRDLRGIAMATNSRKTYGLLFDWLYPSRMPLLLRAISLCTDEPEVTTPLLKFTYEFVLNKAQRLTFDSSSPNGILLFREVSKIIVAYGSRILLLPNGTDIYGSKYKGIWISLTVLSRALCGNYVNFGVFELYGDRALADALDISLKMTLSVPLSDILAFKKLSKAYFGYMEVLFNNHIKFVLNLDTNTFIHIVSSLESGLKGLDAGISSQCASAIDNLAAFYFNNITSGDSPPSPASVNLARHIGECPNLFPQILKTLFEIMLFEDAGNQWSLSRPILSLIMTSEQMFSELRAHILASQTVDQQQRLSQCFDKLMTDVNRNLEPKNRDRFTQNLTAFRRDFRLK

SEQ ID NO: 185401 - protein, 1055 aa, Zea Mays
MQSMESLAQLEVLCEKLYNSRDSAERAHAESTLKCFSENSEYISQCQYILDNASTPYALMLASSSLLKQVSDRSLSLMLRLDIRNYVINYLGTRGPKLQNFVIVSLIQLVCRITKFGWFDDDRFRETVKEATDFLGLASQDHYFIGLKILNNLVTEMNQPNPAMPLTLHRKIAGSFKDQFLLQIFQISLTSLNQLKSEAPDDFGHIPLDLALKCLSFDFVGSPVDESSEEFGTVQLPASWRPLLQDPSTLQIFFDYYKVNDIRVSKEALECLVRLASVRRSIFVEDPARSQFLSHLMLGTKEILLTGQGLADHDNYHEFCRLLGRFKVNYQLAELLNVEFYGEWIGLVAEFTTRSLLSWQWASNSVYYLLSLWSRLVTSVPYLKGETPSLLDETVPKITEGFITSRINSVQAILADNSLENPLDSVEVLQDQLEFLPFLCRFQYQSSSLYIINIMEPLLQAYTERSRLPAPGDADELSVIEGQIAWMVHIIAAIVKVRQVTGVSQETQELIDAELSARVLQLISVTDTGAHTQRYQELSKQRLDRAILIFVQSFRRSYVGDQAMHSSKLYGRLSELLGLNDHLILLNVIVGKIATNMKCYAESEDVIDHTLSLFLDLATGYMTGKLLLKLESVKFIIANHSPENFPFLAEYKCSRSRTTFYYILGSLVFMEDSPVKFRTFMEPLQQVALNLEATPDAAFRTDVAKRAFVGWMRDLRGIAMATNSRKTYGLLFDWLYPSRMPLLLRAISLCTDEPEVTTPLLKFTYEFVLNKAQRLTFDSSSPNGILLFREVSKIIVAYGSRILLLPNGTDIYGSKYKGIWISLTVLSRALCGNYVNFGVFELYGDRALADALDISLKMTLSVPLSDILAFKKLSKAYFGYMEVLFNNHIKFVLNLDTNTFIHIVSSLESGLKGLDAGISSQCASAIDNLAAFYFNNITSGDSPPSPASVNLARHIGECPNLFPQILKTLFEIMLFEDAGNQWSLSRPILSLIMTSEQMFSELRAHILASQTVDQQQRLSQCFDKLMTDVNRNLEPKNRDRFTQNLTAFRRDFRLK

SEQ ID NO: 185402 - protein, 626 aa, Zea Mays
MQSMESLAQLEVLCEKLYNSRDSAERAHAESTLKCFSENSEYISQCQYILDNASTPYALMLASSSLLKQVSDRSLSLMLRLDIRNYVINYLGTRGPKLQNFVIVSLIQLVCRITKFGWFDDDRFRETVKEATDFLGLASQDHYFIGLKILNNLVTEMNQPNPAMPLTLHRKIAGSFKDQFLLQIFQISLTSLNQLKSEAPDDFGHIPLDLALKCLSFDFVGSPVDESSEEFGTVQLPASWRPLLQDPSTLQIFFDYYKVNDIRVSKEALECLVRLASVRRSIFVEDPARSQFLSHLMLGTKEILLTGQGLADHDNYHEFCRLLGRFKVNYQLAELLNVEFYGEWIGLVAEFTTRSLLSWQWASNSVYYLLSLWSRLVTSVPYLKGETPSLLDETVPKITEGFITSRINSVQAILADNSLENPLDSVEVLQDQLEFLPFLCRFQYQSSSLYIINIMEPLLQAYTERSRLPAPGDADELSVIEGQIAWMVHIIAAIVKVRQVTGVSQETQELIDAELSARVLQLISVTDTGAHTQRYQELSKQRLDRAILIFVQSFRRSYVGDQAMHSSKQLYGRLSELLGLNDHLILLNVIVGKIATNMKCYAESEDVIDHTLSLFLDLATGIQMFT

SEQ ID NO: 185403 - protein, 375 aa, Zea Mays
MEPLQQVALNLEATPDAAFRTDVAKRAFVGWMRDLRGIAMATNSRKTYGLLFDWLYPSRMPLLLRAISLCTDEPEVTTPLLKFTYEFVLNKAQRLTFDSSSPNGILLFREVSKIIVAYGSRILLLPNGTDIYGSKYKGIWISLTVLSRALCGNYVNFGVFELYGDRALADALDISLKMTLSVPLSDILAFKKLSKAYFGYMEVLFNNHIKFVLNLDTNTFIHIVSSLESGLKGLDAGISSQCASAIDNLAAFYFNNITSGDSPPSPASVNLARHIGECPNLFPQILKTLFEIMLFEDAGNQWSLSRPILSLIMTSEQMFSELRAHILASQTVDQQQRLSQCFDKLMTDVNRNLEPKNRDRFTQNLTAFRRDFRLK

SEQ ID NO: 185404 - protein, 483 aa, Zea Mays
MLRVRMLLIILCPCSLTWQLGKVVTMFFQFFFSFMRDDCSYFFSCQVSYMTGKLLLKLESVKFIIANHSPENFPFLAEYKCSRSRTTFYYILGSLVFMEDSPVKFRTFMEPLQQVALNLEATPDAAFRTDVAKRAFVGWMRDLRGIAMATNSRKTYGLLFDWLYPSRMPLLLRAISLCTDEPEVTTPLLKFTYEFVLNKAQRLTFDSSSPNGILLFREVSKIIVAYGSRILLLPNGTDIYGSKYKGIWISLTVLSRALCGNYVNFGVFELYGDRALADALDISLKMTLSVPLSDILAFKKLSKAYFGYMEVLFNNHIKFVLNLDTNTFIHIVSSLESGLKGLDAGISSQCASAIDNLAAFYFNNITSGDSPPSPASVNLARHIGECPNLFPQILKTLFEIMLFEDAGNQWSLSRPILSLIMTSEQMFSELRAHILASQTVDQQQRLSQCFDKLMTDVNRNLEPKNRDRFTQNLTAFRRDFRLK

SEQ ID NO: 185405 - protein, 886 aa, Zea Mays
MNQPNPAMPLTLHRKIAGSFKDQFLLQIFQISLTSLNQLKSEAPDDFGHIPLDLALKCLSFDFVGSPVDESSEEFGTVQLPASWRPLLQDPSTLQIFFDYYKVNDIRVSKEALECLVRLASVRRSIFVEDPARSQFLSHLMLGTKEILLTGQGLADHDNYHEFCRLLGRFKVNYQLAELLNVEFYGEWIGLVAEFTTRSLLSWQWASNSVYYLLSLWSRLVTSVPYLKGETPSLLDETVPKITEGFITSRINSVQAILADNSLENPLDSVEVLQDQLEFLPFLCRFQYQSSSLYIINIMEPLLQAYTERSRLPAPGDADELSVIEGQIAWMVHIIAAIVKVRQVTGVSQETQELIDAELSARVLQLISVTDTGAHTQRYQELSKQRLDRAILIFVQSFRRSYVGDQAMHSSKLYGRLSELLGLNDHLILLNVIVGKIATNMKCYAESEDVIDHTLSLFLDLATGYMTGKLLLKLESVKFIIANHSPENFPFLAEYKCSRSRTTFYYILGSLVFMEDSPVKFRTFMEPLQQVALNLEATPDAAFRTDVAKRAFVGWMRDLRGIAMATNSRKTYGLLFDWLYPSRMPLLLRAISLCTDEPEVTTPLLKFTYEFVLNKAQRLTFDSSSPNGILLFREVSKIIVAYGSRILLLPNGTDIYGSKYKGIWISLTVLSRALCGNYVNFGVFELYGDRALADALDISLKMTLSVPLSDILAFKKLSKAYFGYMEVLFNNHIKFVLNLDTNTFIHIVSSLESGLKGLDAGISSQCASAIDNLAAFYFNNITSGDSPPSPASVNLARHIGECPNLFPQILKTLFEIMLFEDAGNQWSLSRPILSLIMTSEQTVDQQQRLSQCFDKLMTDVNRNLEPKNRDRFTQNLTAFRRDFRLK

SEQ ID NO: 185406 - protein, 1027 aa, Zea Mays
MQSMESLAQLEVLCEKLYNSRDSAERAHAESTLKCFSENSEYISQCQYILDNASTPYALMLASSSLLKQVSDRSLSLMLRLDIRNYVINYLGTRGPKLQNFVIVSLIQLVCRITKFGWFDDDRFRETVKEATDFLGLASQDHYFIGLKILNNLVTEMNQPNPAMPLTLHRKIAGSFKDQFLLQIFQISLTSLNQLKSEAPDDFGHIPLDLALKCLSFDFVGSPVDESSEEFGTVQLPASWRPLLQDPSTLQIFFDYYKVNDIRVSKEALECLVRLASVRRSIFVEDPARSQFLSHLMLGTKEILLTGQGLADHDNYHEFCRLLGRFKVNYQLAELLNVEFYGEWIGLVAEFTTRSLLSWQWASNSVYYLLSLWSRLVTSVPYLKGETPSLLDETVPKITEGFITSRINSVQAILADNSLENPLDSVEVLQDQLEFLPFLCRFQYQSSSLYIINIMEPLLQAYTERSRLPAPGDADELSVIEGQIAWMVHIIAAIVKVRQVTGVSQETQELIDAELSARVLQLISVTDTGAHTQRYQELSKQRLDRAILIFVQSFRRSYVGDQAMHSSKLYGRLSELLGLNDHLILLNVIVGKIATNMKCYAESEDVIDHTLSLFLDLATGYMTGKLLLKLESVKFIIANHSPENFPFLAEYKCSRSRTTFYYILGSLVFMEDSPVKFRTFMEPLQQVALNLEATPDAAFRTDVAKRAFVGWMRDLRGIAMATNSRKTYGLLFDWLYPSRMPLLLRAISLCTDEPEVTTPLLKFTYEFVLNKAQRLTFDSSSPNGILLFREVSKIIVAYGSRILLLPNGTDIYGSKYKGIWISLTVLSRALCGNYVNFGVFELYGDRALADALDISLKMTLSVPLSDILAFKKLSKAYFGYMEVLFNNHIKFVLNLDTNTFIHIVSSLESGLKGLDAGISSQCASAIDNLAAFYFNNITSGDSPPSPASVNLARHIGECPNLFPQILKTLFEIMLFEDAGNQWSLSRPILSLIMTSEQMFSELRAHILASQVVWCNCNAALRIVAACW

SEQ ID NO: 185407 - protein, 203 aa, Zea Mays
MACVRAGIRVPHMAVIGLVAVVVSSLQVAKGSVPPNFTLKDQNGKPVSLNKFKGKPVVVYFYPADETPGCTKQGLVREVQEGRGGGDRHQRRRRGVAQGVRAEVPAAVHAAERRGEPRAQGVGRPLGPVRDAAGAPDVRAGQAGRRAVRLQQPVPAREAHRRDAQDPADPLIRSTSSLFWAMLCIRRCKSTGLCSSVVYVTKS

SEQ ID NO: 185408 - protein, 141 aa, Zea Mays
MGHAAHFLRWRRLVCANSCTASHASPQLAPFPVLPAVVERSRGWFPPLPDGSAFQLPLEFTTFCDGSEGGGSAAAMFLRISRLGARLLRESGAETRAGNLLSSPGILYQAHLNQHSTRVRNVLFSTATSGDQDESSQAKDK

SEQ ID NO: 185409 - protein, 70 aa, Zea Mays
MFLRISRLGARLLRESGAETRAGNLLSSPGILYQAHLNQHSTRVVTSTRNVLFSTATSGDQDESSQAKDK

SEQ ID NO: 185410 - protein, 194 aa, Zea Mays
MAPAVAAAASAAMRQALRDRQILDAVGTGAAALSLAGSSFIVICYLLFRELRKFSFKLVFYLAVSDMFCSLFTILGGPSNAFYCFAHDYSAHFFCVASFLWTTTISFTLHRTVVKHKTDVEEFGSIFHLYVWGTSLSTTVLRSIGSDYGRPGTWCWIQQGSMAKACDLLCCFSFFLDYYTNISSMCHFFESYVK

SEQ ID NO: 185411 - protein, 254 aa, Zea Mays
MLIIQFMAKGPSNAFYCFAHDYSAHFFCVASFLWTTTISFTLHRTVVKHKTDVEEFGSIFHLYVWGTSLSTTVLRSIGSDYGRPGTWCWIQQGSMAKVLHLITFYLPLWGAILYNGFTYYEVNRMLNNATQMAAGISDQSNQSDIRAGRKAFNRWGYYPLILIGSWAFATINRLYDFANPGHRIVWLSFLDVGFAGLMGLFNSIAYGLNSSVRRAIAERIDTFLPERIKRSLPALSRLRSQQENELTSLIVEGN

SEQ ID NO: 185412 - protein, 275 aa, Zea Mays
MAPAVAAAASAAMRQALRDRQILDAVGTGAAALSLAGSSFIVICYLLFRELRKFSFKLVFYLAVSDMFCSLFTILGGPSNAFYCFAHDYSAHFFCVASFLWTTTISFTLHRTVVKHKTDVEEFGSIFHLYVWGTSLSTTVLRSIGSDYGRPGTWCWIQQGSMAKVLHLITFYLPLWGAILYNGFTYYEVNRMLNNATQMAAGISDQSNQSDIRAGRKAFNRWGYYPLILIGSWAFATINRLYDFANPGHRIVWLSFLDVGFAGLMVSLLMLVFLY

SEQ ID NO: 185413 - protein, 208 aa, Zea Mays
MLIIQFMAKGPSNAFYCFAHDYSAHFFCVASFLWTTTISFTLHRTVVKHKTDVEEFGSIFHLYVWGTSLSTTVLRSIGSDYGRPGTWCWIQQGSMAKVLHLITFYLPLWGAILYNGFTYYEVNRMLNNATQMAAGISDQSNQSDIRAGRKAFNRWGYYPLILIGSWAFATINRLYDFANPGHRIVWLSFLDVGFAGLMVSLLMLVFLY

SEQ ID NO: 185414 - protein, 108 aa, Zea Mays
MLGFRIHVFGRLSCTILIPPFVYQSEVDSTKLNSPRTVQTTPTHNIPSSKISITTNMIKFMVSINQHDLVFLLLSLLESRPKKRFDVVLPGHESSGSMSMVLDPSGVA

SEQ ID NO: 185415 - protein, 857 aa, Zea Mays
MAGVGGGARSSDRAGAARSPTTTTTTTTTAIQSTIQSIKEVVVGHSDADILDTLRESNMDPNETAQKLLNQDPFHEVKRKRDKKKESAGQKSFADSTGQVDQNPQWMRPHTHRMENDQRRLPNQGQMSGPSHEFRVVRDNRFQHGVVENRPEPGHKGSADVQMSDRSTVVQSARNLSPATTSDGQITHQNAMQNSQSDITQGKRDGQGTTQKHAKPYLKNSQNEQHFPGSDPAHGSATVRIAGGTVGPTRRHVGVINSSRQFVGRSGSQMHAPGGSSYANIQRGSFTSVGASGRYSAFMSRNIQQNLRADTTFRGRPTGRSFIAQNVNRYHQGPTTNQKVHPIKEWKPKLTKKSPTIDAENSIADAASPSASNCENANTTDVNGLPEKLSQANLHEVEHVIIPEHLRVPEYEQTKLRFGSFTPDLDLEQVPDLTPQDTEQPEHVQEPVQQVSEGDSLDDGHDDMDEQARSSQHLSSSTAEISLSPSEDSDQMSGQVENDDGLGLVQSDTPVGAADGDSTQITSTLTAFSAYGHKDPNIHTTNEAQLYGLVEPNVHPQALASSSQGYPSENPEADNAVQVFRMPDSNVHSQVLPSTSEALNPQIVSNSPVPISSQQQHISQQQAATQMYPQMHVQHFPNFMPYRQLYSPVYPMPMPNYSPNVPYPSNGNSYLQMPSGGSHLTAGSVKYGVSQYKPVPSGNPSGYGNYTHPAGFTMGSPGVIGAAVGVDDVNRMKYKDNIYASTPQVETSDIWIQTAREMPPLQVPSYYNIPGQATPGAFVPNPANASFNATSQSPHAQFPGLYHPQQPPSIVSPHPMVHQQVPSAIGPNVGVGVAAPGPQVGAYQQRQIGHMNWRPSF

SEQ ID NO: 185416 - protein, 51 aa, Zea Mays
MMRVVKPLDEDPRNTCRGRPSCTDRDSFLSFEESTVKLQRPNDPVLRVPRD

SEQ ID NO: 185417 - protein, 51 aa, Zea Mays
MMRVVKPLDEDPRNTCRGRPSCTGCQHCNHCSGEDEVVEGDFQEFQDYDEF

SEQ ID NO: 185418 - protein, 50 aa, Zea Mays
MMRVVKPLDEDPRNTCRGRPSCTGCQHCNHCSGEDEAVEGDFQEFQDYDE

SEQ ID NO: 185419 - protein, 134 aa, Zea Mays
MVGCFLTFLFALTDDCPCDIGMYVMIICVYIAAEFRDTYLAIKEPFVNIPDDKIREALKVVLDPRNQPLLIHCKRGKHRTGCLVGCLRKLQKWCLSSVFDEYHRFAAAKARITDQRFMELFDVSSLKHLTPSHC

SEQ ID NO: 185420 - protein, 71 aa, Zea Mays
MDGVVPVRRRVVHRTTVYVPSHCPAASPADDHHSLPVAHLWRGRVADVEVRLSPSHATSVAAVDGGHGHRL

SEQ ID NO: 185421 - protein, 113 aa, Zea Mays
MYVMIICVYIAAEFRDTYLAIKEPFVNIPDDKIREALKVVLDPRNQPLLIHCKRGKHRTGCLVGCLRKLQKWCLSSVFDEYHRFAAAKARITDQRFMELFDVSSLKHLTPSHC

SEQ ID NO: 185422 - protein, 80 aa, Zea Mays
MGQQLLRVNLKTIGHYNTNNYIVLIELLLGIQNHNLGTTAQSYLILGGAAAAVPIKKGIKIATMSISFFCRSLKMHDIFN

SEQ ID NO: 185423 - protein, 380 aa, Zea Mays
MATPPTALLLLLAAAAAFHGATAKTTIEPCSGADACPALLGYKLYADMKVSEVAALFGADPAAVLAANALDFASPGAANRILPAGTPLRVPTRCACADGVRKSVAIRYAARPSDTLGSISEVVFAGLPSADQIRTANGLAAEDPDAPLNPGQELVIPLPCVCFNSTDNNLPAVYLSYVVQVGDTVESIAASHTTTVTDISNVNAMGSPIVAPGDILAIPLSACASAFPNSASDYGLLVANGTYALTAGNCVECSCGPANLNLYCTPSSLSASCSSMQCSNSSLILGNVTAQPTTGGCSVSSCNYDGYVNGTIATSLSSGLQPMCPGPGDAGGATPGGSSLSPSNEPAGNSSQAAAINQPCRFLLIFILSVTLSLRVWIPV

SEQ ID NO: 185424 - protein, 338 aa, Zea Mays
MATPPTALLLLLAAAAAFHGATAKTTIEPCSGADACPALLGYKLYADMKVSEVAALFGADPAAVLAANALDFASPGAANRILPAGTPLRVPTRCACADGVRKSVAIRYAARPSDTLGSISEVVFAGLPSADQIRTANGLAAEDPDAPLNPGQELVIPLPCVCFNSTDNNLPAVYLSYVVQVGDTVESIAASHTTTVTDISNVNAMGSPIVAPGDILAIPLSACASAFPNSASDYGLLVANGTYALTAGNCVECSCGPANLNLYCTPSSLSASCSSMQCSNSSLILGNVTAQPTTGGCSVSSCNYDGYVNGTIATSLSSGLQPMCPGTCAIFSSSVLHI

SEQ ID NO: 185425 - protein, 165 aa, Zea Mays
MTKMYIHKRQDIICDVFRLQAKKDLTEVTHKVYFDVEIDSKPAGRIVMGLFGKTVPKTAENFRALCTGFLDCFYLSLERQEWKHTSYCWPSIRQEWKQQQEWKQEGTERQRLYLESAMPEAKSWPSPVLSAEPPNIFLATCLVAEDPPFESGVGDLARYIEVHSL

SEQ ID NO: 185426 - protein, 704 aa, Zea Mays
MEVEPPPAAAVAVAAALLKCRGNGGGGEPTLEAFGKARSRSPSSAAAAGPPQEPDGTPGPSRRRGEEEESLRRGLAAAQARARARRKAGHATPSPSWKLEPSPPRPEDEALAEADSGAGRRGAPAASARQLGATLWEIQDVIRATGAGRRIRRRGRRAPTADADRPRSSGGFGAQIPASVMEHEKLHEERCHSRQPLSPASFTSSVGATTINLISPTRSLDCNARFRQAGTDIKTSTELLKVLNRIWSLEEQHAADVSAMKGLKRELHHAQACIQELMQERQQYHQEIDSLARQATEDKMARRSKDQEKMRAALRSLQEELEDERRLRKHSETLHRKLGKELSEMKSAFCKAVKALEKEKKTTCLLEDLCDEFARGIRNYEEEVRLLKQKHVKEYELKFDKSVVHISEAWLDERMQMQKTNMREYSSGKTSITERLSSEIEGFLHHAKRPGNSKNDNLDNGNEKRDASLCRQSLESVHLNGATSVPRLAEDDDDGSSIASDLHCFELNTHGGTIRNHELAGARRRVTGCMHSPMRRLEYSNGVSVEGSPMSNVPPCPKKEKTRSGVSRQHFITSAPETSSRNDASLAPAADEQNETVMTQVSRRLRDDLLKIKSEAPQHAYLGQKSNQPRTNEFHEYSPAPAPARRHLNNPAQSLDCEISEPPAHQLTGTKENSLKVKLLQARLEGQHARLSASVFPLISTRRK

SEQ ID NO: 185427 - protein, 104 aa, Zea Mays
MTCSCCPIYYFSVFIKILHHISYIQHEQEHILISLLYMINIRNIFKNVYSIPITTSKFKKAHVGIRVTEIVRVIGLGSTARTPALGLRWAVGGEGAVLLGVNSR

SEQ ID NO: 185428 - protein, 111 aa, Zea Mays
MASKRILKELKDLQKDPPTSCSAGPVAEDMFYWQATIMGPSDSPYAGGVFLVTIHFPPDYPFKPPKVAFKTKVYHPNINSNGSICLDILKEQWSPALTVSKRLLTCTRLIA

SEQ ID NO: 185429 - protein, 438 aa, Zea Mays
MMSPASERSLIIQSDDDDDARSGHDVEEPEQDSDSSSSSSSCATPRRGPSSPPYIQQWPQSYRQSIDILSSVQSPNLSFLGTPTLSRLSNSFLAITDSFRSKAPETISSFIKPLLGPTPSDEQQRQHEGTRKSSEYLVPSRRSSLQQIPEDQKPPVGGHGASHDQNCSYTQGVMNGINVLCGVGILSTPYAIKQGGWIGLAILCTFALLAWYTGVLLRHCLDSKEGLKTYPDIGHAAFGSTGRIVISIILYVELYACCIEYLILEGDNLSKLFPNAHLTIGSMTLNSHVFFAILTTIIVMPTTWLRDLSWLSYISAGGVIASILVVICLFLVGVVNDFGFENEGTALNAPGIPIAIGLYGYCYSGHGVFPNIYSSLKNRNQFPSILFTCIGLSTFLYAGAAVMGYKMFGEATESQFTLNLPDNSVISKIAVWTTVIVA

SEQ ID NO: 185430 - protein, 396 aa, Zea Mays
MPALLNLDAFPTGQCPGINVLCGVGILSTPYAIKQGGWIGLAILCTFALLAWYTGVLLRHCLDSKEGLKTYPDIGHAAFGSTGRIVISIILYVELYACCIEYLILEGDNLSKLFPNAHLTIGSMTLNSHVFFAILTTIIVMPTTWLRDLSWLSYISAGGVIASILVVICLFLVGVVNDFGFENEGTALNAPGIPIAIGLYGYCYSGHGVFPNIYSSLKNRNQFPSILFTCIGLSTFLYAGAAVMGYKMFGEATESQFTLNLPDNSVISKIAVWTTVANPITKYALTIIPLAMSLEELLPPNQQKYSTIIMLRSSLVISTLLIALSVPFFGLVMALVGSLFAMLVTYILPCACFLAILKTKVGWHQIAACSFIIVVGVCCAYVGTYSSLSKIIQNYA

SEQ ID NO: 185431 - protein, 70 aa, Zea Mays
MCFYGISPNLDGALVFVSEDLQIWGMNVAQGISYLLAFAPEEGYALVKVINIVAKGANVILELSLCAGVL

SEQ ID NO: 185432 - protein, 832 aa, Zea Mays
MPIGKLPEDLVQVQAYIRWEQAGKPNYPPEKQLVEFEEARKELQAEVDKGISIDQLRQKILKGNIESKVSKQLKNKKYFSVERIQRKKRDITQLLSKHKHTLVEDKVEVVPKQPTVLDLFTKSLHEKDGCEVLSRKLFKFGDKEILAISTKVQNKTEVHLATNHTDPLILHWSLAKNAGEWKAPSPNILPSGSTLLDKACETEFTKSELDGLHYQVVEIELDDGGYKGMPFVLRSGETWIKNNGSDFFLDFSTHDVRNIKLKGNGDAGKGTAKALLERIADLEEDAQRSLMHRFNIAADLADQARDAGLLGIVGLFVWIRFMATRQLTWNKNYNVKPREISKAQDRFTDDLENMYKAYPQYREILRMIMAAVGRGGEGDVGQRIRDEILVIQRNNDCKGGMMEEWHQKLHNNTSPDDVVICQALIDYIKSDFDISVYWDTLNKNGITKERLLSYDRAIHSEPNFRSEQKAGLLRDLGNYMRSLKAVHSGADLESAIASCMGYKSEGEGFMVGVQINPVKGLPSGFPELLEFVLEHVEDKSAEPLLEGLLEARVELRPLLLDSRERMKDLIFLDIALDSTFRTAIERSYEELNDAAPEKIMYFISLVLENLALSIDDNEDILYCLKGWNQALEMAKQKDDQWALYAKAFLDRNRLALASKGEQYHNMMQPSAEYLGSLLSIDQWAVNIFTEEIIRGGSAATLSALLNRFDPVLRNVAHLGSWQVISPVEVSGYVVVVDELLAVQNKSYDKPTILVAKSVKGEEEIPDGVVGVITPDMPDVLSHVSVRARNSKVLFATCFDHTTLSELEGYDQKLFSFKPTSADITYSPSGIIC

SEQ ID NO: 185433 - protein, 1464 aa, Zea Mays
MSGFSAAANAAAAERCALAFRARPAASSPAKRQQQPQPASLRRSGGQRRPTTLSASSRGPVVPRAVATSADRASPDLIGKFTLDSNSELQVAVNPAPQGLVSEISLEVTNTSGSLILHWGALRPDKRDWILPSRKPDGTTVYKNRALRTPFVKSGDNSTLRIEIDDPGVHAIEFLIFDETQNKWFKNNGQNFQVQFQSSRHQGTGASGASSSATSTLVPEDLVQIQAYLRWERRGKQSYTPEQEKEEYEAARAELIEEVNRGVSLEKLRAKLTKAPEAPESDESKSSASRMPIGKLPEDLVQVQAYIRWEQAGKPNYPPEKQLVEFEEARKELQAEVDKGISIDQLRQKILKGNIESKVSKQLKNKKYFSVERIQRKKRDITQLLSKHKHTLVEDKVEVVPKQPTVLDLFTKSLHEKDGCEVLSRKLFKFGDKEILVQNKTEVHLATNHTDPLILHWSLAKNAGEWKAPSPNILPSGSTLLDKACETEFTKSELDGLHYQVVEIELDDGGYKGMPFVLRSGETWIKNNGSDFFLDFSTHDVRNIKLKGNGDAGKGTAKALLERIADLEEDAQRSLMHRFNIAADLADQARDAGLLGIVGLFVWIRFMATRQLTWNKNYNVKPREISKAQDRFTDDLENMYKAYPQYREILRMIMAAVGRGGEGDVGQRIRDEILVIQRNNDCKGGMMEEWHQKLHNNTSPDDVVICQALIDYIKSDFDISVYWDTLNKNGITKERLLSYDRAIHSEPNFRSEQKAGLLRDLGNYMRSLKAVHSGADLESAIASCMGYKSEGEGFMVGVQINPVKGLPSGFPELLEFVLEHVEDKSAEPLLEGLLEARVELRPLLLDSRERMKDLIFLDIALDSTFRTAIERSYEELNDAAPEKIMYFISLVLENLALSIDDNEDILYCLKGWNQALEMAKQKDDQWALYAKAFLDRNRLALASKGEQYHNMMQPSAEYLGSLLSIDQWAVNIFTEEIIRGGSAATLSALLNRFDPVLRNVAHLGSWQVISPVEVSGYVVVVDELLAVQNKSYDKPTILVAKSVKGEEEIPDGVVGVITPDMPDVLSHVSVRARNSKVLFATCFDHTTLSELEGYDQKLFSFKPTSADITYREITESELQQSSSPNAEVGHAVPSISLAKKKFLGKYAISAEEFSEEMVGAKSRNIAYLKGKVPSWVGVPTSVAIPFGTFEKVLSDGLNKEVAQSIEKLKIRLAQEDFSALGEIRKVVLNLTAPMQLVNELKERMLGSGMPWPGDEGDKRWEQAWMAIKKVWASKWNERAYFSTRKVKLDHEYLSMAVLVQEVVNADYAFVIHTTNPSSGDSSEIYAEVVKGLGETLVGAYPGRAMSFVCKKDDLDSPKLLGYPSKPIGLFIRQSIIFRSDSNGEDLEGYAGAGLYDSVPMDEEDEVVLDYTTDPLIVDRGFRSSILSSIARAGHAIEELYGSPQDVEGVVKDGKIYVVQTRPQM

SEQ ID NO: 185434 - protein, 56 aa, Zea Mays
MRHMSPTATLAASVSRRAIDLRIVKTLHDSLVVGRLVACWCGQVVSVLVIGVQNIL

SEQ ID NO: 185435 - protein, 306 aa, Zea Mays
MLLVGDPGIGKSQFLKFAAKLSNRSVITTGLGSTSAGLTVTAVKDGGEWMLEAGALVLADGGLCCIDEFDSMREHDRTTIHEAMEQQTISIAKAGLVTTLSTRTTVFGATNPKGQYDPNESLSVNTTLSGPLLSRFDIVLVLLDTQNTGWDEIVSSHILKENSDEKKDKADASDIKWMLPQLRRYINYVRRKFKPVLTKEAERVISSYYHLQRKSGTHNAARTTVRMLESLIRLAQAHARLMFRNEVRQLDAIAAILCMESSMTTSPIVDIVGNALHSNFTVDPDEEYKTQEKKILKKLGITQGSP

SEQ ID NO: 185436 - protein, 82 aa, Zea Mays
MDLHAILHIESVIHEVSWWNKACLCSSWCIYFFWACNLSKFAICIRLVFFVSSLMMGMLSTAESTTSLNPVIFAPIGVESRT

SEQ ID NO: 185437 - protein, 245 aa, Zea Mays
MTQPPRSMISPIVDPSRGKLRPVSPSTMSTSAMPGVRTPCLALSRAPPDVDVDTDISDEDEGDDDELKESINGSEDEALDQNEDSEEEDKSKGSGSKAQKRKLNDYIGQLSSADASLRVLKRLATAKKAEVPSDETGKILSDEDFKRIKELKAKKEAKLALAQHGLIKGGDTRSVTFKMPSSDQLSRKRVDPLELEAHVRRKMSKEERLAMVKAGREDRGPYMARAAVKQKKVSFLAVGVYVLWW

SEQ ID NO: 185438 - protein, 159 aa, Zea Mays
MPILLSFLPQVNDTIEMLERMAHRGACGCEKNTGDGAGIMVALPHDFFKEVAKDAGIELPPLGEYAVAMFFMPTDEKRRKKGKAEFKKVAESLGHVILGWRLVPTDNSDLGESALETEPVIEQRRRLTCSISFIVLFYKGFNTIRYYQENKKKRNRWLL

SEQ ID NO: 185439 - protein, 112 aa, Zea Mays
MFGPVQDVRIPYQQKRMFGFVTFVYAETVKVILSKGNPHFVCDARVLVKPYKEKGKVPGSCSTRTMAEPSSSVARRPLDCWIPGTPTPSCFFQVPRISPGFLLGMKPLGYDV

SEQ ID NO: 185440 - protein, 360 aa, Zea Mays
MFIQPGRLALTTCPLNSGTKISSHTTHKQTYSYTNLRKKKEETIERENKNPRRTKRRSQPLTPSLSPAPVTSISTRPPEIQNQTSESANPCSDSPLLGLLDGSSRAGAAEPMWPGCGGRFYWAPESAPPGQARGVAVLFAWVWSDETQLRPFVELYSSLGWRCLVCHPDLVALYLSEKAISLATGVINELVKELKIKIVPIVLASFSGGSKGCMYKVIQLLDGICEGDAIMKDYRLVRNCICGQIYDSSPVDFVSDVGAQFVQKPADGNSSQPTILHSWMAKALASVMDTLFPSRIEAQRAEYWHTLYSAAGLGPVLLFCSEADNLAPCYIICGFARRLIELGTEVKLMKWNSSQHVGQL

SEQ ID NO: 185441 - protein, 369 aa, Zea Mays
MFIQPGRLALTTCPLNSGTKISSHTTHKQTYSYTNLRKKKEETIERENKNPRRTKRRSQPLTPSLSPAPVTSISTRPPEIQNQTSESANPCSDSPLLGLLDGSSRAGAAEPMWPGCGGRFYWAPESAPPGQARGVAVLFAWVWSDETQLRPFVELYSSLGWRCLVCHPDLVALYLSEKAISLATGVINELVKELKIKIVPIVLASFSGGSKGCMYKVIQLLDGICEGDAIMKDYRLVRNCICGQIYDSSPVDFVSDVGAQFVQKPADGNSSQPTILHSWMAKALASVMDTLFPSRIEAQRAEYWHTLYSAAGLGPVLLFCSEADNLAPCYIICGFARRLIELGTEVKLMKWNSSQHVITIHMKLNTGQL

SEQ ID NO: 185442 - protein, 507 aa, Zea Mays
MFIQPGRLALTTCPLNSGTKISSHTTHKQTYSYTNLRKKKEETIERENKNPRRTKRRSQPLTPSLSPAPVTSISTRPPEIQNQTSESANPCSDSPLLGLLDGSSRAGAAEPMWPGCGGRFYWAPESAPPGQARGVAVLFAWVWSDETQLRPFVELYSSLGWRCLVCHPDLVALYLSEKAISLATGVINELVKELKIKIVPIVLASFSGGSKGCMYKLLDGICEGDAIMKDYRLVRNCICGQIYDSSPVDFVSDVGAQFVQKPADGNSSQPTILHSWMAKALASVMDTLFPSRIEAQRAEYWHTLYSAAGLGPVLLFCSEADNLAPCYIICGFARRLIELGTEVKLMKWNSSQHVGHYNSHETEYRTAVDDMLKKALLTFCHRSQLYDSNMAGDREYKIAHSVCSLHNAAANSNESLRGVPNSPSDHFFLPSSKDHDESQEPGSHMSHPPCMEPKGVLGQILFDVCVPRNVEGWDIKPTVSPNGRPTFASARQLGPFNPIRYFRRSRL

SEQ ID NO: 185443 - protein, 290 aa, Zea Mays
MQACACHFSPVLAPPRSRISASHSPGMATLKVPATVPPVADDCDQLRKAFQGWGTNEALIISILGHRDAAQRRAIRRAYAEAYGEELLRSITDEISGDFERAVILWTLDPAERDAVLANEAARKWKPGNRVLVEIACTRTSAQIFATRQAYHERFKRSLEEDIAAHVTGDFRKLLVPLVSTYRYDGPEVNTRLAHSEAKLLHEKIHHKAYSDDEIIRILTTRSKPQLIATFNHYNDAFGHRINKDLKADPQDEYLRTLRAIIRCFSCPDRYFEKVARQGVMSRTGALVPF

SEQ ID NO: 185444 - protein, 227 aa, Zea Mays
MHLCLPRQHQHHLPLHQTYSTSTHEARRDQPASIEKDIWSSGSANEEYLKALNALLSNFPRLRVTEPATLCIPHLVTSLKTGSEATQEAALDSLYLLRQAWSACPAEVFKAQSVAASEAIPLLQYLIQSGPPRFQEKAELLLQCLPGTLTVTIKRGNNLRQSVGNPSAFCKLTLGNNPPRLTKIVSTGATPEWDEAFAWAFDSPPKGQKLHISCKNNSKFGKKHSVK

SEQ ID NO: 185445 - protein, 119 aa, Zea Mays
MSVPALSPAGTMSPDDRMQNSKSSAESEARHSQIPCSSPSCPSLAAPTSPRALAVPREDTEVQCQCFPQVHLGFSVPARLGRIQHSSAPPKIRNGQGLLTMMTTWPPSLPSDSDMRPWN

SEQ ID NO: 185446 - protein, 68 aa, Zea Mays
MFHVASGGKCAVPAPSRLLFCRRSFFRVIVVTHGTRVNAGALIMEAFSSVANTKRGHILHSLGNGHGW

SEQ ID NO: 185447 - protein, 368 aa, Zea Mays
MENNTPPKTGTGFLKTCFNGVNALSGVGILSIPYALSQGGWLSLLIFLTIAIICFYTGILLQRCIDSSSLVKTYPDIEGDNLEKLFPNANFHAAGLKVGSKQGFVLMFSLLVLPTTWLQSLNMLAYVALGGVMASVILIASVLWVGTFDGVGFHKKGVPVDWSGMPTAMSLYAFCFSGHAVFPMIYTGMRNRKTFPTVLLICFIICTLSYGLTGVIGYLMFGKSLSSQVTLNLPANHFASNIAIYTTLINPFTKFALLITPIAEAIEDKLHVDKNKTVSILIRTALVVSTTIVALAVPFFAYVVALTGSFLSSTVTILLPCVCYLKISSRTSRNLRLELVVCLGIIMIGVGLVLVGTYSSLKKIVHSF

SEQ ID NO: 185448 - protein, 83 aa, Zea Mays
MFHVASGGKCAVPAPSRLLFCRRSFFRVIVVTHGTRVNAGALIMEAFSSVANTKRGHILHSVRASPAILHLHLIYSVLIWWLV

SEQ ID NO: 185449 - protein, 276 aa, Zea Mays
MENNTPPKTGTGFLKTCFNGVNALSGVGILSIPYALSQGGWLSLLIFLTIAIICFYTGILLQRCIDSSSLVKTYPDIGELAFGRKGKIIVAIFLYLELYLVAIDFLILEGDNLEKLFPNANFHAAGLKVGSKQGFVLMFSLLVLPTTWLQSLNMLAYVALGGVMASVILIASVLWVGTFDGVGFHKKGVPVDWSGMPTAMSLYAFCFSGHAVFPMIYTGMRNRKTFPTVLLICFIICTLSYGLTGVIGYLMFGKSLSSQRLSKINFMWTRIRPSVS

SEQ ID NO: 185450 - protein, 483 aa, Zea Mays
MNATRLGDRFALKLPCGLIQGSSITIIGTPGGLLGNFKIELTGAAVPGEPDPPIVLHYNVRLLGDKLTEDPVIVQNTWTISDDWGSENRCPSPDSDAKDTTKVDDLEKCSSMVGEDQKEILPSKFHSNVSAMPPASKKKAEPRKYFPFRQGYLAVAILRIGAHGIHMTVDGKHITSFAFREDLEPGFVGEVRIAGDIKLLSVIASGLPTTEDFEHVTDLEILKAPPVPMDKPVDLFIGVFSTANNFKRRMAVRRTWMQYDSVRSGKVTVRFFVGLHKNELVNEELWNEARTYGDIQLMPFVDYYSLILWKTIAICIYGTNVLSANYVMKTDDDAFVRVDEVLSSLDRTNVNHGLLYGRVNSDSQPHRDPYSKWYITPEEWPEESYPPWAHGPGYIVSKDIAKEVYRKHKSGELKMFKLEDVAMGIWINEMKKDGLDVKYENDGRILVEGCEDGYVIAHYQEPRDMMCLWDQFQKTKRGTCCKE

SEQ ID NO: 185451 - protein, 337 aa, Zea Mays
MMKKWHGGFAIVSLFIILMLRYVILDNPLVENSLQYVFQQNRTAELHWLDVPNPPAIQNLQISSEVISTGLLASNLSITRNLSDRELQSLHSWNHLKQLLSHVHILPDGVEAIKEAGVAWRELNTALAYDDAVSVNGSIQQKDKGKQCPYSIRRMNATRLGDRFALKLPCGLIQGSSITIIGTPGGLLGNFKIELTGAAVPGEPDPPIVLHYNVRLLGDKLTEDPVIVQNTWTISDDWGSENRCPSPDSDAKDTTKVDDLEKCSSMVGEDQKEILPSKFHSNVSAMPPASKKKAEPRKYFPFRQGYLAVAILRIGAHGIHMTVDGKHITSFAFREGL

SEQ ID NO: 185452 - protein, 508 aa, Zea Mays
MMKKWHGGFAIVSLFIILMLRYVILDNPLVENSLQYVFQQNRTAELHWLDVPNPPAIQNLQISSEVISTGLLASNLSITRNLSDRELQSLHSWNHLKQLLSHVHILPDGVEAIKEAGVAWRELNTALAYDDAVSVNGSIQQKDKGKQCPYSIRRMNATRLGDRFALKLPCGLIQGSSITIIGTPGGLLGNFKIELTGAAVPGEPDPPIVLHYNVRLLGDKLTEDPVIVQNTWTISDDWGSENRCPSPDSDAKDTTKVDDLEKCSSMVGEDQKEILPSKFHSNVSAMPPASKKKAEPRKYFPFRQGYLAVAILRIGAHGIHMTVDGKHITSFAFREDLEPGFVGEVRIAGDIKLLSVIASGLPTTEDFEHVTDLEILKAPPVPMDKPVDLFIGVFSTANNFKRRMAVRRTWMQYDSVRSGKVTVRFFVGLHKNELVNEELWNEARTYGDIQLMPFVDYYSLILWKTIAICIYGMKYFLPLTELMSTMDCCMVVSILIPSHIEIHIASGT

SEQ ID NO: 185453 - protein, 794 aa, Zea Mays
MLTFQLSDQTLHPFDHASFQGTARLSAVRCPPRALRSRAALPAARPRAHWTSFRPAPIDPAAMSSAAVSSSSSTFFLALASASPGGRRRARVGSSPFHTGASLSFAFWAPPSPPRAPRDAALVRAEAEAGGKDAPPERSGDAARLPRARRNAVSKRRDPLQPVGRYGSATGNTARTGAASCQNAALADVEIKSIVAAPPTSIVKFPAPGYRMILPSGDIAPETVLPAPKPLHESPAVDGDSNGIAPPTVEPLVQEATWDFKKYIGFDEPDEAKDDSRVGADDAGSFEHYGDNDSGPLAGENVMNVIVVAAECSPWCKTGGLGDVVGALPKALARRGHRVMVVVPRYGDYVEAFDMGIRKYYKAAGQDLEVNYFHAFIDGVDFVFIDAPLFRHRQDDIYGGSRQEIMKRMILFCKVAVEVPWHVPCGGVCYGDGNLVFIANDWHTALLPVYLKAYYRDHGLMQYTRSVLVIHNIAHQGRGPVDEFPYMDLPEHYLQHFELYDPVGGEHANIFAAGLKMADRVVTVSRGYLWELKTVEGGWGLHDIIRSNDWKINGIVNGIDHQEWNPKVDVHLRSDGYTNYSLETLDAGKRQCKAALQRELGLEVRDDVPLLGFIGRLDGQKGVDIIGDAMPWIAGQDVQLVMLGTGRADLERMLQHLEREHPNKVRGWVGFSVPMAHRITAGADVLVMPSRFEPCGLNQLYAMAYGTVPVVHAVGGLRDTVAPFDPFSDAGLGWTFDRAEANKLIEALRHCLDTYRNYEESWKSLQARGMSQDLSWDHAAELYEDVLVKAKYQW

SEQ ID NO: 185454 - protein, 732 aa, Zea Mays
MSSAAVSSSSSTFFLALASASPGGRRRARVGSSPFHTGASLSFAFWAPPSPPRAPRDAALVRAEAEAGGKDAPPERSGDAARLPRARRNAVSKRRDPLQPVGRYGSATGNTARTGAASCQNAALADVEIKSIVAAPPTSIVKFPAPGYRMILPSGDIAPETVLPAPKPLHESPAVDGDSNGIAPPTVEPLVQEATWDFKKYIGFDEPDEAKDDSRVGADDAGSFEHYGDNDSGPLAGENVMNVIVVAAECSPWCKTGGLGDVVGALPKALARRGHRVMVVVPRYGDYVEAFDMGIRKYYKAAGQDLEVNYFHAFIDGVDFVFIDAPLFRHRQDDIYGGSRQEIMKRMILFCKVAVEVPWHVPCGGVCYGDGNLVFIANDWHTALLPVYLKAYYRDHGLMQYTRSVLVIHNIAHQGRGPVDEFPYMDLPEHYLQHFELYDPVGGEHANIFAAGLKMADRVVTVSRGYLWELKTVEGGWGLHDIIRSNDWKINGIVNGIDHQEWNPKVDVHLRSDGYTNYSLETLDAGKRQCKAALQRELGLEVRDDVPLLGFIGRLDGQKGVDIIGDAMPWIAGQDVQLVMLGTGRADLERMLQHLEREHPNKVRGWVGFSVPMAHRITAGADVLVMPSRFEPCGLNQLYAMAYGTVPVVHAVGGLRDTVAPFDPFSDAGLGWTFDRAEANKLIEALRHCLDTYRNYEESWKSLQARGMSQDLSWDHAAELYEDVLVKAKYQW

SEQ ID NO: 185455 - protein, 484 aa, Zea Mays
MFSMVQNRGGLGDVVGALPKALARRGHRVMVVVPRYGDYVEAFDMGIRKYYKAAGQDLEVNYFHAFIDGVDFVFIDAPLFRHRQDDIYGGSRQEIMKRMILFCKVAVEVPWHVPCGGVCYGDGNLVFIANDWHTALLPVYLKAYYRDHGLMQYTRSVLVIHNIAHQGRGPVDEFPYMDLPEHYLQHFELYDPVGGEHANIFAAGLKMADRVVTVSRGYLWELKTVEGGWGLHDIIRSNDWKINGIVNGIDHQEWNPKVDVHLRSDGYTNYSLETLDAGKRQCKAALQRELGLEVRDDVPLLGFIGRLDGQKGVDIIGDAMPWIAGQDVQLVMLGTGRADLERMLQHLEREHPNKVRGWVGFSVPMAHRITAGADVLVMPSRFEPCGLNQLYAMAYGTVPVVHAVGGLRDTVAPFDPFSDAGLGWTFDRAEANKLIEALRHCLDTYRNYEESWKSLQARGMSQDLSWDHAAELYEDVLVKAKYQW

SEQ ID NO: 185456 - protein, 484 aa, Zea Mays
MFSMVQNRWSWRCCGSFTQGFSEKRTSCYGVVVPRYGDYVEAFDMGIRKYYKAAGQDLEVNYFHAFIDGVDFVFIDAPLFRHRQDDIYGGSRQEIMKRMILFCKVAVEVPWHVPCGGVCYGDGNLVFIANDWHTALLPVYLKAYYRDHGLMQYTRSVLVIHNIAHQGRGPVDEFPYMDLPEHYLQHFELYDPVGGEHANIFAAGLKMADRVVTVSRGYLWELKTVEGGWGLHDIIRSNDWKINGIVNGIDHQEWNPKVDVHLRSDGYTNYSLETLDAGKRQCKAALQRELGLEVRDDVPLLGFIGRLDGQKGVDIIGDAMPWIAGQDVQLVMLGTGRADLERMLQHLEREHPNKVRGWVGFSVPMAHRITAGADVLVMPSRFEPCGLNQLYAMAYGTVPVVHAVGGLRDTVAPFDPFSDAGLGWTFDRAEANKLIEALRHCLDTYRNYEESWKSLQARGMSQDLSWDHAAELYEDVLVKAKYQW

SEQ ID NO: 185457 - protein, 795 aa, Zea Mays
MLTFQLSDQTLHPFDHASFQGTARLSAVRCPPRALRSRAALPAARPRAHWTSFRPAPIDPAAMSSAAVSSSSSTFFLALASASPGGRRRARVGSSPFHTGASLSFAFWAPPSPPRAPRDAALVRAEAEAGGKDAPPERSGDAARLPRARRNAVSKRRDPLQPVGRYGSATGNTARTGAASCQNAALADVEIKSIVAAPPTSIVKFPAPGYRMILPSGDIAPETVLPAPKPLHESPAVDGDSNGIAPPTVEPLVQEATWDFKKYIGFDEPDEAKDDSRVGADDAGSFEHYGDNDSGPLAGENVMNVIVVAAECSPWCKTGKNITLSGFFQNCFSFEFDGVTDVVVPRYGDYVEAFDMGIRKYYKAAGQDLEVNYFHAFIDGVDFVFIDAPLFRHRQDDIYGGSRQEIMKRMILFCKVAVEVPWHVPCGGVCYGDGNLVFIANDWHTALLPVYLKAYYRDHGLMQYTRSVLVIHNIAHQGRGPVDEFPYMDLPEHYLQHFELYDPVGGEHANIFAAGLKMADRVVTVSRGYLWELKTVEGGWGLHDIIRSNDWKINGIVNGIDHQEWNPKVDVHLRSDGYTNYSLETLDAGKRQCKAALQRELGLEVRDDVPLLGFIGRLDGQKGVDIIGDAMPWIAGQDVQLVMLGTGRADLERMLQHLEREHPNKVRGWVGFSVPMAHRITAGADVLVMPSRFEPCGLNQLYAMAYGTVPVVHAVGGLRDTVAPFDPFSDAGLGWTFDRAEANKLIEALRHCLDTYRNYEESWKSLQARGMSQDLSWDHAAELYEDVLVKAKYQW

SEQ ID NO: 185458 - protein, 736 aa, Zea Mays
MLTFQLSDQTLHPFDHASFQGTARLSAVRCPPRALRSRAALPAARPRAHWTSFRPAPIDPAAMSSAAVSSSSSTFFLALASASPGGRRRARVGSSPFHTGASLSFAFWAPPSPPRAPRDAALVRAEAEAGGKDAPPERSGDAARLPRARRNAVSKRRDPLQPVGRYGSATGNTARTGAASCQNAALADVEIKSIVAAPPTSIVKFPAPGYRMILPSGDIAPETVLPAPKPLHESPAVDGDSNGIAPPTVEPLVQEATWDFKKYIGFDEPDEAKDDSRVGADDAGSFEHYGDNDSGPLAGENVMNVIVVAAECSPWCKTGGLGDVVGALPKALARRGHRVMVVVPRYGDYVEAFDMGIRKYYKAAGQDLEVNYFHAFIDGVDFVFIDAPLFRHRQDDIYGGSRQEIMKRMILFCKVAVEGRGPVDEFPYMDLPEHYLQHFELYDPVGGEHANIFAAGLKMADRVVTVSRGYLWELKTVEGGWGLHDIIRSNDWKINGIVNGIDHQEWNPKVDVHLRSDGYTNYSLETLDAGKRQCKAALQRELGLEVRDDVPLLGFIGRLDGQKGVDIIGDAMPWIAGQDVQLVMLGTGRADLERMLQHLEREHPNKVRGWVGFSVPMAHRITAGADVLVMPSRFEPCGLNQLYAMAYGTVPVVHAVGGLRDTVAPFDPFSDAGLGWTFDRAEANKLIEALRHCLDTYRNYEESWKSLQARGMSQDLSWDHAAELYEDVLVKAKYQW

SEQ ID NO: 185459 - protein, 401 aa, Zea Mays
MDSHGHVSGGKRKGKRARKPEPPVLASPDNSHDHKHHDTAPSSSPLSTAAVAASDSPDPEPASSSPAPRRRGRKSRRIRNGTHSEVDAAPSPSPPPRRGGPKGAPNGAVDMVEVPAAVEPLRWDQVVKVVPSMDAVVKVFCVHTEPNFSLPWQRKRQYSSSSSGFIIGGRRVLTNAHSVEHYTQVKLKKRGSDTKYLATVLAIGTECDIAMLTVEDDEFWKGVSPVEFGSLPALQDAVTVVGYPIGGDTISVTSGVVSRIEILSYVHGSTELLGLQIDAAINSGNSGGPAFNDKGKCVGIAFQSLKHEDAENIGYVIPTPVINHFIEDYKKSGEYTGFPILGIEWQKMENPDLRKAMGMKANQKGVRIRRVEPTAPESGCLEPSDIILSFDGIDIANDGTG

SEQ ID NO: 185460 - protein, 772 aa, Zea Mays
MIRSRSLLPTFSQINGLLSRNLAANEALQWLDDELASLALPKLDSYACARFLQRCIARGDARAGRAVHARVVQRGGVAQLDTFCANVLLNFYAKLGPLATARRLFDGMPERNRVSFVTLMQGYALRGEFEEALELFRRLQREGHEVNHFVLTTILKVLVTMDAPGLACGIHACACKLGHDRNAFVGTALIDAYSLCGAVCHASALKAAVCLSSALLGKGIHGCSVKTLYDTEPHVGGALLDMYAKCGDIEDAHAIFEMIPHDDVILWSFLISRYAQSCQNEQAFEMFLRMMRSFVVPNEFSLSGVLQACANIAFLELGEQIHNLAIKLGYESELFVGNALMDMYAKCRNMENSLEIFSSLQDANEVSWNTIIVGYCQSGFAEDALSVFHEMRAAHMLSTQVTFSSVLRACANTSSIKHAVQIHSLIEKSTFNNDTIVCNSLIDTYAKCGFIRDALKVFESIVECDVVSWNSIISAYALHGRATNALELFDRMNKSDIKANDVTFVSLLSVCGSTGLVNQGLWLFNSMMMDHRIKPSMEHYTCIVRLLGRAGRLTDALKFIGDIPSTPSPMVWRALLSSCVVHKNVALGRYAAEKVLDIEPHDETTYVLLSNMYAAAGILDEVALWRKSMRNVGVKKEAGLSWVEIKGEVHAFSVGSADHPDMRIINAMLEWLNLKASREGYVPDINVVLHDVDEEEKARMLWVHSERLALAYGLSMTPPGHPIRIMKNLRSCLDCHTMFKVISKIVQREIIVRDINRFHHFEEGICSCGDYW

SEQ ID NO: 185461 - protein, 273 aa, Zea Mays
MPPGDMFVIPLVTGPSPVEVEGEAAMLLVIGPVEGGVDAVVCAVLDLFAASPWPAGSRRNLLSTMPRKPKRKAPASPARHDPSPEPYPSHASPCSAQCLVVRDALLAFHGFPEEFAAFRVLRLGGLSPNRDPRPSSPTVLDGLVTTLLSQNTTDAISRRAFASLKAAFPSWDQVVDEEGKRLEDAIRCGGLAATKAARIRSMLRDVRERRGKICLEYLRELSVDEVKKELSRFKGIGPKTSCTKKVGSDKRKSSNSACPLAGYCCIGEKLQQL

SEQ ID NO: 185462 - protein, 252 aa, Zea Mays
MAGSRFGSFKSEKGDSASAAAAAGGAAQRRDPYEVLGVGRTATDQEIKSAFRRMALKYHPDKNGDDPVASDRFQEVTFSYNILSDPDKRRQYDTSGFDAIESDSQELELDLSSLNTVNTVFAALFSKLGVPIKTTVSATVLEEALNGSVMVSQLQLGNSVQRKQSAHFYSVDITEKQAKMGLVCRVHSNDKSKFKYISCGLGVLVFLSTFSSILFIDSVPCIFVVLCLVSFECFIFVNCDTNNLASSSTQVP

SEQ ID NO: 185463 - protein, 248 aa, Zea Mays
MAGSRFGSFKSEKGDSASAAAAAGGAAQRRDPYEVLGVGRTATDQEIKSAFRRMALKYHPDKNGDDPVASDRFQEVTFSYNILSDPDKRRQYDTSGFDELELDLSSLNTVNTVFAALFSKLGVPIKTTVSATVLEEALNGSVMVSQLQLGNSVQRKVEKQSAHFYSVDITEKQAKMGLVCRVHSNDKSKFKYISCGLGVLVFLSTFSSILFIDSVPCIFVVLCLVSFECFIFVNCDTNNLASSSTQVP

SEQ ID NO: 185464 - protein, 76 aa, Zea Mays
MRLTLIFFTLISLHFEIVLRNHLEIEALNLWFRLQKSVEPLKLNKDIVLLDRAQGQTVIFLRPYLFTPMLIQVMGD

SEQ ID NO: 185465 - protein, 183 aa, Zea Mays
MSLCCCCSTATGRGVLLPSLLLGRRHWTGHHLLNLRATTTVVSSSSAAATSSLSPPQQRQITVYVDTLLEWNQRMNLTAVTDEAEVMARHVADSLAMLPPLERVYRGRSTSAGGAIDGVRLIDVGSGAGLPGWKFTLLESMRKRCTFLEHAVEAMNLSNVDVVCDRAEDRKLAKVLISEKVMI

SEQ ID NO: 185466 - protein, 148 aa, Zea Mays
MEPGWKFTLLESMRKRCTFLEHAVEAMNLSNVDVVCDRAEKVGQSLDFRESYDIVAARAVAELKVLAEYCIPLVRIGGLFIAAKGHDPHEEVRNAEGAIKKLGASMLELCNVESMGPHGQRTAVLYVKERATPKKYPRLPGTPSKAPL

SEQ ID NO: 185467 - protein, 96 aa, Zea Mays
MSLCCCCSTATGRGVLLPSLLLGRRHWTGHHLLNLRATTTVVSSSSAAATSSLSPPQQRQITVYVDTLLEWNQAGSLRCWSRCGSGARSWSMLLKP

SEQ ID NO: 185468 - protein, 540 aa, Zea Mays
MARTMLPSPSPHTAVKREIEDAEPTAHTPASLPRKKRRRGGRLPVTPTQLPLSPPLVTPQTIPSVASGDASFAGLTPTPVFSAVKDESGADTGVGSNGRASGKRNDSQDLRSVPRPAAAEPPTLWLNRRRLGLILHELAGAHRWRDAASVVSTLLSGNRKPDSYEETRRMFVVAMEIHKRLAEDSSVQYGGRSSYYLRTQKLFNVWMRKLIWFPSCPKKNLVTLELALFYLSQGNIDNAHIATRTLIANGKLQTEPILNLVHGLISFDKWYSGLPKDMQVEDFDVYDESCGIPMKSNGSAGTDLLVNSDEDSMNIDESSLATCSSESSINNENIDKKMNNKPGFLHPKEEMDPLESQGNENLRSIFLDTSDGPTCGLEQSLLPLKLKFATGASNDCFDKYMKYKSVPNTLYEDAEKCLRLALYSNPPVMAALLPLIQILLLGDKLKVALNELEKACLSLATALPFRLRGRLLEEYDQNQVSTIFSCYEEALRRDPTCSYSMERLIKMHKKVYQRIMEGPMQMVGTPSFQPKCLYIRSSVR

SEQ ID NO: 185469 - protein, 361 aa, Zea Mays
MNIDESSLATCSSESSINNENIDKKMNNKPGFLHPKEEMDPLESQGNENLRSIFLDTSDGPTCGLEQSLLPLKLKFATGASNDCFDKYMKYKSVPNTLYEDAEKCLRLALYSNPPVMAALLPLIQILLLGDKLKVALNELEKACLSLATALPFRLRGRLLEEYDQNQVSTIFSCYEEALRRDPTCSYSMERLIKMHKKGYYNTIQLLEAIALHLDSVNGKSCIWEELVSCFLRLFSDNTADYEDCISCTNTHGGESLEASSKFSSVFFEQFTRESWKARCRWWARHHFSQNAYTSEAQSGDCKLLAAKAACAAHLFGPEFPYVKAVGVYIAKQEALDEISVLVRNKQNSVRLLQTLEKLTR

SEQ ID NO: 185470 - protein, 440 aa, Zea Mays
MARTMLPSPSPHTAVKREIEDAEPTAHTPASLPRKKRRRGGRLPVTPTQLPLSPPLVTPQTIPSVASGDASFAGLTPTPVFSAVKDESGADTGVGSNGRASGKRNDSQDLRSVPRPAAAEPPTLWLNRRRLGLILHELAGAHRWRDAASVVSTLLSGNRKPDSYEETRRMFVVAMEIHKRLAEDSSVQYGGRSSYYLRTQKLFNVWMRKLIWFPSCPKKNLVTLELALFYLSQGNIDNAHIATRTLIANGKLQTEPILNLVHGLISFDKWYSGLPKDMQVEDFDVYDESCGIPMKSNGSAGTDLLVNSDEDSMNIDESSLATCSSESSINNENIDKKMNNKPGFLHPKEEMDPLESQGNENLRSIFLDTSDGPTCGLEQSLLPLKLKFATGASNDCFDKYMKYKSVPNTLYEDAEKCLRLALYSNPPVMAALLPLIQVIN

SEQ ID NO: 185471 - protein, 380 aa, Zea Mays
MHTSQQERTDLLVNSDEDSMNIDESSLATCSSESSINNENIDKKMNNKPGFLHPKEEMDPLESQGNENLRSIFLDTSDGPTCGLEQSLLPLKLKFATGASNDCFDKYMKYKSVPNTLYEDAEKCLRLALYSNPPVMAALLPLIQILLLGDKLKVALNELEKACLSLATALPFRLRGRLLEEYDQNQVSTIFSCYEEALRRDPTCSYSMERLIKMHKKGYYNTIQLLEAIALHLDSVNGKSCIWEELVSCFLRLFSDNTADYEDCISCTNTHGGESLEASSKFSSVFFEQFTRESWKARCRWWARHHFSQNAYTSEAQSGDCKLLAAKAACAAHLFGPEFPYVKAVGVYIAKQEALDEISVLVRNKQNSVRLLQTLEKLTR

SEQ ID NO: 185472 - protein, 294 aa, Zea Mays
MNIDESSLATCSSESSINNENIDKKMNNKPGFLHPKEEMDPLESQGNENLRSIFLDTSDGPTCGLEQSLLPLKLKFATGASNDCFDKYMKYKSVPNTLYEDAEKCLRLALYSNPPVMAALLPLIQILLLGDKLKVALNELEKACLSLATALPFRLRGRLLEEYDQNQVSTIFSCYEEALRRDPTCSYSMERLIKMHKKVFFEQFTRESWKARCRWWARHHFSQNAYTSEAQSGDCKLLAAKAACAAHLFGPEFPYVKAVGVYIAKQEALDEISVLVRNKQNSVRLLQTLEKLTR

SEQ ID NO: 185473 - protein, 306 aa, Zea Mays
MARIRGSPCCAERTQGEGAKEDVRITGVTVNGGLLYCQHDEDDEKLGDADEDAESEKLSQPVDNTSDKPDAPSCRLRSDHRKEKSLGLLTQNFVKLFLNMEVGTISLDEAARLLLGEGHADSNMRTKVRRLYDIANVLSSLNLIEKTQQADTRKPAFRWLGQAKRKQDNNVMVSVPPSMKAMPNKRAFGTDLTNIDNKRGKLDSAAENKVKLMQGAGNIVKTFERQLVQGKRSDFVYGPFHPAGAKKHETDDQTVKQQERKNIQDWENLAVSFRPQYQNQALNDLFGHYVEAWKSWYVDLTQETAS

SEQ ID NO: 185474 - protein, 490 aa, Zea Mays
MAKEPSRLCVEEVHRVLLDIVNASANATPGLGRYPPFKREVVAIASNALETFKNDAKKMVVALVDMERAFVPPQHFIRLVQRRMERQRREDELRNRSSKKTQEAEQPTSKRASSPQTDAEQGGGSLKSMKDKSGQQDKDTKEGSNLQVAGPAGEITAGYLLKKSAKTNGWSKRWFVLNEKSGKLGYTKKQEERHFRGVITLEECNLEEVEEEEPSKSSKDSKKANGSEKISSLVFKITNRVAYKTVLKAHSAVVLKAESMADKVEWVNKIKAVIQSKGGSFKGPSTEGSSMRQSNSDGALDTMARRPADPEEELRWMSQEVRGYVEAVLNSLAANVPKAIVLCQVEKAKEDMLNQLYSSISGQSNAKIEELLQEDHNAKRRREKYQKQSSLLSKLTRQLSIHDNRASVSSYSNDTTEAESPRTPTRSGEDWRSAFDSASNGPVAGSTNSQSRSKSADGRSRRYENGDVSSGANSGSRRTPNRLPPAPPKY

SEQ ID NO: 185475 - protein, 849 aa, Zea Mays
MEAMEELSELAESMRQAASLLADDDPSDDAAPRRPTTFLNAVALGNVGAGKSAVLNSLIGHPVLPTGENGATRAPIVVDLQREPGLSSKSIVLQIDSKSQQVSASALRHSLQDRLSRGASGGSGRGRVDEIYLKLRTSTAPSLKLIDLPGIDQRAVDDSMINEYAGHNDAILLIVIPAMQAADVASSRALRLAKDIDADGTRTVGVISKVDQANGDAKTIACVQALLSNKGPKNLPDIEWVALIGQSVAIASAQSVGSENSLETAWRAEAESLKNILTGSPQNKLGRIALVDTIAKQIRKRMKVRVPNLLSGLQGKSQMVQDELARLGESMVQSAEGTRAVALELCREFEDKFLAHITSGEGSGWKIVASFEGKFPDRIKQLPLDRHFDLNNVKRIVLEADGYQPYLISPEKGLRSLIKIVLEMAKEPSRLCVEEVHRVLLDIVNASANATPGLGRYPPFKREVVAIASNALETFKNDAKKMVVALVDMERAFVPPQHFIRLVQRRMERQRREDELRNRSSKKTQEAEQPTSKRASSPQTDAEQGGGSLKSMKDKSGQQDKDTKEGSNLQVAGPAGEITAGYLLKKSAKTNGWSKRWFVLNEKSGKLGYTKKQEERHFRGVITLEECNLEEVEEEEPSKSSKDSKKANGSEKISSLVFKITNRVAYKTVLKAHSAVVLKAESMADKVEWVNKIKAVIQSKGGSFKGPSTEGSSMRQSNSDGALDTMARRPADPEEELRWMSQEVRGYVEAVLNSLAANVPKAIVLCQVEKAKEDMLNQLYSSISGQSNAKIEELLQEDHNAKRRREKYQKQSSLLSKLTRQLSIHDNRASVSSYSNDTTEAATASCTCV

SEQ ID NO: 185476 - protein, 873 aa, Zea Mays
MEAMEELSELAESMRQAASLLADDDPSDDAAPRRPTTFLNAVALGNVGAGKSAVLNSLIGHPVLPTGENGATRAPIVVDLQREPGLSSKSIVLQIDSKSQQVSASALRHSLQDRLSRGASGGSGRGRVDEIYLKLRTSTAPSLKLIDLPGIDQRAVDDSMINEYAGHNDAILLIVIPAMQAADVASSRALRLAKDIDADGTRTVGVISKVDQANGDAKTIACVQALLSNKGPKNLPDIEWVALIGQSVAIASAQSVGSENSLETAWRAEAESLKNILTGSPQNKLGRIALVDTIAKQIRKRMKVRVPNLLSGLQGKSQMVQDELARLGESMVQSAEGTRAVALELCREFEDKFLAHITSGEGSGWKIVASFEGKFPDRIKQLPLDRHFDLNNVKRVHRVLLDIVNASANATPGLGRYPPFKREVVAIASNALETFKNDAKKMVVALVDMERAFVPPQHFIRLVQRRMERQRREDELRNRSSKKTQEAEQPTSKRASSPQTDAEQGGGSLKSMKDKSGQQDKDTKEGSNLQVAGPAGEITAGYLLKKSAKTNGWSKRWFVLNEKSGKLGYTKKQEERHFRGVITLEECNLEEVEEEEPSKSSKDSKKANGSEKISSLVFKITNRVAYKTVLKAHSAVVLKAESMADKVEWVNKIKAVIQSKGGSFKGPSTEGSSMRQSNSDGALDTMARRPADPEEELRWMSQEVRGYVEAVLNSLAANVPKAIVLCQVEKAKEDMLNQLYSSISGQSNAKIEELLQEDHNAKRRREKYQKQSSLLSKLTRQLSIHDNRASVSSYSNDTTEAESPRTPTRSGEDWRSAFDSASNGPVAGSTNSQSRSKSADGRSRRYENGDVSSGANSGSRRTPNRLPPAPPKY

SEQ ID NO: 185477 - protein, 574 aa, Zea Mays
MINEYAGHNDAILLIVIPAMQAADVASSRALRLAKDIDADGTRTVGVISKVDQANGDAKTIACVQALLSNKGPKNLPDIEWVALIGQSVAIASAQSVGSENSLETAWRAEAESLKNILTGSPQNKLGRIALVDTIAKQIRKRMKVRVPNLLSGLQGKSQMVQDELARLGESMVQSAEGTRAVALELCREFEDKFLAHITSGEGSGWKIVASFEGKFPDRIKQLPLDRHFDLNNVKRIVLEADGYQPYLISPEKGLRSLIKIVLEMAKEPSRLCVEEVHRVLLDIVNASANATPGLGRYPPFKREVVAIASNALETFKNDAKKMVVALVDMERAFVPPQHFIRLVQRRMERQRREDELRNRSSKKTQEAEQPTSKRASSPQTDAEQGGGSLKSMKDKSGQQDKDTKEGSNLQVAGPAGEITAGYLLKKSAKTNGWSKRWFVLNEKSGKLGYTKKQEERHFRGVITLEECNLEEVEEEEPSKSSKDSKKANGSEKISSLVFKITNRVAYKTVLKAHSAVVLKAESMADKVEWVNKIKAVIQSKGGSFKGPSTEGSSMRQSNSDGALVPLYILDVPI

SEQ ID NO: 185478 - protein, 432 aa, Zea Mays
MVVALVDMERAFVPPQHFIRLVQRRMERQRREDELRNRSSKKTQEAEQPTSKRASSPQTDAEQGGGSLKSMKDKSGQQDKDTKEGSNLQVAGPAGEITAGYLLKKSAKTNGWSKRWFVLNEKSGKLGYTKKQEERHFRGVITLEECNLEEVEEEEPSKSSKDSKKANGSEKISSLVFKITNRVAYKTVLKAHSAVVLKAESMADKVEWVNKIKAVIQSKGGSFKGPSTEGSSMRQSNSDGALDTMARRPADPEEELRWMSQEVRGYVEAVLNSLAANVPKAIVLCQVEKAKEDMLNQLYSSISGQSNAKIEELLQEDHNAKRRREKYQKQSSLLSKLTRQLSIHDNRASVSSYSNDTTEAESPRTPTRSGEDWRSAFDSASNGPVAGSTNSQSRSKSADGRSRRYENGDVSSGANSGSRRTPNRLPPAPPKY

SEQ ID NO: 185479 - protein, 433 aa, Zea Mays
MIYPECQIDAKVQLYDASSEEEILSGQPDFVLDCIDNIDTKVSLLAACVRRGLKVLSAMGAGARADPTRIRVADLRESSNDPLSRSVRYRLKKEHGIEGGIPVVFSLEKPKAKLLPFQASKEEETPSDYQIVPGFRVRIIPVLGTIPAIFGQVMASYVVTQLAGLDFQTEPVVNLDLDHYRILHQRLIEHEELMYGTAEQVLVDAEEVMYIVKELWRGRSARDQSQDTGRKMWRSVNELMLVRWDKSKAAGISNLILVKFSEADAHESTTLDRIKEQEPEFYSMVSLSTRVELDCHGREDLNHLPQRTWYGASGPRATSPASPQAQRARCLALPEPPSTMVHVATARRRIPMRRRWRPHWRKQGCAARGQGHGTPTRWPRFSWDPRCRARSSIAPRHRKQDAAGRARTPMTMRATRRSGGHCLAPPTKLDCNF

SEQ ID NO: 185480 - protein, 533 aa, Zea Mays
MIYPECQIDAKVQLYDASSEEEILSGQPDFVLDCIDNIDTKVSLLAACVRRGLKVLSAMGAGARADPTRIRVADLRESSNDPLSRSVRYRLKKEHGIEGGIPVVFSLEKPKAKLLPFQASKEEETPSDYQIVPGFRVRIIPVLGTIPAIFGQVMASYVVTQLAGLDFQTEPVVNLDLDHYRILHQRLIEHEELMYGTAEQVLVDAEEVMYIVKELWRGRSARDQSQDTGRKMWRSVNELMLVRWDKSKAAGISNLILVKFSEADAHESTTLDRIKEQEPEFYSMVSLSTRVELDCHGREDLNHLPQRTWYGASGPRATSPASPQAQRARCLALPEPPSTMVHVATARRRIPMRRRWRPHWRKQGCAARGQGHGTPTRWPRFSWDPRCRARSSIAPRHRKQDAAGRRPKRRHGDEDNPSPTPTALCWQTPPSWARTTAEVEAAEEKRLRISPRPDSSAAAAAERAPGEGGRDGGSRQQPPPRAGVFGAQASWHHTNYFPITDDPLEPTAAEEGEDADDNEGNTEEWRTLSSASD

SEQ ID NO: 185481 - protein, 194 aa, Zea Mays
MVHVATARRRIPMRRRWRPHWRKQGCAARGQGHGTPTRWPRFSWDPRCRARSSIAPRHRKQDAAGRRPKRRHGDEDNPSPTPTALCWQTPPSWARTTAEVEAAEEKRLRISPRPDSSAAAAAERAPGEGGRDGGSRQQPPPRAGVFGAQASWHHTNYFPITDDPLEPTAAEEGEDADDNEGNTEEWRTLSSASD

SEQ ID NO: 185482 - protein, 98 aa, Zea Mays
MWSRVPFNSQGRSIVLSTRPVRCLMFDVHSGVLCTQSSAKYLAQATHMFDVTSSVPSKTSGSFVQPVFFVPSCFFAWAYFVMYLILLHDLNKSSNVFI

SEQ ID NO: 185483 - protein, 56 aa, Zea Mays
MPPPLDFESIHPFHPLSFGRSNNEPLALSDLPALDLLSNGCTDRADHALGFMSIVW

SEQ ID NO: 185484 - protein, 68 aa, Zea Mays
MLSSEHMNCKRKGAQEVQKITNLMEARDEIMRTSINMAGAIPSGVVLKTFIISKLLKQRYKKLKLSRQ

SEQ ID NO: 185485 - protein, 77 aa, Zea Mays
MKRRASRTCCYRCTFGSGLMGRHEARKKKARPRHGTTRNILVPGRHNPIYRAEFGPRSWHMGGHEHDPFKAGTKWAI

SEQ ID NO: 185486 - protein, 854 aa, Zea Mays
MTGTTWIIDSQRFATKIKNASGSSDPSKQKWIGNPSKECPKCSHVIDNSDVVHQWPGLPKGVKFDPSDQELIWHLMAKHGKSGIKPHPFIDEFIPTVEEDEGICYTHPQKLPGVKQNGSVSHFFHRTFKAYNTGTRKRRRINTDDADVRWHKTGNTKPVLVDGKHLGCKKIMVLYISPLKGGKAEKTNWVIHQYHLGTGEDERDGEYVVSKIFFQQQFKPRDKNAQELTTSDDLESMAAESNLPDFTTLPTDKHVGTVQEVVHNPEHNLYQVVHQWPGLPKGVKFDPSDQELIWHLMAKHGKSGIKPHPFIDEFIPTVEEDEGICYTHPQKLPGVKQNGSVSHFFHRTFKAYNTGTRKRRRINTDDADVRWHKTGKTKPVLVDGKHLGCKKIMVLYISPLKGGKAEKTNWVIHQYHLGAGEDERDGEYVVSKLFFQQQFKPGDKNAQELTTSDDLESMAAESNLPDFTTLPTDKHVGTVQEVVHNPEHNLYQVVHQWPGLPKGVKFDPSDQELIWHLMAKHGKSGIKPHPFIDEFIPTVEEDEGICYTHPQKLPGVKQNGSVSHFFHRTFKAYNTGTRKRRRINTDDADVRWHKTGKTKPVLVDGKHLGCKKIMVLYISPLKGGKAEKTNWVIHQYHLGTGEDERDGEYVVSKLFFQQQFKPGDKNAQELTTSDDLESMAAESNLPDFTTLPTDKHVGTVQEVVHNPEHNLYQLNRNCEISIEETVVLPPSVKTTKDGDNLQSQDQKLWEGDSQFELLDSQQLAEGLALCDEFLLSQSQTSCGGGDEPRETKPCLAAYAHLSAEDFKKDLECQRLEPTDNTNLELDNTDEFRLSQIEFSQDSFMTWAAEKITDD

SEQ ID NO: 185487 - protein, 1849 aa, Zea Mays
MGFLDGFRPDTLLKRVCKSLLKKRLGDLILGDLDLDQFDIQLGHGTLQLNDLALNAEFINRKLSGSPITLKEGSIKSLLVRFAASCEIVVEELELVLSPSVASEVDDVHTECSVSGSTSDTHTLVKIQRNESDSNQCSTSVSRDVDDGVKRIANAVKRFLTSFNIKLKNAYVIFDPQTSLSSRFPETSRSLVFRIKELEFGTQLGLFKLDNFLTFREAVIEFLKMDDVDTLLQNDLNRGTADISAHHSTTAVLTGPIGGFSGKLNLSIPWNKGCLSFEKIDADVSVDSLELRLQFSSIRWIMNVWDSLQRKPVDEQSCVHNIADISISASSSAYCPPASSSLKPCSDSVIASDYMAQSTFSQNRQDKVQDSFLTSAHVITDWMEPVARKDLCDPDSDCDESIDQFFECFEELRNSQSSLGNSGIWDWTCSVFNAISFASTLASGSDQVPKEPVVERTLRASITEISVLLLFSDDTDIKNSSVPISALDDMRHSEMFSSCLSSEHFEKSIISPATASSLNMHHLKAKCENIHLDLQTYPKNVRLKASIAQIKLDEYYHAGNNISDDSNLGNHFLNNNLRQGVQASLPQCLFAVGDHSVETYEFCGNSSTELTRVELLKTFGECTFCYDVSTKDQDGNLVSSTSMSIYLAPLLLWVHFHTIYMLLSFVSNVESDLSHGEHKIQKHGDEKGSRLTTSTTMSSSGSLKVQISLAQARIVLCFPSEFSWDLSHPSVLDKFLVIDHTSCLNMVETASHPQNEMQNEVHLSKSCTSIHLAVGDIDVYLVKPVNNVLVGRICSSSRQTFSAMKILSVTGSSYNDSGITLIRRKYPVTGPEILNNAWSLPKMHDEKITKNQNSKWAGISPSSNDLLETGSSMRQELLKSTELLFHVQLSCVSLRLSKKDCELLNKLLDHVIKGISNEQTSISGNSKDQSVLINDTFIQTSVLFECSILEICTELNETVEVGPLLQAELKGSWNSVKLNVSKFCLFSCSNVGGLNNASFLWVNHGEGELWGSVSAKNDKIPGESKDFLIVACKDSACRRGDGEGTNVLSIGAAGCSVTHIRNPKLKENYTSVDVRSGTIVAPGGRMDWINAICLLFSSGSDRTEKSDDSNTPNSYQSGEPYSSSLFIELADVAVSYEPHFKHSTLSAGAADRKFFSCLLAASSFKLHNKSASASAATDFDIQLRDLGVLISQSSGSTNGTCSYGVDYLRQAGYTKVVQNTFIEASLRLDSSFWKLEISDSQFDIGTCHDTTYGLIGLGSQLQQLYGPDMQDALDHLQSRWNSVQQANKQNMAADASDKSESSLEILVDSGDYQSDGLLDDIIENAFNTEDCMDTNFWENNYHHLFSSSETDDGFELNAATSHVFPISTPEGNVTQISLEQNVCPDQIIDSYCVPEFHQSLSTLCDEEHKCTSGDNSHRTLESEDAGWYNNVPLTIVENHVLKKKNEQVLQHKVSSVCSLNPDEYCNLKGKVHIHDIDVKWRMYAGDDWLLPQKDLTSLTCTDGRNRSSSLEFTVRGLNIQVDMYPNGDVSISRLSVAAEDITLCDQSIHAPWKLVLGCYNSKDYPRESCSSAFRLELESVRPEPQAPLEDYRLHLEILPLQLHLDQEQLNFLINFFKNDSCNNDPHLHCENDTVDVKSTSNGSNMVVDEALLPFFQKFDVKPLILHINYIPRQFDPIALSKGNYAELLNILPWKGIDLKLKHVSAMGIYGWNSIGDTVAAEWLEDISKNQVHKLLKGLPPIRSLVAVGSGTRKLVSLPIKSYKKDRKLLKGMQRGAVAFIRSVTIEAVGLGVHLAAGAHDMLVKTECALTTVPPPLASCEVKRTKHNIRANQPESAQQGMKQCLKKLRR

SEQ ID NO: 185488 - protein, 1896 aa, Zea Mays
MGFLDGFRPDTLLKRVCKSLLKKRLGDLILGDLDLDQFDIQLGHGTLQLNDLALNAEFINRKLSGSPITLKEGSIKSLLVRFAASCEIVVEELELVLSPSVASEVDDVHTECSVSGSTSDTHTLVKIQRNESDSNQCSTSVSRDVDDGVKRIANAVKRFLTSFNIKLKNAYVIFDPQTSLSSRFPETSRSLVFRIKELEFGTQLGLFKLDNFLTFREAVIEFLKMDDVDTLLQNDLNRGTADISAHHSTTAVLTGPIGGFSGKLNLSIPWNKGCLSFEKIDADVSVDSLELRLQFSSIRWIMNVWDSLQRKPVDEQSCVHNIADISISASSSAYCPPASSSLKPCSDSVIASDYMAQSTFSQNRQDKVQDSFLTSAHVITDWMEPVARKDLCDPDSDCDESIDQFFECFEELRNSQSSLGNSGIWDWTCSVFNAISFASTLASGSDQVPKEPVVERTLRASITEISVLLLFSDDTDIKNSSVPISALDDMRHSEMFSSCLSSEHFEKSIISPATASSLNMHHLKAKCENIHLDLQTYPKNVRLKASIAQIKLDEYYHAGNNISDDSNLGNHFLNNNLRQGVQASLPQCLFAVGDHSVETYEFCGNSSTELTRVELLKTFGECTFCYDVSTKDQDGNLVSSTSMSIYLAPLLLWVHFHTIYMLLSFVSNVESDLSHGEHKIQKHGDEKGSRLTTSTTMSSSGSLKVQISLAQARIVLCFPSEFSWDLSHPSVLDKFLVIDHTSCLNMVETASHPQNEMQNEVHLSKSCTSIHLAVGDIDVYLVKPVNNVLVGRICSSSRQTFSAMKILSVTGSSYNDSGITLIRRKYPVTGPEILNNAWSLPKMHDEKITKNQNSKWAGISPSSNDLLETGSSMRQELLKSTELLFHVQLSCVSLRLSKKDCELLNKLLDHVIKGISNEQTSISGNSKDQSVLINDTFIQTSVLFECSILEICTELNETVEVGPLLQAELKGSWNSVKLNVSKFCLFSCSNVGGLNNASFLWVNHGEGELWGSVSAKNDKIPGESKDFLIVACKDSACRRGDGEGTNVLSIGAAGCSVTHIRNPKLKENYTSVDVRSGTIVAPGGRMDWINAICLLFSSGSDRTEKSDDSNTPNSYQSGEPYSSSLFIELADVAVSYEPHFKHSTLSAGAADRKFFSCLLAASSFKLHNKSASASAATDFDIQLRDLGVLISQSSGSTNGTCSYGVDYLRQAGYTKVVQNTFIEASLRLDSSFWKLEISDSQFDIGTCHDTTYGLIGLGSQLQQLYGPDMQDALDHLQSRWNSVQQANKQNMAADASDKSESSLEILVDSGDYQSDGLLDDIIENAFNTEDCMDTNFWENNYHHLFSSSETDDGFELNAATSHVFPISTPEGNVTQISLEQNVCPDQIIDSYCVPEFHQSLSTLCDEEHKCTSGDNSHRTLESEDAGCLNPDEYCNLKGKVHIHDIDVKWRMYAGDDWLLPQKDLTSLTCTDGRNRSSSLEFTVRGLNIQVDMYPNGDVSISRLSVAAEDITLCDQSIHAPWKLVLGCYNSKDYPRESCSSAFRLELESVRPEPQAPLEDYRLHLEILPLQLHLDQEQLNFLINFFKNDSCNNDPHLHCENDTVDVKSTSNGSNMVVDEALLPFFQKFDVKPLILHINYIPRQFDPIALSKGNYAELLNILPWKGIDLKLKHVSAMGIYGWNSIGDTVAAEWLEDISKNQVHKLLKGLPPIRSLVAVGSGTRKLVSLPIKSYKKDRKLLKGMQRGAVAFIRSVTIEAVGLGVHLAAGAHDMLVKTECALTTVPPPLASCEVKRTKHNIRANQPESAQQGMKQAYESLTDGFGRTSSAIIGNPIKVYNRGAGVGSVLATAICGAPAAAVAPISASARALHYALLGLRNSLDPEHKKESMYKYQGPSQA

SEQ ID NO: 185489 - protein, 1614 aa, Zea Mays
MGFLDGFRPDTLLKRVCKSLLKKRLGDLILGDLDLDQFDIQLGHGTLQLNDLALNAEFINRKLSGSPITLKEGSIKSLLVRFAASCEIVVEELELVLSPSVASEVDDVHTECSVSGSTSDTHTLVKIQRNESDSNQCSTSVSRDVDDGVKRIANAVKRFLTSFNIKLKNAYVIFDPQTSLSSRFPETSRSLVFRIKELEFGTQLGLFKLDNFLTFREAVIEFLKMDDVDTLLQNDLNRGTADISAHHSTTAVLTGPIGGFSGKLNLSIPWNKGCLSFEKIDADVSVDSLELRLQFSSIRWIMNVWDSLQRKPVDEQSCVHNIADISISASSSAYCPPASSSLKPCSDSVIASDYMAQSTFSQNRQDKVQDSFLTSAHVITDWMEPVARKDLCDPDSDCDESIDQFFECFEELRNSQSSLGNSGIWDWTCSVFNAISFASTLASGSDQVPKEPVVERTLRASITEISVLLLFSDDTDIKNSSVPISALDDMRHSEMFSSCLSSEHFEKSIISPATASSLNMHHLKAKCENIHLDLQTYPKNVRLKASIAQIKLDEYYHAGNNISDDSNLGNHFLNNNLRQGVQASLPQCLFAVGDHSVETYEFCGNSSTELTRVELLKTFGECTFCYDVSTKDQDGNLVSSTSMSIYLAPLLLWVHFHTIYMLLSFVSNVESDLSHGEHKIQKHGDEKGSRLTTSTTMSSSGSLKVQISLAQARIVLCFPSEFSWDLSHPSVLDKFLVIDHTSCLNMVETASHPQNEMQNEVHLSKSCTSIHLAVGDIDVYLVKPVNNVLVGRICSSSRQTFSAMKILSVTGSSYNDSGITLIRRKYPVTGPEILNNAWSLPKMHDEKITKNQNSKWAGISPSSNDLLETGSSMRQELLKSTELLFHVQLSCVSLRLSKKDCELLNKLLDHVIKGISNEQTSISGNSKDQSVLINDTFIQTSVLFECSILEICTELNETVEVGPLLQAELKGSWNSVKLNVSKFCLFSCSNVGGLNNASFLWVNHGEGELWGSVSAKNDKIPGESKDFLIVACKDSACRRGDGEGTNVLSIGAAGCSVTHIRNPKLKENYTSVDVRSGTIVAPGGRMDWINAICLLFSSGSDRTEKSDDSNTPNSYQSGEPYSSSLFIELADVAVSYEPHFKHSTLSAGAADRKFFSCLLAASSFKLHNKSASASAATDFDIQLRDLGVLISQSSGSTNGTCSYGVDYLRQAGYTKVVQNTFIEASLRLDSSFWKLEISDSQFDIGTCHDTTYGLIGLGSQLQQLYGPDMQDALDHLQSRWNSVQQANKQNMAADASDKSESSLEILVDSGDYQSDGLLDDIIENAFNTEDCMDTNFWENNYHHLFSSSETDDGFELNAATSHVFPISTPEGNVTQISLEQNVCPDQIIDSYCVPEFHQSLSTLCDEEHKCTSGDNSHRTLESEDAGWYNNVPLTIVENHVLKKKNEQVLQHKVSSVCSLNPDEYCNLKGKVHIHDIDVKWRMYAGDDWLLPQKDLTSLTCTDGRNRSSSLEFTVRGLNIQVDMYPNGDVSISRLSVAAEDITLCDQSIHAPWKLVLGCYNSKDYPRESCSSAFRLELESVRPEPQAPLEDYRAQAMEAIWLWMRHYFLSFRNLT

SEQ ID NO: 185490 - protein, 1927 aa, Zea Mays
MGFLDGFRPDTLLKRVCKSLLKKRLGDLILGDLDLDQFDIQLGHGTLQLNDLALNAEFINRKLSGSPITLKEGSIKSLLVRFAASCEIVVEELELVLSPSVASEVDDVHTECSVSGSTSDTHTLVKIQRNESDSNQCSTSVSRDVDDGVKRIANAVKRFLTSFNIKLKNAYVIFDPQTSLSSRFPETSRSLVFRIKELEFGTQLGLFKLDNFLTFREAVIEFLKMDDVDTLLQNDLNRGTADISAHHSTTAVLTGPIGGFSGKLNLSIPWNKGCLSFEKIDADVSVDSLELRLQFSSIRWIMNVWDSLQRKPVDEQSCVHNIADISISASSSAYCPPASSSLKPCSDSVIASDYMAQSTFSQNRQDKVQDSFLTSAHVITDWMEPVARKDLCDPDSDCDESIDQFFECFEELRNSQSSLGNSGIWDWTCSVFNAISFASTLASGSDQVPKEPVVERTLRASITEISVLLLFSDDTDIKNSSVPISALDDMRHSEMFSSCLSSEHFEKSIISPATASSLNMHHLKAKCENIHLDLQTYPKNVRLKASIAQIKLDEYYHAGNNISDDSNLGNHFLNNNLRQGVQASLPQCLFAVGDHSVETYEFCGNSSTELTRVELLKTFGECTFCYDVSTKDQDGNLVSSTSMSIYLAPLLLWVHFHTIYMLLSFVSNVESDLSHGEHKIQKHGDEKGSRLTTSTTMSSSGSLKVQISLAQARIVLCFPSEFSWDLSHPSVLDKFLVIDHTSCLNMVETASHPQNEMQNEVHLSKSCTSIHLAVGDIDVYLVKPVNNVLVGRICSSSRQTFSAMKILSVTGSSYNDSGITLIRRKYPVTGPEILNNAWSLPKMHDEKITKNQNSKWAGISPSSNDLLETGSSMRQELLKSTELLFHVQLSCVSLRLSKKDCELLNKLLDHVIKGISNEQTSISGNSKDQSVLINDTFIQTSVLFECSILEICTELNETVEVGPLLQAELKGSWNSVKLNVSKFCLFSCSNVGGLNNASFLWVNHGEGELWGSVSAKNDKIPGESKDFLIVACKDSACRRGDGEGTNVLSIGAAGCSVTHIRNPKLKENYTSVDVRSGTIVAPGGRMDWINAICLLFSSGSDRTEKSDDSNTPNSYQSGEPYSSSLFIELADVAVSYEPHFKHSTLSAGAADRKFFSCLLAASSFKLHNKSASASAATDFDIQLRDLGVLISQSSGSTNGTCSYGVDYLRQAGYTKVVQNTFIEASLRLDSSFWKLEISDSQFDIGTCHDTTYGLIGLGSQLQQLYGPDMQDALDHLQSRWNSVQQANKQNMAADASDKSESSLEILVDSGDYQSDGLLDDIIENAFNTEDCMDTNFWENNYHHLFSSSETDDGFELNAATSHVFPISTPEGNVTQISLEQNVCPDQIIDSYCVPEFHQSLSTLCDEEHKCTSGDNSHRTLESEDAGWYNNVPLTIVENHVLKKKNEQVLQHKVSSVCSLNPDEYCNLKGKVHIHDIDVKWRMYAGDDWLLPQKDLTSLTCTDGRNRSSSLEFTVRGLNIQVDMYPNGDVSISRLSVAAEDITLCDQSIHAPWKLVLGCYNSKDYPRESCSSAFRLELESVRPEPQAPLEDYRLHLEILPLQLHLDQEQLNFLINFFKNDSCNNDPHLHCENDTVDVKSTSNGSNMVVDEALLPFFQKFDVKPLILHINYIPRQFDPIALSKGNYAELLNILPWKGIDLKLKHVSAMGIYGWNSIGDTVAAEWLEDISKNQVHKLLKGLPPIRSLVAVGSGTRKLVSLPIKSYKKDRKLLKGMQRGAVAFIRSVTIEAVGLGVHLAAGAHDMLVKTECALTTVPPPLASCEVKRTKHNIRANQPESAQQGMKQAYESLTDGFGRTSSAIIGNPIKVYNRGAGVGSVLATAICGAPAAAVAPISASARALHYALLGLRNSLDPEHKKESMYKYQGPSQA

SEQ ID NO: 185491 - protein, 1843 aa, Zea Mays
MGFLDGFRPDTLLKRVCKSLLKKRLGDLILGDLDLDQFDIQLGHGTLQLNDLALNAEFINRKLSGSPITLKEGSIKSLLVRFAASCEIVVEELELVLSPSVASEVDDVHTECSVSGSTSDTHTLVKIQRNESDSNQCSTSVSRDVDDGVKRIANAVKRFLTSFNIKLKNAYVIFDPQTSLSSRFPETSRSLVFRIKELEFGTQLGLFKLDNFLTFREAVIEFLKMDDVDTLLQNDLNRGTADISAHHSTTAVLTGPIGGFSGKLNLSIPWNKGCLSFEKIDADVSVDSLELRLQFSSIRWIMNVWDSLQRKPVDEQSCVHNIADISISASSSAYCPPASSSLKPCSDSVIASDYMAQSTFSQNRQDKVQDSFLTSAHVITDWMEPVARKDLCDPDSDCDESIDQFFECFEELRNSQSSLGNSGIWDWTCSVFNAISFASTLASGSDQVPKEPVVERTLRASITEISVLLLFSDDTDIKNSSVPISALDDMRHSEMFSSCLSSEHFEKSIISPATASSLNMHHLKAKCENIHLDLQTYPKNVRLKASIAQIKLDEYYHAGNNISDDSNLGNHFLNNNLRQGVQASLPQCLFAVGDHSVETYEFCGNSSTELTRVELLKTFGECTFCYDVSTKDQDGNLVSSTSMSIYLAPLLLWVHFHTIYMLLSFVSNVESDLSHGEHKIQKHGDEKGSRLTTSTTMSSSGSLKVQISLAQARIVLCFPSEFSWDLSHPSVLDKFLVIDHTSCLNMVETASHPQNEMQNEVHLSKSCTSIHLAVGDIDVYLVKPVNNVLVGRICSSSRQTFSAMKILSVTGSSYNDSGITLIRRKYPVTGPEILNNAWSLPKMHDEKITKNQNSKWAGISPSSNDLLETGSSMRQELLKSTELLFHVQLSCVSLRLSKKDCELLNKLLDHVIKGISNEQTSISGNSKDQSVLINDTFIQTSVLFECSILEICTELNETVEVGPLLQAELKGSWNSVKLNVSKFCLFSCSNVGGLNNASFLWVNHGEGELWGSVSAKNDKIPGESKDFLIVACKDSACRRGDGEGTNVLSIGAAGCSVTHIRNPKLKENYTSVDVRSGTIVAPGGRMDWINAICLLFSSGSDRTEKSDDSNTPNSYQSGEPYSSSLFIELADVAVSYEPHFKHSTLSAGAADRKFFSCLLAASSFKLHNKSASASAATDFDIQLRDLGVLISQSSGSTNGTCSYGVDYLRQAGYTKVVQNTFIEASLRLDSSFWKLEISDSQFDIGTCHDTTYGLIGLGSQLQQLYGPDMQDALDHLQSRWNSVQQANKQNMAADASDKSESSLEILVDSGDYQSDGLLDDIIENAFNTEDCMDTNFWENNYHHLFSSSETDDGFELNAATSHVFPISTPEGNVTQISLEQNVCPDQIIDSYCVPEFHQSLSTLCDEEHKCTSGDNSHRTLESEDAGWYNNVPLTIVENHVLKKKNEQVLQHKVSSVCSLNPDEYCNLKGKVHIHDIDVKWRMYAGDDWLLPQKDLTSLTCTDGRNRSSSLEFTVRGLNIQVDMYPNGDVSISRLSVAAEDITLCDQSIHAPWKLVLGCYNSKDYPRESCSSAFRLELESVRPEPQAPLEDYRLHLEILPLQLHLDQEQLNFLINFFKNDSCNNDPHLHCENDTVDVKSTSNGSNMVVDEALLPFFQKFDVKPLILHINYIPRQFDPIALSKGNYAELLNILPWKGIDLKLKHVSAMGIYGWNSIGDTVAAEWLEDISKNQVHKLLKGLPPIRSLVAVGSGTRKLVSLPIKSYKKDRKLLKGMQRGAVAFIRSVTIEAVGLGVHLAAGAHDMLVKTECALTTVPPPLASCEVKRTKHNIRANQPESAQQGMKQP

SEQ ID NO: 185492 - protein, 1930 aa, Zea Mays
MGFLDGFRPDTLLKRVCKSLLKKRLGDLILGDLDLDQFDIQLGHGTLQLNDLALNAEFINRKLSGSPITLKEGSIKSLLVRFAASCEIVVEELELVLSPSVASEVDDVHTECSVSGSTSDTHTLVKIQRNESDSNQCSTSVSRDVDDGVKRIANAVKRFLTSFNIKLKNAYVIFDPQTSLSSRFPETSRSLVFRIKELEFGTQLGLFKLDNFLTFREAVIEFLKMDDVDTLLQNDLNRGTADISAHHSTTAVLTGPIGGFSGKLNLSIPWNKGCLSFEKIDADVSVDSLELRLQFSSIRWIMNVWDSLQRKPVDEQSCVHNIADISISASSSAYCPPASSSLKPCSDSVIASDYMAQSTFSQNRQDKVQDSFLTSAHVITDWMEPVARKDLCDPDSDCDESIDQFFECFEELRNSQSSLGNSGIWDWTCSVFNAISFASTLASGSDQVPKEPVVERTLRASITEISVLLLFSDDTDIKNSSVPISALDDMRHSEMFSSCLSSEHFEKSIISPATASSLNMHHLKAKCENIHLDLQTYPKNVRLKASIAQIKLDEYYHAGNNISDDSNLGNHFLNNNLRQGVQASLPQCLFAVGDHSVETYEFCGNSSTELTRVELLKTFGECTFCYDVSTKDQDGNLVSSTSMSIYLAPLLLWVHFHTIYMLLSFVSNVESDLSHGEHKIQKHGDEKGSRLTTSTTMSSSGSLKVQISLAQARIVLCFPSEFSWDLSHPSVLDKFLVIDHTSCLNMVETASHPQNEMQNEVHLSKSCTSIHLAVGDIDVYLVKPVNNVLVGRICSSSRQTFSAMKILSVTGSSYNDSGITLIRRKYPVTGPEILNNAWSLPKMHDEKITKNQNSKWAGISPSSNDLLETGSSMRQELLKSTELLFHVQLSCVSLRLSKKDCELLNKLLDHVIKGISNEQTSISGNSKDQSVLINDTFIQTSVLFECSILEICTELNETVEVGPLLQAELKGSWNSVKLNVSKFCLFSCSNVGGLNNASFLWVNHGEGELWGSVSAKNDKIPGESKDFLIVACKDSACRRGDGEGTNVLSIGAAGCSVTHIRNPKLKENYTSVDVRSGTIVAPGGRMDWINAICLLFSSGSDRTEKSDDSNTPNSYQSGEPYSSSLFIELADVAVSYEPHFKHSTLSAGAADRKFFSCLLAASSFKLHNKSASASAATDFDIQLRDLGVLISQSSGSTNGTCSYGVDYLRQAGYTKVVQNTFIEASLRLDSSFWKLEISDSQFDIGTCHDTTYGLIGLGSQLQQLYGPDMQDALDHLQSRWNSVQQANKQNMAADASDKSESSLEILVDSGDYQSDGLLDDIIENAFNTEDCMDTNFWENNYHHLFSSSETDDGFELNAATSHVFPISTPEGNVTQISLEQNVCPDQIIDSYCVPEFHQSLSTLCDEEHKCTSGDNSHRTLESEDAGWYNNVPLTIVENHVLKKKNEQVLQHKVSSVCSLNPDEYCNLKGKVHIHDIDVKWRMYAGDDWLLPQKDLTSLTCTDGRNRSSSLEFTVRGLNIQVDMYPNGDVSISRLSVAAEDITLCDQSIHAPWKLVLGCYNSKDYPRESCSSAFRLELESVRPEPQAPLEDYRLHLEILPLQLHLDQEQLNFLINFFKNDSCNNDPHLHCENDTVDVKSTSNGSNMVVDEALLPFFQKFDVKPLILHINYIPRQFDPIALSKGNYAELLNILPWKGIDLKLKHVSAMGIYGWNSIGDTVAAEWLEDISKNQVHKLLKGLPPIRSLVAVGSGTRKLVSLPIKSYKKDRKLLKGMQRGAVAFIRSVTIEAVGLGVHLAAGAHDMLVKTECALTTVPPPLASCEVKRTKHNIRANQPESAQQGMKQAYESLTDGFGRTSSAIIGNPIKVYNRGAGVGSVLATAICGAPAAAVAPISASARALHYALLGLRNRDPPKHRRHWWSVHSLASLTPSP

SEQ ID NO: 185493 - protein, 1863 aa, Zea Mays
MGFLDGFRPDTLLKRVCKSLLKKRLGDLILGDLDLDQFDIQLGHGTLQLNDLALNAEFINRKLSGSPITLKEGSIKSLLVRFAASCEIVVEELELVLSPSVASEVDDVHTECSVSGSTSDTHTLVKIQRNESDSNQCSTSVSRDVDDGVKRIANAVKRFLTSFNIKLKNAYVIFDPQTSLSSRFPETSRSLVFRIKELEFGTQLGLFKLDNFLTFREAVIEFLKMDDVDTLLQNDLNRGTADISAHHSTTAVLTGPIGGFSGKLNLSIPWNKGCLSFEKIDADVSVDSLELRLQFSSIRWIMNVWDSLQRKPVDEQSCVHNIADISISASSSAYCPPASSSLKPCSDSVIASDYMAQSTFSQNRQDKVQDSFLTSAHVITDWMEPVARKDLCDPDSDCDESIDQFFECFEELRNSQSSLGNSGIWDWTCSVFNAISFASTLASGSDQVPKASSLNMHHLKAKCENIHLDLQTYPKNVRLKASIAQIKLDEYYHAGNNISDDSNLGNHFLNNNLRQGVQASLPQCLFAVGDHSVETYEFCGNSSTELTRVELLKTFGECTFCYDVSTKDQDGNLVSSTSMSIYLAPLLLWVHFHTIYMLLSFVSNVESDLSHGEHKIQKHGDEKGSRLTTSTTMSSSGSLKVQISLAQARIVLCFPSEFSWDLSHPSVLDKFLVIDHTSCLNMVETASHPQNEMQNEVHLSKSCTSIHLAVGDIDVYLVKPVNNVLVGRICSSSRQTFSAMKILSVTGSSYNDSGITLIRRKYPVTGPEILNNAWSLPKMHDEKITKNQNSKWAGISPSSNDLLETGSSMRQELLKSTELLFHVQLSCVSLRLSKKDCELLNKLLDHVIKGISNEQTSISGNSKDQSVLINDTFIQTSVLFECSILEICTELNETVEVGPLLQAELKGSWNSVKLNVSKFCLFSCSNVGGLNNASFLWVNHGEGELWGSVSAKNDKIPGESKDFLIVACKDSACRRGDGEGTNVLSIGAAGCSVTHIRNPKLKENYTSVDVRSGTIVAPGGRMDWINAICLLFSSGSDRTEKSDDSNTPNSYQSGEPYSSSLFIELADVAVSYEPHFKHSTLSAGAADRKFFSCLLAASSFKLHNKSASASAATDFDIQLRDLGVLISQSSGSTNGTCSYGVDYLRQAGYTKVVQNTFIEASLRLDSSFWKLEISDSQFDIGTCHDTTYGLIGLGSQLQQLYGPDMQDALDHLQSRWNSVQQANKQNMAADASDKSESSLEILVDSGDYQSDGLLDDIIENAFNTEDCMDTNFWENNYHHLFSSSETDDGFELNAATSHVFPISTPEGNVTQISLEQNVCPDQIIDSYCVPEFHQSLSTLCDEEHKCTSGDNSHRTLESEDAGWYNNVPLTIVENHVLKKKNEQVLQHKVSSVCSLNPDEYCNLKGKVHIHDIDVKWRMYAGDDWLLPQKDLTSLTCTDGRNRSSSLEFTVRGLNIQVDMYPNGDVSISRLSVAAEDITLCDQSIHAPWKLVLGCYNSKDYPRESCSSAFRLELESVRPEPQAPLEDYRLHLEILPLQLHLDQEQLNFLINFFKNDSCNNDPHLHCENDTVDVKSTSNGSNMVVDEALLPFFQKFDVKPLILHINYIPRQFDPIALSKGNYAELLNILPWKGIDLKLKHVSAMGIYGWNSIGDTVAAEWLEDISKNQVHKLLKGLPPIRSLVAVGSGTRKLVSLPIKSYKKDRKLLKGMQRGAVAFIRSVTIEAVGLGVHLAAGAHDMLVKTECALTTVPPPLASCEVKRTKHNIRANQPESAQQGMKQAYESLTDGFGRTSSAIIGNPIKVYNRGAGVGSVLATAICGAPAAAVAPISASARALHYALLGLRNSLDPEHKKESMYKYQGPSQA

SEQ ID NO: 185494 - protein, 1436 aa, Zea Mays
MRHSEMFSSCLSSEHFEKSIISPATASSLNMHHLKAKCENIHLDLQTYPKNVRLKASIAQIKLDEYYHAGNNISDDSNLGNHFLNNNLRQGVQASLPQCLFAVGDHSVETYEFCGNSSTELTRVELLKTFGECTFCYDVSTKDQDGNLVSSTSMSIYLAPLLLWVHFHTIYMLLSFVSNVESDLSHGEHKIQKHGDEKGSRLTTSTTMSSSGSLKVQISLAQARIVLCFPSEFSWDLSHPSVLDKFLVIDHTSCLNMVETASHPQNEMQNEVHLSKSCTSIHLAVGDIDVYLVKPVNNVLVGRICSSSRQTFSAMKILSVTGSSYNDSGITLIRRKYPVTGPEILNNAWSLPKMHDEKITKNQNSKWAGISPSSNDLLETGSSMRQELLKSTELLFHVQLSCVSLRLSKKDCELLNKLLDHVIKGISNEQTSISGNSKDQSVLINDTFIQTSVLFECSILEICTELNETVEVGPLLQAELKGSWNSVKLNVSKFCLFSCSNVGGLNNASFLWVNHGEGELWGSVSAKNDKIPGESKDFLIVACKDSACRRGDGEGTNVLSIGAAGCSVTHIRNPKLKENYTSVDVRSGTIVAPGGRMDWINAICLLFSSGSDRTEKSDDSNTPNSYQSGEPYSSSLFIELADVAVSYEPHFKHSTLSAGAADRKFFSCLLAASSFKLHNKSASASAATDFDIQLRDLGVLISQSSGSTNGTCSYGVDYLRQAGYTKVVQNTFIEASLRLDSSFWKLEISDSQFDIGTCHDTTYGLIGLGSQLQQLYGPDMQDALDHLQSRWNSVQQANKQNMAADASDKSESSLEILVDSGDYQSDGLLDDIIENAFNTEDCMDTNFWENNYHHLFSSSETDDGFELNAATSHVFPISTPEGNVTQISLEQNVCPDQIIDSYCVPEFHQSLSTLCDEEHKCTSGDNSHRTLESEDAGWYNNVPLTIVENHVLKKKNEQVLQHKVSSVCSLNPDEYCNLKGKVHIHDIDVKWRMYAGDDWLLPQKDLTSLTCTDGRNRSSSLEFTVRGLNIQVDMYPNGDVSISRLSVAAEDITLCDQSIHAPWKLVLGCYNSKDYPRESCSSAFRLELESVRPEPQAPLEDYRLHLEILPLQLHLDQEQLNFLINFFKNDSCNNDPHLHCENDTVDVKSTSNGSNMVVDEALLPFFQKFDVKPLILHINYIPRQFDPIALSKGNYAELLNILPWKGIDLKLKHVSAMGIYGWNSIGDTVAAEWLEDISKNQVHKLLKGLPPIRSLVAVGSGTRKLVSLPIKSYKKDRKLLKGMQRVAFIRSVTIEAVGLGVHLAAGAHDMLVKTECALTTVPPPLASCEVKRTKHNIRANQPESAQQGMKQAYESLTDGFGRTSSAIIGNPIKVYNRGAGVGSVLATAICGAPAAAVAPISASARALHYALLGLRNSLDPEHKKESMYKYQGPSQA

SEQ ID NO: 185495 - protein, 1354 aa, Zea Mays
MRHSEMFSSCLSSEHFEKSIISPATASSLNMHHLKAKCENIHLDLQTYPKNVRLKASIAQIKLDEYYHAGNNISDDSNLGNHFLNNNLRQGVQASLPQCLFAVGDHSVETYEFCGNSSTELTRVELLKTFGECTFCYDVSTKDQDGNLVSSTSMSIYLAPLLLWVHFHTIYMLLSFVSNVESDLSHGEHKIQKHGDEKGSRLTTSTTMSSSGSLKVQISLAQARIVLCFPSEFSWDLSHPSVLDKFLVIDHTSCLNMVETASHPQNEMQNEVHLSKSCTSIHLAVGDIDVYLVKPVNNVLVGRICSSSRQTFSAMKILSVTGSSYNDSGITLIRRKYPVTGPEILNNAWSLPKMHDEKITKNQNSKWAGISPSSNDLLETGSSMRQELLKSTELLFHVQLSCVSLRLSKKDCELLNKLLDHVIKGISNEQTSISGNSKDQSVLINDTFIQTSVLFECSILEICTELNETVEVGPLLQAELKGSWNSVKLNVSKFCLFSCSNVGGLNNASFLWVNHGEGELWGSVSAKNDKIPGESKDFLIVACKDSACRRGDGEGTNVLSIGAAGCSVTHIRNPKLKENYTSVDVRSGTIVAPGGRMDWINAICLLFSSGSDRTEKSDDSNTPNSYQSGEPYSSSLFIELADVAVSYEPHFKHSTLSAGAADRKFFSCLLAASSFKLHNKSASASAATDFDIQLRDLGVLISQSSGSTNGTCSYGVDYLRQAGYTKVVQNTFIEASLRLDSSFWKLEISDSQFDIGTCHDTTYGLIGLGSQLQQLYGPDMQDALDHLQSRWNSVQQANKQNMAADASDKSESSLEILVDSGDYQSDGLLDDIIENAFNTEDCMDTNFWENNYHHLFSSSETDDGFELNAATSHVFPISTPEGNVTQISLEQNVCPDQIIDSYCVPEFHQSLSTLCDEEHKCTSGDNSHRTLESEDAGWYNNVPLTIVENHVLKKKNEQVLQHKVSSVCSLNPDEYCNLKGKVHIHDIDVKWRMYAGDDWLLPQKDLTSLTCTDGRNRSSSLEFTVRGLNIQVDMYPNGDVSISRLSVAAEDITLCDQSIHAPWKLVLGCYNSKDYPRESCSSAFRLELESVRPEPQAPLEDYRLHLEILPLQLHLDQEQLNFLINFFKNDSCNNDPHLHCENDTVDVKSTSNGSNMVVDEALLPFFQKFDVKPLILHINYIPRQFDPIALSKGNYAELLNILPWKGIDLKLKHVSAMGIYGWNSIGDTVAAEWLEDISKNQVHKLLKGLPPIRSLVAVGSGTRKLVSLPIKSYKKDRKLLKGMQRGAVAFIRSVTIEAVGLGVHLAAGAHDMLVKTECALTTVPPPLASCEVKRTKHNIRANQPESAQQGMKQP

SEQ ID NO: 185496 - protein, 263 aa, Zea Mays
MGSSAALQPKQLYQLVVNNFVAVLAAPLAVAAVVNAARVGPDELLGRLQALRAVHVFLAVFVAAATAILYVLLRPRAVYLVDYACFRTRPNCRVPFATFLEHAKLVTFVEGASIDERSVRFMTRLLERSGLGEETCLPPAHHYIPPYRNMEASRAEVELVIFSAIDDLLAKTGISPSAIDILVVNCSLFAPVPSFTDMVINRWRAGARTRWWCRRRPSPQTTTWARSAPCSCPTASSASAAPPCCCPRPGPGPGSAWPAWCAR

SEQ ID NO: 185497 - protein, 1218 aa, Zea Mays
MGVPVAQKSDSWVTVLAMTDSGGLGVRPINGGRGSAVEQRGLGLGDNGPPVSPPERVSTPPAPRLAAWWRMSSPGPLRCSTPRSVGCEDGDDSDRYFSPQSEFSQDTSDTDSMSTSISRMYTFRLGTSSPLDSPIKQLGVGDTSPPSRKGCHSPRYPWNSCRGSDDVDSSFMSSPRHDDEERKYDVQPIDFESRHIWYPPPPQDENGTFQYDEDDDNDVCDGKVFGHINHDYCDGEDDDDVLGIKGKHSISHKEFLRSALHGHFRALVSQLLEGHGIDPVDGWPDIVSSLAWQAATFVRPDTSKGGSMDPTDYVKVKCVASGNPNDSAFIKGVVCSKNVKHKRMVSKHENPRLLLLGGALEYQKVTNKLASINSILEQEKEYLKNAVAKIEAQRPQVLLVEKSVPLHAQQLLAKDISLVLNVKRSLLERISRCTGAQIASSVENITSTGVGQCQTFWIERVTECSSPKVSNKNTVKTLMFFDGCPRRLGCTVLLRGKSYEELKKVKLAVQYALFAAYHLSLETSYLADEGATLPKVPSDLQLEKPNSSSRYYQQNLIEFQTIEGETYGAGCITPCLNGSANQSHSRDDIIHEEHAHCHSRSDLSWEEYTGGTIDVYPYSTEASMYSSCMPPVCMTVQTPKSSLASARKSTPGNLFFSNNVHIDEAGGGMSKVDNDVLDLDNGWNHISDEDSVAIHDHNGNHNEYFPTSDSPQSILVSLSIACPLRGIVCKQSQLFRIKFYGTFDKPLGTYFREDLFVQTSCCESCKEPAESHVRCYTHQQGSLTISVKTLPSVKLPGELDGKVWMWHRCLRCKPKDGIPPATQRIVMSDAARGLSFGKFLELSFSNHTTANRIACCGHSLQRDCLRFYGLGSMVAVFRYSPVDILSVNLPSSVLDFACPKAQDWIIKEAVDVCARKEHLYREIVAKLDCIEKIVKDQNIGMKSGLHKHVADLKELVKVEWKKYDVVSAFSIVDNLQTFEPYIDVLELNLLRRELVHDIHVWDRRLYMMHSLTKENCRTMPNDAQFSEKFTESSLEQSKDVTSGKHLNAESSLEQNQPSTLEVAAVSVKSSPMTEQTNTSISHLALETTIMGDASMHSVSTVISFAPGSYEMQSEGVLAELEAGKTLQKSQSSASNLSDRIDLAWTGSGQLVNDSSSSMEAVSFIPASLKDNPAYQKVIAPIRIKSFDSAISSRNVDDSNASIRRSYSQRPPKAIERTV

SEQ ID NO: 185498 - protein, 590 aa, Zea Mays
MMHSLTKENCRTMPNDAQFSEKFTESSLEQSKDVTSGKHLNAESSLEQNQPSTLEVAAVSVKSSPMTEQTNTSISHLALETTIMGDASMHSVSTVISFAPGSYEMQSEGVLAELEAGKTLQKSQSSASNLSDRIDLAWTGSGQLVNDSSSSMEAVSFIPASLKDNPAYQKVIAPIRIKSFDSAISSRNVDDSNASIRRSYSQRPPKAIERTGKGLSPTFLNKLSLPGMIHGESRLLLSQNDSGVIVPIYDDEPSSMIAHAMTVPEYHSFLLPLLYQNNESNLLNYGSDQPQPITRNDSKYNHFTISFEDEDSNSVDKAKFSVTCYFAKQFDAIRRKCCPDELDYIRSLSRCKRWSAQGGKSNVYFAKTLDDRFVIKQVTRTELDSFEDYAADYFKYLIDSVSSGSPTCLTKVLGLYQIIAKNLRDGKELKMDVMVMENLFFKRKVSRIYDLKGSLRSRYNPDTSGNNKVLLDLNLLETLHTKPIFLGSKAKRRLERAVWNDTSFLASVDVMDYSLLVGIDEERKELVMGIIDYLRQYTWDKQLETWVKATGFLGGSKDVLPTIISPDQYKKRFRKAMSKYFLALPDQWSP

SEQ ID NO: 185499 - protein, 95 aa, Zea Mays
MAGKAAADTGSNDRVVEVEGSSSSSMADVYKGELTPLQRHVSFFDRNKDGVIYPSETYQGFRAIGCGVALSAAAAVFVNGGLGPKTVLVPELESL

SEQ ID NO: 185500 - protein, 70 aa, Zea Mays
MADVYKGELTPLQRHVSFFDRNKDGVIYPSETYQGFRAIGCGVALSAAAAVFVNGGLGPKTVLVPELESL

SEQ ID NO: 185501 - protein, 116 aa, Zea Mays
MEGSRPRWQMNLGKPLPSSSAWWQRPPLSSSSSPSSVGPGLPEAKAKSLQDGHHLARIGSIGRWLLLENRLSHLPPFYLLGVSFLMSASLQTKGCLKGVPCADMCKVKIPSGTSYS

SEQ ID NO: 185502 - protein, 2490 aa, Zea Mays
MASSQHVEMEAAKLLHKLIQESKDEPAKLATKLYVICQHMKLSGKEQSLPYQVISRAMETVVNQHGIDMDALRSSRIPFAGGPQAGDSSGVMSKDKEVIGNQSPMVGSDASQSSGQAGLWQLPSGSTDMIRHGASISGRVPTGPNRGDFSAADIHQGSMSQKSGRSSGIESPASLQMEDTRSMNSHDSLKSDEKTSKKTSSKRKRMDSKGAGDLRSEDNSKSDVISTGQNTRKGKQVGKAGRQGQPSMGIEHEQQPHKLQGGTGQVPPIHGGAPFLRTRSEGPSGRTMDKTKPSNPFSMGQIPNFPEGLASTGAPIELQKSIQGGASLFNPGFGWNQNPQVQTLKNSQGSIHNLVRSGVTVEGKVNVGAQGAFNSASAPQMEFPTVPPYNPSSFGASSQFLDKGKELVSSIISTEPHSSKVASQPGISHGSPMQERQGMIRVPQRGEASFQERRPSSLPSRSTGPSPMSHISSNTPFKEQQLKQLRAQCLVFLAFRNNLQPRKVHLEIALGRGPPAESDSAGQRGSEGRVSDALGKENGSSRENSGVFCRQTDISRLPATSAGSIAEDDSLSKDPENATKKIKLAEQEKSLMEVENVQQASVMQGTSSEMRSQETASQNPYRPQQSYYQGDTRRIASDIHRTDAEILNQNLSWGGQGSTALGGTRQLLNQETKESLAPSKSHHMPVDGYNSNIQGIDRTPEIAGAGNDVENCSHVADIVPEQAADEGDEDLSEHEDLLSSPKHTMTEKWILDYQKRIYNEKQKRTLEQHKVHSRMSATYEELKESVNSSEDLSAKTKSVIELKKLQLLPLQRRVRSEFLLDFFKPNTSDLERIKSLKKHRHGRRVKQLEKIEQKMKEERQKRIRERQKEFFADIEAYREKLEDNFKVKRERLKGFNRYIKEFHKRKERIHREKLDRIQREKINLLKNNDVEGYLRMVKDAKSDRVKQLLRETEKYLQKLGNKLQSAKSTDGRSSFVTDKSDTANDIEDESYQPQHYLESNEKYYQLAHSVKETVNDQPSYLQGGKLREYQMNGLRWLVSLYNNNLNGILADEMGLGKTVQVISLICYLMETKNDRGPFLVVVPSSVLPGWESELSFWAPSINKIAYAGPPEERRRMFKEMIVHQKFNVLLTTYEYLMNKHDRPKLSKIQWHYIIIDEGHRIKNASCKLNADLKLYRSSHRILLTGTPLQNNLEELWALLNFLLPNIFNSSEDFSQWFNKPFESNGDNSPDEALLSEEENLLIINRLHQVLRPFVLRRLKHKVENELPEKIERLVRCEASAYQKLLMTRVEENLGGIGAVKVRSVHNSVMELRNICNHPYLSQLHVEEIEGYLPKHYLPSILRLCGKLEMLDRLLPKLKATGHRVLLFSTMTRLLDVMEDYLVWKKYKYLRLDGHTSGHERGALIDKFNDPNSQAFIFLLSIRAGGVGVNLQAADTVIIFDTDWNPQVDLQAQARAHRIGQKKEVLVLRLETVRTVEEQVRASAEHKLGVANQSITAGFFDNNTSAEDRREYLESLLRESKKEEAAPVLDDDALNDILARSEAEIDIFESIDKQRREEEMAAWQKVVQDGSTSGLDPGVLPSRLVTDDDLKPFCHAMKLYEPSNVKTVNVNVRKKGELGGLDTQHYGRGKRAREVRSYEDQWTEEEFEKLCQADSPESSQPGGMSKDLDILNKGIKTEILVESSKEPEQTKMEASPTVGDSPPAKRRRGRPKRSDVFVSPTAGLTDAVKQDTGTTQDGSSATPASTIHSDAPATAINSAVSDVNIHSIPPADTKKQEFSTDTKVSSSVSVLEGSVPNEIGTPLQSVHNVAVSAPPHQSARGRKCQAGETPRRRGRKPKSLSSSGVDDVSLNPTFSTVSGVADTSYVPSYSQVSSQGTAVALAGIQKDFVTVKLDTLLPDSGKGAPPVNEGDKGATVTTPVAKDICAGTVTTSDNTVTLTPNTLKENIGLVQVASAPSMLVASEELMKIAHVAVADKPVEKQTASRRRRKKTSSSEDTGVSTRQRSAMKRSYYNTSVAVDDIGSAVIPNEKSGITKERDVSSIQSTSNELPNINSPLYEKSGYDSQPSTPIAVPINEDTLPSGFDTCTNSMITLATSANSAEDDKPVDLHLNAPVSVDSQNQEQHMTGKDHLAVCSRIFATQLQTDTANPAIDHKPGTAQFEPSASLPQNSGKDATALPSEVDSAAPNRASSRRRKGSTREPRTRSNSASAASERRARLTGLKQAEDIKKLEMSATPTTTVCISSVEQQGAASLSAKITNASVSEGQKNPGNYMPSAISIPVGSHVLGLGATSIEETTATMITQAPAVSKSERRKLPGGSQQGIQFESSASKTKMVSAVEPAPANVECMQGTEVNSSEQTIVSATEPAPANDEHMQEQPTNIVSSVESEPSNDEEHTKHEVFLATTGDNMLASSAGTEILRDTVEHAACQPEAVCTDGTARQSELSQLDRKAFHDASYKYTHGSTKDDGILPSEVIFQLFYNQLSQIGLQVK

SEQ ID NO: 185503 - protein, 3765 aa, Zea Mays
MASSQHVEMEAAKLLHKLIQESKDEPAKLATKLYVICQHMKLSGKEQSLPYQVISRAMETVVNQHGIDMDALRSSRIPFAGGPQAGDSSGVMSKDKEVIGNQSPMVGSDASQSSGQAGLWQLPSGRVPTGPNRGDFSAADIHQGSMSQKSGRSSGIESPASLQMEDTRSMNSHDSLKSDEKTSKKTSSKRKRMDSKGAGDLRSEDNSKSDVISTGQNTRKGKQVGKAGRQGQPSMGIEHEQQPHKLQGGTGQVPPIHGGAPFLRTRSEGPSGRTMDKTKPSNPFSMGQIPNFPEGLASTGAPIELQKSIQGGASLFNPGFGWNQNPQVQTLKNSQGSIHNLVRSGVTVEGKVNVGAQGAFNSASAPQMEFPTVPPYNPSSFGASSQFLDKGKELVSSIISTEPHSSKVASQPGISHGSPMQERQGMIRVPQRGEASFQERRPSSLPSRSTGPSPMSHISSNTPFKEQQLKQLRAQCLVFLAFRNNLQPRKVHLEIALGRGPPAESDSAGQRGSEGRVSDALGKENGSSRENSGVFCRQTDISRLPATSAGSIAEDDSLSKDPENATKKIKLAEQEKSLMEVENVQQASVMQGTSSEMRSQETASQNPYRPQQSYYQGDTRRIASDIHRTDAEILNQNLSWGGQGSTALGGTRQLLNQETKESLAPSKSHHMPVDGYNSNIQGIDRTPEIAGAGNDVENCSHVADIVPEQAADEGDEDLSEHEDLLSSPKHTMTEKWILDYQKRIYNEKQKRTLEQHKVHSRMSATYEELKESVNSSEDLSAKTKSVIELKKLQLLPLQRRVRSEFLLDFFKPNTSDLERIKSLKKHRHGRRVKQLEKIEQKMKEERQKRIRERQKEFFADIEAYREKLEDNFKVKRERLKGFNRYIKEFHKRKERIHREKLDRIQREKINLLKNNDVEGYLRMVKDAKSDRVKQLLRETEKYLQKLGNKLQSAKSTDGRSSFVTDKSDTANDIEDESYQPQHYLESNEKYYQLAHSVKETVNDQPSYLQGGKLREYQMNGLRWLVSLYNNNLNGILADEMGLGKTVQVISLICYLMETKNDRGPFLVVVPSSVLPGWESELSFWAPSINKIAYAGPPEERRRMFKEMIVHQKFNVLLTTYEYLMNKHDRPKLSKIQWHYIIIDEGHRIKNASCKLNADLKLYRSSHRILLTGTPLQNNLEELWALLNFLLPNIFNSSEDFSQWFNKPFESNGDNSPDEALLSEEENLLIINRLHQVLRPFVLRRLKHKVENELPEKIERLVRCEASAYQKLLMTRVEENLGGIGAVKVRSVHNSVMELRNICNHPYLSQLHVEEIEGYLPKHYLPSILRLCGKLEMLDRLLPKLKATGHRVLLFSTMTRLLDVMEDYLVWKKYKYLRLDGHTSGHERGALIDKFNDPNSQAFIFLLSIRAGGVGVNLQAADTVIIFDTDWNPQVDLQAQARAHRIGQKKEVLVLRLETVRTVEEQVRASAEHKLGVANQSITAGFFDNNTSAEDRREYLESLLRESKKEEAAPVLDDDALNDILARSEAEIDIFESIDKQRREEEMAAWQKVVQDGSTSGLDPGVLPSRLVTDDDLKPFCHAMKLYEPSNVKTVNVNVRKKGELGGLDTQHYGRGKRAREVRSYEDQWTEEEFEKLCQADSPESSQPGGMSKDLDILNKGIKTEILVESSKEPEQTKMEASPTVGDSPPAKRRRGRPKRSDVFVSPTAGLTDAVKQDTGTTQDGSSATPASTIHSDAPATAINSAVSDVNIHSIPPADTKKQEFSTDTKVSSSVSVLEGSVPNEIGTPLQSVHNVAVSAPPHQSARGRKCQAGETPRRRGRKPKSLSSSGVDDVSLNPTFSTVSGVADTSYVPSYSQVSSQGTAVALAGIQKDFVTVKLDTLLPDSGKGAPPVNEGDKGATVTTPVAKDICAGTVTTSDNTVTLTPNTLKENIGLVQVASAPSMLVASEELMKIAHVAVADKPVEKQTASRRRRKKTSSSEDTGVSTRQRSAMKRSYYNTSVAVDDIGSAVIPNEKSGITKERDVSSIQSTSNELPNINSPLYEKSGYDSQPSTPIAVPINEDTLPSGFDTCTNSMITLATSANSAEDDKPVDLHLNAPVSVDSQNQEQHMTGKDHLAVCSRIFATQLQTDTANPAIDHKPGTAQFEPSASLPQNSGKDATALPSEVDSAAPNRASSRRRKGSTREPRTRSNSASAASERRARLTGLKQAEDIKKLEMSATPTTTVCISSVEQQGAASLSAKITNASVSEGQKNPGNYMPSAISIPVGSHVLGLGATSIEETTATMITQAPAVSKSERRKLPGGSQQGIQFESSASKTKMVSAVEPAPANVECMQGTEVNSSEQTIVSATEPAPANDEHMQEQPTNIVSSVESEPSNDEEHTKHEVFLATTGDNMLASSAGTEILRDTVEHAACQPEAVCTDGTARQSELSQLDRKAFHDASYKYTHGSTKDDGILPSEGTSVDVTGSKQDDVNIVGTQTDDVSRGSSHFPVILQSTESDRPPGQVKNLESRMEQVKTEEALVNSSGGNQTHSLGDEPSHNTSLARNSPSEHSNERCSDQVIGENFKSKENIVEVHSGINTDGPDEALNALHTQSKEASMTDIGVPTDGDRCEGKGTSVEVCADMNTDGPVATQDASSTKSDKESCMMECGVSTDGCPTVCKTHNDLQGHVSCEETFVRTGGDDTTHITNANYGSNNESEATIASPVETTQKLMEGSTVIVSENSDLNKQCHTLHTRNDPPANTLLIVESNKVTCDAEIVCASRLESSGIEAETVGIQESALTDFEGTKGTGDLGDRTNSQLHDDVHGTSCSTIALVSEKEPSEDLTTGSHSEASNLLAAVEQTQETTVENQEIIDAVVFMDACKAEPVGDFTIAKGAEQTVEMVHYVDKQSAVLDYVETQTKRTSVCGSTLNESPQAAGLEEDCSVLKHGDPTSSELLTVAPNPIGETSVIQVEPEARNSDGYCTTEAGSALSETVMGLEPNKETAVPMQENIGEANDNFNNCEAHNNSEIHAFEVSMETQSSEVKEVSSIQSGAANLSTQTTALPDVTGQTSMASTGELVSTNEHIHMQGTEINSEQQTKMVSPAESAPANDEHVQDIVILSSEQQTKMVLAAEIDALCVQETAIIDLGGARGTVDLNDIRTQVPALPGRDVLDVEAHILEQKKTSSPGDEIKGSEQAKIESIAEIETVGVKENVIADHKETGIEVDAHVLEQAKMVSALEPDSTPEVCADKLEPSGGEAHCSEQIKMASIAQAVSSMALVGYSSSEDSMVDAAARVTDADFVDSKAAGVYRQETMPTQTTSTLPENMDSPATAATMVESKFAASSEHVAGPEPIDETSVMQVELATSTGDGCAADGHNLVSSETVVEVKLAQEIVVPSPGGSIEANNTSTISEVYKDTQSRASGEACNDGQSHGDENMKLGEAYTELQLAPSSGEEAMTCMCSELPSQEVEAPSSDPLENNEETKNEAAAQGSVNEDSAPRAENAKIDEADTEQELLPSGEATVDESSELLSQDEKVARKDAKMEESAAAAAAQRQLTTEVAHASENAKLGEDGTELQLPPPSMVDISREQLSQEVEVASSGPSGTDETAEMKRLNTEHSPGDETSKLVGTDLGLQLSPSGDAMVDISNKPPSCQDVKEAPSSDILGNDENSDTEKTPAALHGRLNTELAPSGRNTEFSEADTGKQETPVSAEAMVESSSEPRSHEAKEAPTPDLSGDDEKAKSARAAVVAELFGDATEGGSDQPLPSPREQGKEAEADGGF

SEQ ID NO: 185504 - protein, 3813 aa, Zea Mays
MASSQHVEMEAAKLLHKLIQESKDEPAKLATKLYVICQHMKLSGKEQSLPYQVISRAMETVVNQHGIDMDALRSSRIPFAGGPQAGDSSGVMSKDKEVIGNQSPMVGSDASQSSGQAGLWQLPSGSTDMIRHGASISGRVPTGPNRGDFSAADIHQGSMSQKSGRSSGIESPASLQMEDTRSMNSHDSLKSDEKTSKKTSSKRKRMDSKGAGDLRSEDNSKSDVISTGQNTRKGKQVGKAGRQGQPSMGIEHEQQPHKLQGGTGQVPPIHGGAPFLRTRSEGPSGRTMDKTKPSNPFSMGQIPNFPEGLASTGAPIELQKSIQGGASLFNPGFGWNQNPQVQTLKNSQGSIHNLVRSGVTVEGKVNVGAQGAFNSASAPQMEFPTVPPYNPSSFGASSQFLDKGKELVSSIISTEPHSSKVASQPGISHGSPMQERQGMIRVPQRGEASFQERRPSSLPSRSTGPSPMSHISSNTPFKEQQLKQLRAQCLVFLAFRNNLQPRKVHLEIALGRGPPAESDSAGQRGSEGRVSDALGKENGSSRENSGVFCRQTDISRLPATSAGSIAEDDSLSKDPENATKKIKLAEQEKSLMEVENVQQASVMQGTSSEMRSQETASQNPYRPQQSYYQGDTRRIASDIHRTDAEILNQNLSWGGQGSTALGGTRQLLNQETKESLAPSKSHHMPVDGYNSNIQGIDRTPEIAGAGNDVENCSHVADIVPEQAADEGDEDLSEHEDLLSSPKHTMTEKWILDYQKRIYNEKQKRTLEQHKVHSRMSATYEELKESVNSSEDLSAKTKSVIELKKLQLLPLQRRVRSEFLLDFFKPNTSDLERIKSLKKHRHGRRVKQLEKIEQKMKEERQKRIRERQKEFFADIEAYREKLEDNFKVKRERLKGFNRYIKEFHKRKERIHREKLDRIQREKINLLKNNDVEGYLRMVKDAKSDRVKQLLRETEKYLQKLGNKLQSAKSTDGRSSFVTDKSDTANDIEDESYQPQHYLESNEKYYQLAHSVKETVNDQPSYLQGGKLREYQMNGLRWLVSLYNNNLNGILADEMGLGKTVQVISLICYLMETKNDRGPFLVVVPSSVLPGWESELSFWAPSINKIAYAGPPEERRRMFKEMIVHQKFNVLLTTYEYLMNKHDRPKLSKIQWHYIIIDEGHRIKNASCKLNADLKLYRSSHRILLTGTPLQNNLEELWALLNFLLPNIFNSSEDFSQWFNKPFESNGDNSPDEALLSEEENLLIINRLHQVLRPFVLRRLKHKVENELPEKIERLVRCEASAYQKLLMTRVEENLGGIGAVKVRSVHNSVMELRNICNHPYLSQLHVEEIEGYLPKHYLPSILRLCGKLEMLDRLLPKLKATGHRVLLFSTMTRLLDVMEDYLVWKKYKYLRLDGHTSGHERGALIDKFNDPNSQAFIFLLSIRAGGVGVNLQAADTVIIFDTDWNPQVDLQAQARAHRIGQKKEVLVLRLETVRTVEEQVRASAEHKLGVANQSITAGFFDNNTSAEDRREYLESLLRESKKEEAAPVLDDDALNDILARSEAEIDIFESIDKQRREEEMAAWQKVVQDGSTSGLDPGVLPSRLVTDDDLKPFCHAMKLYEPSNVKTVNVNVRKKGELGGLDTQHYGRGKRAREVRSYEDQWTEEEFEKLCQADSPESSQPGGMSKDLDILNKGIKTEILVESSKEPEQTKMEASPTVGDSPPAKRRRGRPKRSDVFVSPTAGLTDAVKQDTGTTQDGSSATPASTIHSDAPATAINSAVSDVNIHSIPPADTKKQEFSTDTKVSSSVSVLEGSVPNEIGTPLQSVHNVAVSAPPHQSARGRKCQAGETPRRRGRKPKSLSSSGVDDVSLNPTFSTVSGVADTSYVPSYSQVSSQGTAVALAGIQKDFVTVKLDTLLPDSGKGAPPVNEGDKGATVTTPVAKDICAGTVTTSDNTVTLTPNTLKENIGLVQVASAPSMLVASEELMKIAHVAVADKPVEKQTASRRRRKKTSSSEDTGVSTRQRSAMKRSYYNTSVAVDDIGSAVIPNEKSGITKERDVSSIQSTSNELPNINSPLYEKSGYDSQPSTPIAVPINEDTLPSGFDTCTNSMITLATSANSAEDDKPVDLHLNAPVSVDSQNQEQHMTGKDHLAVCSRIFATQLQTDTANPAIDHKPGTAQFEPSASLPQNSGKDATALPSEVDSAAPNRASSRRRKGSTREPRTRSNSASAASERRARLTGLKQAEDIKKLEMSATPTTTVCISSVEQQGAASLSAKITNASVSEGQKNPGNYMPSAISIPVGSHVLGLGATSIEETTATMITQAPAVSKSERRKLPGGSQQGIQFESSASKTKMVSAVEPAPANVECMQGTEVNSSEQTIVSATEPAPANDEHMQEQPTNIVSSVESEPSNDEEHTKHEVFLATTGDNMLASSAGTEILRDTVEHAACQPEAVCTDGTARQSELSQLDRKAFHDASYKYTHGSTKDDGILPSEGTSVDVTGSKQDDVNIVGTQTDDVSRGSSHFPVILQSTESDRPPGQVKNLESRMEQVKTEEALVNSSGGNQTHSLGDEPSHNTSLARNSPSEHSNERCSDQVIGENFKSKENIVEVHSGINTDGPDEALNALHTQSKEASMTDIGVPTDGDRCEGKGTSVEVCADMNTDGPVATQDASSTKSDKESCMMECGVSTDGCPTVCKTHNDLQGHVSCEETFVRTGGDDTTHITNANYGSNNESEATIASPVETTQKLMEGSTVIVSENSDLNKQCHTLHTRNDPPANTLLIVESNKVTCDAEIVCASRLESSGIEAETVGIQESALTDFEGTKGTGDLGDRTNSQLHDDVHGTSCSTIALVSEKEPSEDLTTGSHSEASNLLAAVEQTQETTVENQEIIDAVVFMDACKAEPVGDFTIAKGAEQTVEMVHYVDKQSAVLDYVETQTKRTSVCGSTLNESPQAAGLEEDCSVLKHGDPTSSELLTVAPNPIGETSVIQVEPEARNSDGYCTTEAGSALSETVMGLEPNKETAVPMQENIGEANDNFNNCEAHNNSEIHAFEVSMETQSSEVKEVSSIQSGAANLSTQTTALPDVTGQTSMASTGELVSTNEHIHMQGTEINSEQQTKMVSPAESAPANDEHVQDIVILSSEQQTKMVLAAEIDALCVQETAIIDLGGARGTVDLNDIRTQVPALPGRDVLGDEIKGSEQAKIESIAEIETVGVKENVIADHKETGNNSGVSIHAPLLVESGQKASPGVELRGIEVDAHVLEQAKMVSALEPDSTPEVCADKLEPSGADDVGMIVVQEAASVDDHNRAQGGEAHCSEQIKMASIAQAVSSMALVGYSSSEDSMVDAAARVTDADFVDSKAAGVYRQETMPTQTTSTLPENMDSPATAATMVESKFAASSEHVAGPEPIDETSVMQVELATSTGDGCAADGHNLVSSETVVEVKLAQEIVVPSPGGSIEANNTSTISEVYKDTQSRASGEACNDGQSHGDENMKLGEAYTELQLAPSSGEEAMTCMCSELPSQEVEAPSSDPLENNEETKNEAAAQGSVNEDSAPRAENAKIDEADTEQELLPSGEATVDESSELLSQDEKVARKDAKMEESAAAAAAQRQLTTEVAHASENAKLGEDGTELQLPPPSMVDISREQLSQEVEVASSGPSGTDETAEMKRLNTEHSPGDETSKLVGTDLGLQLSPSGDAMVDISNKPPSCQDVKEAPSSDILGNDENSDTEKTPAALHGRLNTELAPSGRNTEFSEADTGKQETPVSAEAMVESSSEPRSHEAKEAPTPDLSGDDEKAKSARAAVVAELFGDATEGGSDQPLPSPREQGKEAEADGGF

SEQ ID NO: 185505 - protein, 3827 aa, Zea Mays
MASSQHVEMEAAKLLHKLIQESKDEPAKLATKLYVICQHMKLSGKEQSLPYQVISRAMETVVNQHGIDMDALRSSRIPFAGGPQAGDSSGVMSKDKEVIGNQSPMVGSDASQSSGQAGLWQLPSGSTDMIRHGASISGRVPTGPNRGDFSAADIHQGSMSQKSGRSSGIESPASLQMEDTRSMNSHDSLKSDEKTSKKTSSKRKRMDSKGAGDLRSEDNSKSDVISTGQNTRKGKQVGKAGRQGQPSMGIEHEQQPHKLQGGTGQVPPIHGGAPFLRTRSEGPSGRTMDKTKPSNPFSMGQIPNFPEGLASTGAPIELQKSIQGGASLFNPGFGWNQNPQVQTLKNSQGSIHNLVRSGVTVEGKVNVGAQGAFNSASAPQMEFPTVPPYNPSSFGASSQFLDKGKELVSSIISTEPHSSKVASQPGISHGSPMQERQGMIRVPQRGEASFQERRPSSLPSRSTGPSPMSHISSNTPFKEQQLKQLRAQCLVFLAFRNNLQPRKVHLEIALGRGPPAESDSAGQRGSEGRVSDALGKENGSSRENSGVFCRQTDISRLPATSAGSIAEDDSLSKDPENATKKIKLAEQEKSLMEVENVQQASVMQGTSSEMRSQETASQNPYRPQQSYYQGDTRRIASDIHRTDAEILNQNLSWGGQGSTALGGTRQLLNQETKESLAPSKSHHMPVDGYNSNIQGIDRTPEIAGAGNDVENCSHVADIVPEQAADEGDEDLSEHEDLLSSPKHTMTEKWILDYQKRIYNEKQKRTLEQHKVHSRMSATYEELKESVNSSEDLSAKTKSVIELKKLQLLPLQRRVRSEFLLDFFKPNTSDLERIKSLKKHRHGRRVKQLEKIEQKMKEERQKRIRERQKEFFADIEAYREKLEDNFKVKRERLKGFNRYIKEFHKRKERIHREKLDRIQREKINLLKNNDVEGYLRMVKDAKSDRVKQLLRETEKYLQKLGNKLQSAKSTDGRSSFVTDKSDTANDIEDESYQPQHYLESNEKYYQLAHSVKETVNDQPSYLQGGKLREYQMNGLRWLVSLYNNNLNGILADEMGLGKTVQVISLICYLMETKNDRGPFLVVVPSSVLPGWESELSFWAPSINKIAYAGPPEERRRMFKEMIVHQKFNVLLTTYEYLMNKHDRPKLSKIQWHYIIIDEGHRIKNASCKLNADLKLYRSSHRILLTGTPLQNNLEELWALLNFLLPNIFNSSEDFSQWFNKPFESNGDNSPDEALLSEEENLLIINRLHQVLRPFVLRRLKHKVENELPEKIERLVRCEASAYQKLLMTRVEENLGGIGAVKVRSVHNSVMELRNICNHPYLSQLHVEEIEGYLPKHYLPSILRLCGKLEMLDRLLPKLKATGHRVLLFSTMTRLLDVMEDYLVWKKYKYLRLDGHTSGHERGALIDKFNDPNSQAFIFLLSIRAGGVGVNLQAADTVIIFDTDWNPQVDLQAQARAHRIGQKKEVLVLRLETVRTVEEQVRASAEHKLGVANQSITAGFFDNNTSAEDRREYLESLLRESKKEEAAPVLDDDALNDILARSEAEIDIFESIDKQRREEEMAAWQKVVQDGSTSGLDPGVLPSRLVTDDDLKPFCHAMKLYEPSNVKTVNVNVRKKGELGGLDTQHYGRGKRAREVRSYEDQWTEEEFEKLCQADSPESSQPGGMSKDLDILNKGIKTEILVESSKEPEQTKMEASPTVGDSPPAKRRRGRPKRSDVFVSPTAGLTDAVKQDTGTTQDGSSATPASTIHSDAPATAINSAVSDVNIHSIPPADTKKQEFSTDTKVSSSVSVLEGSVPNEIGTPLQSVHNVAVSAPPHQSARGRKCQAGETPRRRGRKPKSLSSSGVDDVSLNPTFSTVSGVADTSYVPSYSQVSSQGTAVALAGIQKDFVTVKLDTLLPDSGKGAPPVNEGDKGATVTTPVAKDICAGTVTTSDNTVTLTPNTLKENIGLVQVASAPSMLVASEELMKIAHVAVADKPVEKQTASRRRRKKTSSSEDTGVSTRQRSAMKRSYYNTSVAVDDIGSAVIPNEKSGITKERDVSSIQSTSNELPNINSPLYEKSGYDSQPSTPIAVPINEDTLPSGFDTCTNSMITLATSANSAEDDKPVDLHLNAPVSVDSQNQEQHMTGKDHLAVCSRIFATQLQTDTANPAIDHKPGTAQFEPSASLPQNSGKDATALPSEVDSAAPNRASSRRRKGSTREPRTRSNSASAASERRARLTGLKQAEDIKKLEMSATPTTTVCISSVEQQGAASLSAKITNASVSEGQKNPGNYMPSAISIPVGSHVLGLGATSIEETTATMITQAPAVSKSERRKLPGGSQQGIQFESSASKTKMVSAVEPAPANVECMQGTEVNSSEQTIVSATEPAPANDEHMQEQPTNIVSSVESEPSNDEEHTKHEVFLATTGDNMLASSAGTEILRDTVEHAACQPEAVCTDGTARQSELSQLDRKAFHDASYKYTHGSTKDDGILPSEGTSVDVTGSKQDDVNIVGTQTDDVSRGSSHFPVILQSTESDRPPGQVKNLESRMEQVKTEEALVNSSGGNQTHSLGDEPSHNTSLARNSPSEHSNERCSDQVIGENFKSKENIVEVHSGINTDGPDEALNALHTQSKEASMTDIGVPTDGDRCEGKGTSVEVCADMNTDGPVATQDASSTKSDKESCMMECGVSTDGCPTVCKTHNDLQGHVSCEETFVRTGGDDTTHITNANYGSNNESEATIASPVETTQKLMEGSTVIVSENSDLNKQCHTLHTRNDPPANTLLIVESNKVTCDAEIVCASRLESSGIEAETVGIQESALTDFEGTKGTGDLGDRTNSQLHDDVHGTSCSTIALVSEKEPSEDLTTGSHSEASNLLAAVEQTQETTVENQEIIDAVVFMDACKAEPVGDFTIAKGAEQTVEMVHYVDKQSAVLDYVETQTKRTSVCGSTLNESPQAAGLEEDCSVLKHGDPTSSELLTVAPNPIGETSVIQVEPEARNSDGYCTTEAGSALSETVMGLEPNKETAVPMQENIGEANDNFNNCEAHNNSEIHAFEVSMETQSSEVKEVSSIQSGAANLSTQTTALPDVTGQTSMASTGELVSTNEHIHMQGTEINSEQQTKMVSPAESAPANDEHVQDIVILSSEQQTKMVLAAEIDALCVQETAIIDLGGARGTVDLNDIRTQVPALPGRDVLDVEAHILEQKKTSSPGDEIKGSEQAKIESIAEIETVGVKENVIADHKETGNNSGVSIHAPLLVESGQKASPGVELRGIEVDAHVLEQAKMVSALEPDSTPVCADKLEPSGADDVGMIVVQEAASVDDHNRAQGGEAHCSEQIKMASIAQAVSSMALVGYSSSEDSMVDAAARVTDADFVDSKAAGVYRQETMPTQTTSTLPENMDSPATAATMVESKFAASSEHVAGPEPIDETSVMQVELATSTGDGCAADGHNLVSSETVVEVKLAQEIVVPSPGGSIEANNTSTISEVYKDTQSRASGEACNDGQSHGDENMKLGEAYTELQLAPSSGEEAMTCMCSELPSQEVEAPSSDPLENNEETKNEAAAQGSVNEDSAPRAENAKIDEADTEQELLPSGEATVDESSELLSQDEKVARKDAKMEESAAAAAAQRQLTTEVAHASENAKLGEDGTELQLPPPSMVDISREQLSQEVEVASSGPSGTDETAEMKRLNTEHSPGDETSKLVGTDLGLQLSPSGDAMVDISNKPPSCQDVKEAPSSDILGNDENSDTEKTPAALHGRLNTELAPSGRNTEFSEADTGKQETPVSAEAMVESSSEPRSHEAKEAPTPDLSGDDEKAKSARAAVVAELFGDATEGGSDQPLPSPREQGKEAEADGGF

SEQ ID NO: 185506 - protein, 2682 aa, Zea Mays
MIVHQKFNVLLTTYEYLMNKHDRPKLSKIQWHYIIIDEGHRIKNASCKLNADLKLYRSSHRILLTGTPLQNNLEELWALLNFLLPNIFNSSEDFSQWFNKPFESNGDNSPDEALLSEEENLLIINRLHQVLRPFVLRRLKHKVENELPEKIERLVRCEASAYQKLLMTRVEENLGGIGAVKVRSVHNSVMELRNICNHPYLSQLHVEEIEGYLPKHYLPSILRLCGKLEMLDRLLPKLKATGHRVLLFSTMTRLLDVMEDYLVWKKYKYLRLDGHTSGHERGALIDKFNDPNSQAFIFLLSIRAGGVGVNLQAADTVIIFDTDWNPQVDLQAQARAHRIGQKKEVLVLRLETVRTVEEQVRASAEHKLGVANQSITAGFFDNNTSAEDRREYLESLLRESKKEEAAPVLDDDALNDILARSEAEIDIFESIDKQRREEEMAAWQKVVQDGSTSGLDPGVLPSRLVTDDDLKPFCHAMKLYEPSNVKTVNVNVRKKGELGGLDTQHYGRGKRAREVRSYEDQWTEEEFEKLCQADSPESSQPGGMSKDLDILNKGIKTEILVESSKEPEQTKMEASPTVGDSPPAKRRRGRPKRSDVFVSPTAGLTDAVKQDTGTTQDGSSATPASTIHSDAPATAINSAVSDVNIHSIPPADTKKQEFSTDTKVSSSVSVLEGSVPNEIGTPLQSVHNVAVSAPPHQSARGRKCQAGETPRRRGRKPKSLSSSGVDDVSLNPTFSTVSGVADTSYVPSYSQVSSQGTAVALAGIQKDFVTVKLDTLLPDSGKGAPPVNEGDKGATVTTPVAKDICAGTVTTSDNTVTLTPNTLKENIGLVQVASAPSMLVASEELMKIAHVAVADKPVEKQTASRRRRKKTSSSEDTGVSTRQRSAMKRSYYNTSVAVDDIGSAVIPNEKSGITKERDVSSIQSTSNELPNINSPLYEKSGYDSQPSTPIAVPINEDTLPSGFDTCTNSMITLATSANSAEDDKPVDLHLNAPVSVDSQNQEQHMTGKDHLAVCSRIFATQLQTDTANPAIDHKPGTAQFEPSASLPQNSGKDATALPSEVDSAAPNRASSRRRKGSTREPRTRSNSASAASERRARLTGLKQAEDIKKLEMSATPTTTVCISSVEQQGAASLSAKITNASVSEGQKNPGNYMPSAISIPVGSHVLGLGATSIEETTATMITQAPAVSKSERRKLPGGSQQGIQFESSASKTKMVSAVEPAPANVECMQGTEVNSSEQTIVSATEPAPANDEHMQEQPTNIVSSVESEPSNDEEHTKHEVFLATTGDNMLASSAGTEILRDTVEHAACQPEAVCTDGTARQSELSQLDRKAFHDASYKYTHGSTKDDGILPSEGTSVDVTGSKQDDVNIVGTQTDDVSRGSSHFPVILQSTESDRPPGQVKNLESRMEQVKTEEALVNSSGGNQTHSLGDEPSHNTSLARNSPSEHSNERCSDQVIGENFKSKENIVEVHSGINTDGPDEALNALHTQSKEASMTDIGVPTDGDRCEGKGTSVEVCADMNTDGPVATQDASSTKSDKESCMMECGVSTDGCPTVCKTHNDLQGHVSCEETFVRTGGDDTTHITNANYGSNNESEATIASPVETTQKLMEGSTVIVSENSDLNKQCHTLHTRNDPPANTLLIVESNKVTCDAEIVCASRLESSGIEAETVGIQESALTDFEGTKGTGDLGDRTNSQLHDDVHGTSCSTIALVSEKEPSEDLTTGSHSEASNLLAAVEQTQETTVENQEIIDAVVFMDACKAEPVGDFTIAKGAEQTVEMVHYVDKQSAVLDYVETQTKRTSVCGSTLNESPQAAGLEEDCSVLKHGDPTSSELLTVAPNPIGETSVIQVEPEARNSDGYCTTEAGSALSETVMGLEPNKETAVPMQENIGEANDNFNNCEAHNNSEIHAFEVSMETQSSEVKEVSSIQSGAANLSTQTTALPDVTGQTSMASTGELVSTNEHIHMQGTEINSEQQTKMVSPAESAPANDEHVQDIVILSSEQQTKMVLAAEIDALCVQETAIIDLGGARGTVDLNDIRTQVPALPGRDVLDVEAHILEQKKTSSPGDEIKGSEQAKIESIAEIETVGVKENVIADHKETGIEVDAHVLEQAKMVSALEPDSTPEVCADKLEPSGADDVGMIVVQEAASVDDHNRAQGGEAHCSEQIKMASIAQAVSSMALVGYSSSEDSMVDAAARVTDADFVDSKAAGVYRQETMPTQTTSTLPENMDSPATAATMVESKFAASSEHVAGPEPIDETSVMQVELATSTGDGCAADGHNLVSSETVVEVKLAQEIVVPSPGGSIEANNTSTISEVYKDTQSRASGEACNDGQSHGDENMKLGEAYTELQLAPSSGEEAMTCMCSELPSQEVEAPSSDPLENNEETKNEAAAQGSVNEDSAPRAENAKIDEADTEQELLPSGEATVDESSELLSQDEKVARKDAKMEESAAAAAAQRQLTTEVAHASENAKLGEDGTELQLPPPSMVDISREQLSQEVEVASSGPSGTDETAEMKRLNTEHSPGDETSKLVGTDLGLQLSPSGDAMVDISNKPPSCQDVKEAPSSDILGNDENSDTEKTPAALHGRLNTELAPSGRNTEFSEADTGKQETPVSAEAMVESSSEPRSHEAKEAPTPDLSGDDEKAKSARAAVVAELFGDATEGGSDQPLPSPREQGKEAEADGGF

SEQ ID NO: 185507 - protein, 329 aa, Zea Mays
MDNKLGMQMFDGGYVHHGLLKAAKFILERETETLRNLLRRYGPEYKLILTGHSLGSGIAALMTVLVVNNRKEFDNIPRSRVKCYALAPARCMSLNLAVKYADVINSVVLQDDFLPRTPTPLEYIFGSIFCLDSLPCMLFLICLRDTFKQDKRKFKDPRRLYAPGRMYHIVERKFCRCGRFPPEVRTAIPVEGRFEHVVLSCSTTSDHGIYWIERESQKALELMINSKKETTPPSQQKMERLQSFEEEHKNALQRAKTLDVPHAADLSEEEIQEEDSTAPPSDTHSETTTETKSGGRTSWDELMEKLFTRDEDGRLVVNKDAMAREIVVL

SEQ ID NO: 185508 - protein, 441 aa, Zea Mays
MSVSCGLEWVVCLGCTRWAWKRLTYIGAYDSETWPPASADEFEPVPRLCRAVLANYDEELSSPKFAPPEHGYFDIDPKGILKRANYDEVRNACPPYLVYVDEAHKEIILAVRGLNLVRNADYKMFDGGYVHHGLLKAAKFILERETETLRNLLRRYGPEYKLILTGHSLGSGIAALMTVLVVNNRKEFDNIPRSRVKCYALAPARCMSLNLAVKYADVINSVVLQDDFLPRTPTPLEYIFGSIFCLPCMLFLICLRDTFKQDKRKFKDPRRLYAPGRMYHIVERKFCRCGRFPPEVRTAIPVEGRFEHVVLSCSTTSDHGIYWIERESQKALELMINSKKETTPPSQQKMERLQSFEEEHKNALQRAKTLDVPHAADLSEEEIQEEDSTAPPSDTHSETTTETKSGGRTSWDELMEKLFTRDEDGRLVVNKDAMAREIVVL

SEQ ID NO: 185509 - protein, 444 aa, Zea Mays
MSVSCGLEWVVCLGCTRWAWKRLTYIGAYDSETWPPASADEFEPVPRLCRAVLANYDEELSSPKFAPPEHGYFDIDPKGILKRANYDEVRNACPPYLVYVDEAHKEIILAVRGLNLVRNADYKMFDGGYVHHGLLKAAKFILERETETLRNLLRRYGPEYKLILTGHSLGSGIAALMTVLVVNNRKEFDNIPRSRVKCYALAPARCMSLNLAVKYADVINSVVLQDDFLPRTPTPLEYIFGSIFCLDSLPCMLFLICLRDTFKQDKRKFKDPRRLYAPGRMYHIVERKFCRCGRFPPEVRTAIPVEGRFEHVVLSCSTTSDHGIYWIERESQKALELMINSKKETTPPSQQKMERLQSFEEEHKNALQRAKTLDVPHAADLSEEEIQEEDSTAPPSDTHSETTTETKSGGRTSWDELMEKLFTRDEDGRLVVNKDAMAREIVVL

SEQ ID NO: 185510 - protein, 242 aa, Zea Mays
MSVSCGLEWVVCLGCTRWAWKRLTYIGAYDSETWPPASADEFEPVPRLCRAVLANYDEELSSPKFAPPEHGYFDIDPKGILKRANYDEVRNACPPYLVYVDEAHKEIILAVRGLNLVRNADYKVLMDNKLGMQMFDGGYVHHGLLKAAKFILERETETLRNLLRRYGPEYKLILTGHSLGSGIAALMTVLVVNNRKEFDNIPRSRVKCYALAPARCMSLNLAVKYADVINSVVLQEKEQLHV

SEQ ID NO: 185511 - protein, 397 aa, Zea Mays
MVSCNGGLNQMRAAICDMVVIARYLNVTLVVPELDKTSFWNDPSEFQDIFDVEHFITSLRGEVRILRELPPRVKRRVELGMFHSMPPISWSDISYYQNQILPLIRKYKVLHLNRTDARLANNGLPIEIQKLRCRVNYASLKFTPQIEELGKRVIRILRQNGPFLVLHLRYEMDMLAFSGCTQGCSTEEAEELTRMRYAYPWWKEKVIDSDLKRKDGLCPLTPEETALVLRALDIDRSMQIYIAAGEIYGGKRRMASLTSAYPNVVRKETLLEPSDLMFFQNHSSQMAALDYLVSLESDIFVPTYDGNMAKVVEGHRRFMGYKKTVLLDRKLIVELVDRYTNGSLLWDEFSSLIKVAHAKRMGSASKRMVIPDRPKEEDYFYANPQECLQDRDFLQTS

SEQ ID NO: 185512 - protein, 87 aa, Zea Mays
MNAAYATIDELRRLVSDKEALIRSTNSQLHDAKIMLADKQASVEKLEWEVKMSNKKVEDLQGDVSNMGFEISSLMAFFDKISENLSE

SEQ ID NO: 185513 - protein, 58 aa, Zea Mays
MGPMVDVVVSFLVLGLLVVALIVRSALALLVRARWCCWFEEKTPYLEDFLKMSRKLQN

SEQ ID NO: 185514 - protein, 88 aa, Zea Mays
MAAVVLTDGSAIRKSASMGTSPSSSRGPPATARPQLLGPTSPTAVWGHDFERHRPPRAMSVKRMKDERNRLRMIMAQYLVWLHSSCKI

SEQ ID NO: 185515 - protein, 130 aa, Zea Mays
MAAVVLTDGSAIRKSASMGTSPSSSRGPPATARPQLLGPTSPTAVWGHDFERHRPPRAMSVKRGRVRAASASAGTRRTRSASAAAAVASTSRRAPAPPAITLPPASASFVSPGNRRTSLHVDRSKSIHFV

SEQ ID NO: 185516 - protein, 72 aa, Zea Mays
MVKSKIWESRLLFSACWIYHTFSTYIYFKTCFLVFHFVFVIPKGSVSQQSKWTNTRFLCQMPSLTFLYKLSC

SEQ ID NO: 185517 - protein, 127 aa, Zea Mays
MLMLTITACTQSRTFYRVTEENLAALFINCGQSDDECEMCARTIYCTNIDKKVTQADLKLFFESICGEIDLETNKIMDFIKFDVGNVVMMTGGRNTGRVGAIKNREKHKGKGSFETIHVLLGAFCYV

SEQ ID NO: 185518 - protein, 630 aa, Zea Mays
MRLVVRVIEARGLPPTDADGTRDPYAKAQLGKQRAKTKVMRKTLCPAWDEEFAFRVGDLRDNLLVSVFHEDRYFAADVLGQVKLPLTAVLDADNRTLGTQWYQLQPKSKKSKLKDCGEIRLNVSLAQNYSEEETTAPAHWASDDLASNSDKSTELVKGSSLLNVPIEVSTAVPEIYEIEAAEEDKSNAAPSFVNKLYQMFNSKPKDTEASAPLPSKLNDPSDIAEETLSTSSEAPEKQDHDVSATMTFDELLKAFGSQHEGKEMPENLSGGVVLDQVYAVAPSDLNTLLFSPSSDFLQSLAEIQGTTGLEIQQWRLENDGEILRRVVSYTKAPTKLVKAVKATEDMTYLKADGEMFAVFADVSTPEVPFGNTFRVEVLTCIMPGPELRGDEKSSRLMVSWHINFVQSTMMKSMIENGAKQGLKDNYVQFSELLAKHCRPVDTKDTTSSNEVLSSVQPEQESDWKLAFRIFGNFALLSSVFAFFYVSAHIILASPSIIQGLEFPGLDLPDSAGEVVVCGVLVLQGQRVLNMIARFIQAKRQRGDHGVKAQGDGWLLTVALMEGTNLAATKSSGYSDPYVVFTCNGKTKTSSINFHTLDPQWNEIFEFDAMEDPPSVMKIHVWLKHASQNCI

SEQ ID NO: 185519 - protein, 336 aa, Zea Mays
MQGGREDTTEGMMRIGRIRAVEVAIFGAGLGGMGEALIVGGLLMTAIPTTTSIILGAVPPIAAVVFPKILGGHGSWLSNQVAVVELQHKGTYPLKPPSIGKNVSFASPIATVLGGHNSSVMCEERQNSVARVGSAASPPTMMEVDGSNLSANTAALEPSLLLSEVQPSPCLVDFISSITRPVSPPLIAQTPLTNPDRTGLNRFPHESNHSAPHLIIPTDSLNHIPSDIAVEPALPQPHVHETNGYSPLHIMGAASEPTSTPQDQLPKTVPFSGPSTSTQMPIKTVAYALVQHFDQPLSKGKIEAIKNLLENGKQLKKKARGTKVAPAVLACPSALG

SEQ ID NO: 185520 - protein, 312 aa, Zea Mays
MATFEAVGEGVTDKLTHCFTDGTVSAMAGACTVVRDVTDFCFHSYFSFMDDLIDKMGDNEEAPLDIKLSYLPRSMVVALIAVPVDVLLISAVALWKSPCMLFKGWQRLCEDLVGREGPFLETVCVPFAGLAIVLWPLAVIGGLLASFFSSFFFGFRAGLVAYQEASFQMGLAYMISAVAIFDEYTNDLLYLREGSCLPRPKYRRADIMRECETEPAERQQTGHHKHRRTLPRSKTFMQTVQRLRPIQIWDWFFRSCELNGRILLSEGLITAQDMEQYITNGKCKKLDTKLPCWCIFQCLLRSANSDSDGLVI

SEQ ID NO: 185521 - protein, 464 aa, Zea Mays
MATFEAVGEGVTDKLTHCFTLQDGTVSAMAGACTVVRDVTDFCFHSYFSFMDDLIDKMGDNEEAPLDIKLSYLPRSMVVALIAVPVDVLLISAVALWKSPCMLFKGWQRLCEDLVGREGPFLETVCVPFAGLAIVLWPLAVIGGLLASFFSSFFFGFRAGLVAYQEASFQMGLAYMISAVAIFDEYTNDLLYLREGSCLPRPKYRRADIMRECETEPAERQQTGHHKHRRTLPRSKTFMQTVQRLRPIQIWDWFFRSCELNGRILLSEGLITAQDMEQYITNGKCKKLDTKLPCWCIFQCLLRSANSDSDGLVISDHVQVTTLNWPKDRVLDWLLGPLLLIKDQMKKLEVTEDEEMCLRKLIMTSKNEKPSDWDDSGFPSDDNIKRGQLQSIIRRLQGIVAYMSRVPSFRRRFINLVKAMYLEAIEAGAIDGSRKVKADVADRCAEDIAGSCSSTDTPANIHMV

SEQ ID NO: 185522 - protein, 564 aa, Zea Mays
MQVPVGFLGKLWSFVSFVPFFVLLLLLGSIKAALVGPVTASIVFFGSSAVIIGLWPAHFIWTYYCVLKTERIGLQLKILTGLLLPLPLLLLPVLASIGSLLGGTGYGVCVPLMATFEAVGEGVTDKLTHCFTDGTVSAMAGACTVVRDVTDFCFHSYFSFMDDLIDKMGDNEEAPLDIKLSYLPRSMVVALIAVPVDVLLISAVALWKSPCMLFKGWQRLCEDLVGREGPFLETVCVPFAGLAIVLWPLAVIGGLLASFFSSFFFGFRAGLVAYQEASFQMGLAYMISAVAIFDEYTNDLLYLREGSCLPRPKYRRADIMRECETEPAERQQTGHHKHRRTLPRSKTFMQTVQRLRPIQLNGRILLSEGLITAQDMEQYITNGKCKKLDTKLPCWCIFQCLLRSANSDSDGLVISDHVQVTTLNWPKDRVLDWLLGPLLLIKDQMKKLEVTEDEEMCLRKLIMTSKNEKPSDWDDSGFPSDDNIKRGQLQSIIRRLQGIVAYMSRVPSFRRRFINLVKAMYLEAIEAGAIDGSRKVKADVADRCAEDIAGSCSSTDTPANIHMV

SEQ ID NO: 185523 - protein, 184 aa, Zea Mays
MENLARACKVCKCEELQKVLDKEVVHQKYAEYKSARELDMDSSQKRFILQAQSLPEEDRLPSALQRILQTCLANSREGYCSEESNEMIRNSEDDDLADLYIKVGDKVFHCHQVILASRSEYFRARLSRTVDFLEGNCGFEAAQNVPLLEEHDISAEAFEKMLEYMLKNYLMLHQGTCCFPLSGL

SEQ ID NO: 185524 - protein, 330 aa, Zea Mays
MENLARACKVCKCEELQKVLDKEVVHQKYAEYKSARELDMDSSQKRFILQAQSLPEEDRLPSALQRILQTCLANSREGYCSEESNEMIRNSEDDDLADLYIKVGDKVFHCHQVILASRSEYFRARLSRTVDFLEGNCGFEAAQNVPLLEEHDISAEAFEKMLEYMYTDKLEHLDPGQAEELFDVASRYLLFPLKRVVADMLLPYLEHVSPAELCHWLMMSDIYGVMKIREYILDIIACNFEMFAATREFRALLLTLPPPSGDDSLRTTRPSAPGTGGNTDQGNILDDLREKWLEAEGAELDERDESAALFDKRLEMLMLVAEKEADDEDA

SEQ ID NO: 185525 - protein, 69 aa, Zea Mays
MGNGTWQTPNRTQTQQVRCVELVCCPKGMWGRGGAKGIIRWEIGETAEAEEGRSAASTQLGEKGKRTFF

SEQ ID NO: 185526 - protein, 160 aa, Zea Mays
MIPGSKSSSGRGAKQTLSKPRRTLRPARFPIQIRPRHLLLFSATPMVYVDSWDEFVERSVQLFRGDPNATRYVMKYRHCEGKLVLKVTDDRECLKFKTDQAQDAKKMEKLNNIFFALMTRGPDVDISEVSGKEQAEQQQAKKGKFFQYRTENKLNALYHE

SEQ ID NO: 185527 - protein, 94 aa, Zea Mays
MAAHVDPLVVGRVIGDVVDLFVPTVAVSARFGAKDLTNGCEIKPSVAAAAPAVLIAGRANDLFTLVMTDPDAPSPSEPTMRELLHWWSRCFSRR

SEQ ID NO: 185528 - protein, 224 aa, Zea Mays
MMSMFKEIEKKVFVVQEEYKKTQEMIDNHKVELDKTKEEYTKLKKAMDELRATEVDAEYKLQDTKKLAKEWEMKVKTFKKRLDEIHIIIQKDAVDPEKLKATPGDEQLNDTYDMKRAMEMVALLEAQIKDLNPNLDSIAEYRTKACLYGERVDELNATTQERDDLKKLYDGLRKRRLDEFMAGFNIISLKLKEMYQIMETFGFNASSSDKLATYLNQLTGLSLT

SEQ ID NO: 185529 - protein, 275 aa, Zea Mays
MAAAAAAAAAAPESYIGSLISLMSKSEIRYEGVLYTINTEESSIGLKNVRSFGTEGRKKDGQQIPASDKIYEYILFRGSDIKDLQVKSSPPSQSATLHNDPAIIQPVGVSSYVRYNSRGRGRGRGRGQSHPITKFTEDFDFMAMNEKFNKDEVWGHLGKRIGQLNDEPNGYEDDVIEDDEISPRKPEAKAVYVKDDFFDSLSCNQIDNGGRNGRVKFSEQRKIDTETFGDSARHRPMGIRGRGPRGGARGRGYYGIRGYGYTGRGRGYSYPNHQP

SEQ ID NO: 185530 - protein, 610 aa, Zea Mays
MAAAAAAAAAAPESYIGSLISLMSKSEIRYEGVLYTINTEESSIGLKNVRSFGTEGRKKDGQQIPASDKIYEYILFRGSDIKDLQVKSSPPSQSATLHNDPAIIQSHYPHPASLSTSLPSAASTIGANPTSQNAPSLIQMPPPFQGNLPPYQSGTSLQSWNSAPMPSSANGTGLTMPPMYWPGYYTPPTGFSHLQPPLFLRPPHSLAVPQVLQLPVQYPGLGSLPAGFPNMPELPSFLQPGNSNSLNQTSGVPTSVSTPASLSTSQTESSRSQLPNKFSSDSASVFSVGFTPPSVTPSVSTVEPSIPVSAVLPSLVNSKPVALPDSTMPSLSTAKPVIVPDASVLTYLSSQPPSANDVSPVNAAEQVPLAAPSTVPSSQATLFEGSTTQVASSSILSQQVAMTNESKVAKQREWKAKQTVVGRPGNKEPLLPEPKSVFQKPVGVSSYVRYNSRGRGRGRGRGQSHPITKFTEDFDFMAMNEKFNKDEVWGHLGKRIGQLNDEPNGYEDDVIEDDEISPRKPEAKAVYVKDDFFDSLSCNQIDNGGRNGRVKFSEQRKIDTETFGDSARHRPMGIRGRGPRGGARGRGYYGIRGYGYTGRGRGYSYPNHQP

SEQ ID NO: 185531 - protein, 210 aa, Zea Mays
MAAAAAAAAAAPESYIGSLISLMSKSEIRYEGVLYTINTEESSIGLKNVRSFGTEGRKKDGQQIPASDKIYEYILFRGSDIKDLQVKSSPPSQSATLHNDPAIIQQSHPITKFTEDFDFMAMNEKFNKDEVWGHLGKRIGQLNDEPNGYEDDVIEDDEISPRKPEAKAVYVKDDFFDSLSCNQIDNGGRNGRVKFSEQRKIDTEVFTDRH

SEQ ID NO: 185532 - protein, 459 aa, Zea Mays
MPPPFQGNLPPYQSGTSLQSWNSAPMPSSANGTGLTMPPMYWPGYYTPPTGFSHLQPPLFLRPPHSLAVPQVLQLPVQYPGLGSLPAGFPNMPELPSFLQPGNSNSLNQTSGVPTSVSTPASLSTSQTESSRSQLPNKFSSDSASVFSVGFTPPSVTPSVSTVEPSIPVSAVLPSLVNSKPVALPDSTMPSLSTAKPVIVPDASVLTYLSSQPPSANDVSPVNAAEQVPLVTPGQLLSTTSSTIISSHALQTASAVDLSSKAAPSTVPSSQATLFEGSTTQVASSSILSQQVAMTNESKVAKQREWKAKQTVVGRPGNKEPLLPEPKSVFQKPVGVSSYVRYNSRGRGRGRGRGQSHPITKFTEDFDFMAMNEKFNKDEVWGHLGKRIGQLNDEPNGYEDDVIEDDEISPRKPEAKAVYVKDDFFDSLSCNQIDNGGRNGRVKFSEQRKIDTEVFTDRH

SEQ ID NO: 185533 - protein, 471 aa, Zea Mays
MPPPFQGNLPPYQSGTSLQSWNSAPMPSSANGTGLTMPPMYWPGYYTPPTGFSHLQPPLFLRPPHSLAVPQVLQLPVQYPGLGSLPAGFPNMPELPSFLQPGNSNSLNQTSGVPTSVSTPASLSTSQTESSRSQLPNKFSSDSASVFSVGFTPPSVTPSVSTVEPSIPVSAVLPSLVNSKPVALPDSTMPSLSTAKPVIVPDASVLTYLSSQPPSANDVSPVNAAEQVPLAAPSTVPSSQATLFEGSTTQVASSSILSQQVAMTNESKVAKQREWKAKQTVVGRPGNKEPLLPEPKSVFQKPVGVSSYVRYNSRGRGRGRGRGQSHPITKFTEDFDFMAMNEKFNKDEVWGHLGKRIGQLNDEPNGYEDDVIEDDEISPRKPEAKAVYVKDDFFDSLSCNQIDNGGRNGRVKFSEQRKIDTETFGDSARHRPMGIRGRGPRGGARGRGYYGIRGYGYTGRGRGYSYPNHQP

SEQ ID NO: 185534 - protein, 102 aa, Zea Mays
MIQLLFTLLAAEGAVAAVLLFKTPLRRLAVLALDHLKRGRGPVMVRTIAATVLVVLASSLHSMGQDPRPRRGGARRLRGRGAHPHRPGPSCATPPRGVTHGH

SEQ ID NO: 185535 - protein, 173 aa, Zea Mays
MKTSLNHELTLIEISLGHCCYLFCSNSAPCGGELSAAADVLLWKDKKTSAVVIGGATVIWVLFEVLDYHLLTLISHVLIGVLATLFLWSKATTFIKKSPPDIPVVQVSEDLVVNVSRALRNDINRALHLFREIAMGHDLKKFLGVIVGLWVLSGVGSSCDFLTLTYIDCFSRQ

SEQ ID NO: 185536 - protein, 215 aa, Zea Mays
MKTSLNHELTLIEISLGHCCYLFCSNSAPCGGELSAAADVLLWKDKKTSAVVIGGATVIWVLFEVLDYHLLTLISHVLIGVLATLFLWSKATTFIKKSPPDIPVVQVSEDLVVNVSRALRNDINRALHLFREIAMGHDLKKFLGVIVGLWVLSGVGSSCDFLTLTYIGQGGPCRWKGTHRGPQAVQGAGCQGPEQNPQGCGQIQKAELVRISRRL

SEQ ID NO: 185537 - protein, 239 aa, Zea Mays
MADPAEENVVSPPPTPAAPAVGASDSPLQPVADGASTEKVSAPAPEVRSRGFRLLGEDTSVHKSLGGGKSGATVIWVLFEVLDYHLLTLISHVLIGVLATLFLWSKATTFIKKSPPDIPVVQVSEDLVVNVSRALRNDINRALHLFREIAMGHDLKKFLGVIVGLWVLSGVGSSCDFLTLTYIAVLMLHTVPILYDKYQDKVDHVAGRAHTEALKQYKVLDAKVLSKIPRGAVKSKKQN

SEQ ID NO: 185538 - protein, 262 aa, Zea Mays
MPTQISTRQSLRFALPSNNARPISTAARMTCFAKKQHIAAVPLCTLEAKRYEPIVKMCGITSAFDAEMALKAGAKLIGMILWPKSKRSIPLSEAKEISRVAKSYGAESVGVFVDDDSSTILTASDSCNLDLIQLHGDSSRELLPLLWKNNRIIYVLNADEDGKLINAPPSEEYVLDWFLVDSAKGGSGKGFNWEKFQMPTVKSKNGWLLAGGLHADNVHEAASALKPNGLDVSSGICFPDGLRKDPKRMCSFMSSVKTLNLL

SEQ ID NO: 185539 - protein, 132 aa, Zea Mays
MAVSAPVTLCPSDSRSLSSALVSSRSNKPSSLDAVRSRRLNLGDSAMPTQISTRQSLRFALPSNNARPISTAARMTCFAKKQHIAAVPLCTLEAKSPNALSHCLKLKRYPEWPNLTGLNQWVCLWMMIVVLS

SEQ ID NO: 185540 - protein, 185 aa, Zea Mays
MYFGGQKSKRSIPLSEAKEISRVAKSYGAESVGVFVDDDSSTILTASDSCNLDLIQLHGDSSRELLPLLWKNNRIIYVLNADEDGKLINAPPSEEYVLDWFLVDSAKGGSGKGFNWEKFQMPTVKSKNGWLLAGGLHADNVHEAASALKPNGLDVSSGICFPDGLRKDPKRMCSFMSSVKTLNLL

SEQ ID NO: 185541 - protein, 498 aa, Zea Mays
MEEEKQQMEPPAPALVREAGAEPRAPRQTQQQPNTAVQVQPSMPVLRPWPMEITLSMKPVVEMKSGTPAKKKKHCNCKNSQCLKLYCECFAAGDYCDGCNCKQCGNTVENEKGRQEAINNTKLRNPNAFQPKIENGPIPSSVWKDAGALPSHPKHNKGCHCKKSGCLKKYCECFQANILCSKNCKCMDCKNYEGSEELRSTTQGDNSCDRNNIQQAANVALNGAIGSSGYRFSPVRRKRPPEDPHCQTLNVEGSMMQTQFRETNNVDVSQMTSSTGRDGSTVNFQGTSKLVYRSPLANTIHITDVNDLANHLVIACRKAAERFTTIVDNKVEMEIDKEICTNTDQKFDENKKGVQKAALSQLGKVTDIDQQIVDDSRLHCSDTQDDARPASPGTQALLCDEQDLTFGTVHRSSIPVAMHDQVISELHAAQESAVLKELRNNLRLIIARGKLNEGKSASGTRMELDALRHHESSTSLAPVRAEEKSNTTDGPEITHELK

SEQ ID NO: 185542 - protein, 292 aa, Zea Mays
MAASARDSADAAERVVDDHDGWASDGEMGMEMDVEGEFHDRDADRRDGGMDGDDEYLLLTRIRDTSAAEARAGKDIQGIPWERIHIARQDYRKARLEQYKNYENFPQSGELMDKLCKQVEKSSKYYEFQHNTRSVKPSILHFQLRNLLWATSRHDVYFMSNSTVTHWSSLSHKLSEVLDFSGHIAPVEKHPGSLLEGFSGVQVSTLAVNEGLLVAGGFQGELIGKDLEGCNIKFCARTTLSDNAITNAIDIHRSTSGSLRITVSNNDCGVREYDMERFQLLNHYRYNWPVNA

SEQ ID NO: 185543 - protein, 143 aa, Zea Mays
MAASARDSADAAERVVDDHDGWASDGEMGMEMDVEGEFHDRDADRRDGGMDGDDEYLLLTRIRDTSAAEARAGKDIQGIPWERIHIARQDYRKARLEQYKNYENFPQSGELMDKLCKQVEKSSKYYEFQHNTRSVKPSILHFQ

SEQ ID NO: 185544 - protein, 299 aa, Zea Mays
MSNSTVTHWSSLSHKLSEVLDFSGHIAPVEKHPGSLLEGFSGVQVSTLAVNEGLLVAGGFQGELIGKDLEGCNIKFCARTTLSDNAITNAIDIHRSTSGSLRITVSNNDCGVREYDMERFQLLNHYRYNWPVNHTSVSPDKKLLAVVGDDRDALLVDSRNGKVTSTLVGHLDYSFATAWHPDSRTFATGNQDKTCRIWDTRNLSTSLAVLRGNIGAIRCIRYSSDGRFLVFSEPADFVHVYSVAADYKKRQEIDFFGEVSGITLSPDDESLFVGVCDRVYASLLQYRMIHAFDYLDSYV

SEQ ID NO: 185545 - protein, 53 aa, Zea Mays
MAEVCLGYNLQDLIGPPSSFSDEGLEDLLEGYDDIASHVVLRVSVHDVVRAAR

SEQ ID NO: 185546 - protein, 255 aa, Zea Mays
MARAGIPPNTVTYNTLIDAYGKAGRFAEMESTLLKMLSQNCKPDVWTMNSTLRAFGSSGQIETMESCYEKFQASGIVPNIKTYNILLDSYGKAKMYEKMGAVMEYMQKYYYSWTIVTYNVVIDAFGRAGDLEQMEYIFRLMKSERIKPNCVTLCSVVRAYGRAGEVKKIKTALRIIENSDITLDIVFFNCLVDAYGRVGCLAEMWDILDLMKEHRCKPDKVTCTTMIKWFLIKGIDDHRVQYLRDLKDGRAKDDT

SEQ ID NO: 185547 - protein, 262 aa, Zea Mays
MADGPVTATSSMAVPSARRNRALLPTVSVAREPARAWAAAGAEGRARRGKEAEVEDEKEAGRRRKEEVNRKIASRKALSVILRREATKAVLDKRKPGKGTRRLLPGTVLEALHDRVAALRWDSALKVFELMRDQVWYKPHIGIYIKLITMLGKCKQPEKAHQLFQAMIDEGCAPNLQSYTALVSTYSRSGRFREAFDLLDRMKDTPGCQPDVQTYSILIKSCLHAYDFEKVKSLLADMARAGIPPNTVTYNTLIDAYGKAGR

SEQ ID NO: 185548 - protein, 342 aa, Zea Mays
MNPEDEAEEDGANIDLDSQRKGKCVVLKTSTRQTIFLPVVGLVDPDKLKPGDLVGVNKDSYLILDTLPSEYDSRVKAMEVDEKPTEDYNDIGGLEKQIQELVEAIVLPMTHKDRFQKLGIRPPKGVLLYGPPGTGKTLMARACAAQTNATFLKLAGPQLVQMFIGDGAKLVRDAFQLAKEKAPCIIFIDEIDAIGTKRFDSEVSGDREVQRTMLELLNQLDGFSSDERIKVIAATNRADILDPALMRSGRLDRKIEFPHPSEEARARILQIHSRKMNVNPDVNFEELARSTDDFNGAQLKAVCVEAGMLALRRDATEVTHEDFNEGIVQVQAKKKSSLNYYA

SEQ ID NO: 185549 - protein, 97 aa, Zea Mays
MAPKAAPAKKGDAKAQALKVAKAVKSGAGKKKTKKIRTSVTFHQPKTLKKARDPKYPRISTTGRNKLDQYQILKQTRKRSRLRSRRCMTFKQRRSTP

SEQ ID NO: 185550 - protein, 724 aa, Zea Mays
MSIFAVVIFLFLGSVEGFSTKSQPCTYSKDKYCKPALFTALFSTVSFLLGAITSLVSGFLGMKIATYANARTTLEARKGVGKAFITAFRSGAVMGFLLASSGLVVLYITINVFKLYYGDDWEGLFESITGYGLGGSSMALFGRVGGGIYTKAADVGADLVGKVERNIPEDDPRNPAVIADNVGDNVGDIAGMGSDLFGSYAESSCAALVVASISSFGINHDFTGMCYPLLVSSVGIIVCLITTLFLLLIFFEVKAVKEIEPALKKQLIISTVLMTVGIAVISWLALPAKFTIFNFGTQKDVSNWGLFFCVAIGLWAGLIIGFVTEYYTSNAYSPVQDVADSCRTGAATNVIFGLALGYKSVIIPIFAIAVSIYVSFSIAAMYGIAVAALGMLSTIATGLAIDAYGPISDNAGGIAEMAGMSHRIRERTDALDAAGNTTAAIGKGFAIGSAALVSLALFGAFVSRAGVKVVDVLSPKVFIGLIVGAMLPYWFSAMTMKSVGSAALKMVEEVRRQFNTIPGLMEGTAKPDYATCVKISTDASIKEMIPPGALVMLTPLIVGTLFGVETLSGVLAGALVSGVQIAISASNTGGAWDNAKKYIEAGASEHARTLGPKGSDCHKAAVIGDTIGDPLKGHLGPVPQHPDQAHGGGVPCVCPLLRHPRWPAVQVPVRATPIITAEIYDRPTVDISNNSCQIASSCVLCASRLAALLFFWSHCSYFLLGPSP

SEQ ID NO: 185551 - protein, 444 aa, Zea Mays
MKGVDDGFLGAGDKPGLDIWCIFGSSVVPVAKSQHGKFYTGSTYIILNTTQLKSGVRRHDVHYWVGEEAKEEDCFMASDKAVELDAALGSSTVQYRETQGEESDKFLSYFKPCVIPIQGRFFSHLKGSGDRSSATTMFRCQGEHVARVTQVPFSRSSLDHKSVFIVDTPSKLFLFSGCNSRMQTRAKALDVVKHLKENRHLGRCEIATIEDGKLVGDSDAGEFWNLFGGYAPIPRDLPDAIKEEPLTAPSKKLFWINKKNLVPLEAHPLDREMLNSDRSYMLDCSTEIFLWMGMTTLVSERKSSVAVLEDYVHSQGRSFNVHTFIMTEGHETVDFKLHFQHWSRNVELKLYEAGREKVAAIFKHQGYDVTEIPEDKPQQFINCNGSLKVWLVDHGCTNLLSTEDQEKLYTGDCYIIRYSYFENGKNYHLFFAWSGKNSVKVRSL

SEQ ID NO: 185552 - protein, 580 aa, Zea Mays
MKGVDDGFLGAGDKPGLDIWCIFGSSVVPVAKSQHGKFYTGSTYIILNTTQLKSGVRRHDVHYWVGEEAKEEDCFMASDKAVELDAALGSSTVQYRETQGEESDKFLSYFKPCVIPIQGRFFSHLKGSGDRSSATTMFRCQGEHVARVTQVPFSRSSLDHKSVFIVDTPSKLFLFSGCNSRMQTRAKALDVVKHLKENRHLGRCEIATIEDGKLVGDSDAGEFWNLFGGYAPIPRDLPDAIKEEPLTAPSKKLFWINKKNLVPLEAHPLDREMLNSDRSYMLDCSTEIFLWMGMTTLVSERKSSVAVLEDYVHSQGRSFNVHTFIMTEGHETVDFKLHFQHWSRNVELKLYEAGREKVAAIFKHQGYDVTEIPEDKPQQFINCNGSLKVWLVDHGCTNLLSTEDQEKLYTGDCYIIRYSYFENGKNYHLFFAWSGKNSVKDDRMAATSLMSSMVDSVKGHPVVAQVFEGGEPELFLSVFKSLIIFKGGRSAAYKSSVLQKSPRNGCHESEGVALFRVQGLKHYCVQAIQVDLVASSLNSSHCYILQDNGLFLTWLGGLSSPSDHNILDMIMSKFQWNSPC

SEQ ID NO: 185553 - protein, 759 aa, Zea Mays
MASDKAVELDAALGSSTVQYRETQGEESDKFLSYFKPCVIPIQGRFFSHLKGSGDRSSATTMFRCQGEHVARVTQVPFSRSSLDHKSVFIVDTPSKLFLFSGCNSRMQTRAKALDVVKHLKENRHLGRCEIATIEDGKLVGDSDAGEFWNLFGGYAPIPRDLPDAIKEEPLTAPSKKLFWINKKNLVPLEAHPLDREMLNSDRSYMLDCSTEIFLWMGMTTLVSERKSSVAVLEDYVHSQGRSFNVHTFIMTEGHETVDFKLHFQHWSRNVELKLYEAGREKVAAIFKHQGYDVTEIPEDKPQQFINCNGSLKVWLVDHGCTNLLSTEDQEKLYTGDCYIIRYSYFENGKNYHLFFAWSGKNSVKDDRMAATSLMSSMVDSVKGHPVVAQVFEGGEPELFLSVFKSLIIFKGGRSAAYKSSVLQKSPRNGCHESEGVALFRVQGLKHYCVQAIQVDLVASSLNSSHCYILQDNGLFLTWLGGLSSPSDHNILDMIMSKLCPMEQSLLVREGSEPDHFWKALGGRSEYSKEKRVKGWPADPHLYACRFEQGLLKVKEVFSFCKDDLATEETLILDCNEEIYVWVGLHSDITSKEQALNVGKMFLKDAVHGGRSMETTVYAVTEGDEPGFFTSFFDWDNSKQSYMVGNSFERKLAVLKGVSPKLETPDRSLRRPSRRPGVSSEPTTPEHQQPTARRAFGSTSAGRFARERSPAVAPPTLSPSPKSRSSSSTPTTVARRLFPASVHASEAVHVVSTATARRR

SEQ ID NO: 185554 - protein, 350 aa, Zea Mays
MASDKAVELDAALGSSTVQYRETQGEESDKFLSYFKPCVIPIQGRFFSHLKGSGDRSSATTMFRCQGEHVARVTQVPFSRSSLDHKSVFIVDTPSKLFLFSGCNSRMQTRAKALDVVKHLKENRHLGRCEIATIEDGKLVGDSDAGEFWNLFGGYAPIPRDLPDAIKEEPLTAPSKKLFWINKKNLVPLEAHPLDREMLNSDRSYMLDCSTEIFLWMGMTTLVSERKSSVAVLEDYVHSQGRSFNVHTFIMTEGHETVDFKLHFQHWSRNVELKLYEAGREKVAAIFKHQGYDVTEIPEDKPQQFINCNGSLKVWLVDHGCTNLLSTEDQEKLYTGDCYIIRMIEWRQHR

SEQ ID NO: 185555 - protein, 59 aa, Zea Mays
MPVRPSDTSGSGQTICDGFPVYSFHGSFVCLSHVCLGTMTFYNFGPHRAHSSVSLMEAV

SEQ ID NO: 185556 - protein, 66 aa, Zea Mays
MSKTYPQLMFLTIDVDDLMDFSSSWDIRATPTFFFLKNGQQIDKLVGANKPELEKKVLAAADASTS

SEQ ID NO: 185557 - protein, 341 aa, Zea Mays
MGVGGEKFQLGTVGALSLSVVSSVSIVICNKALMSSLGFNFATTLTSWHLLVTFCSLHVALWMKFFEHKPFDSRTVMGFGVLNGISIGLLNLSLGFNSVGFYQMTKLAIIPCTVILETLFFRKKFSRSIQMSLSVLLLGVGVATVTDLQLNAVGSILSLLAIITTCIAQIMTNTIQKKFKVSSTQLLYQSCPYQSLTLFLIGPFLDGFLTNQNVFAFNYTSQVVFFIVLSCLISVSVNFSTFLVIGKTSPVTYQVLGHLKTCLVLAFGYVLLHDPFSWRNILGILIAVVGMVLYSYFCTVETQQKNVEVSPQQVTFSCTTALEKFQCAPLNSVALSEFCHW

SEQ ID NO: 185558 - protein, 108 aa, Zea Mays
MGRMMHLLWSLKHPRCRLSPVLVQQTKRQSILQFKASNKAQPKTSKSIVDMLRRKPEDVVDERLSGSYQLTVLASTKSREDKHYVDMQWALFFYDCGVPFNATVVSHF

SEQ ID NO: 185559 - protein, 99 aa, Zea Mays
MPLPARRQVLPVEWWRSYGGRAIELQRFARRLVLCASSLGWERDRSTFVFALKLGVGVTLHRTSWIMSLEHQKHFVAETFQEKATMCFQEEILLLHKMW

SEQ ID NO: 185560 - protein, 170 aa, Zea Mays
MDGPLKVDVDYLNEKLQECFLQRIRHAMKPDEAFGLIFSWDNVIADTDSLKLNAWRQLALEEGKDIPSGAHVRKSIIHGAADHVLRKVLYWAKEEDKMEKLKARLIELYYENLFKLDTPVEGLREWLDAVQTAGIPCAVASPLDRRCMIEALDRMALSKYFKLLTAGDRD

SEQ ID NO: 185561 - protein, 197 aa, Zea Mays
MDGPLKVDVDYLNEKLQECFLQRIRHAMKPDEAFGLIFSWDNVIADTDSLKLNAWRQLALEEGKDIPSGAHVRKSIIHGAADHVLRKVLYWAKEEDKMEKLKARLIELYYENLFKLDTPVEGLREWLDAVQTAGIPCAVASPLDRRCMIEALDRMALSKYFKAIVTDEDDMESIANRFLSAAMKACSCPTSNRCTSC

SEQ ID NO: 185562 - protein, 276 aa, Zea Mays
MDGPLKVDVDYLNEKLQECFLQRIRHAMKPDEAFGLIFSWDNVIADTDSLKLNAWRQLALEEGKDIPSGAHVRKSIIHGAADHVLRKVLYWAKEEDKMEKLKARLIELYYENLFKLDTPVEGLREWLDAVQTAGIPCAVASPLDRRCMIEALDRMALSKYFKAIVTDEDDMESIANRFLSAAMKLDRKPSKCVVFEDDPRGVTAAHNCTMMAVALIGAHPAYELVQADLAIAKYSELSVINLRRLFANKGISFMDLQKQIIEKSPPKRRLTVDTIF

SEQ ID NO: 185563 - protein, 202 aa, Zea Mays
MGDAKIQEIRDLMAEAKGPDFTKDEQGTIWFKNRICVPEIDSLRDTILKEAHESAYSIHPGSTKMYQDLKQKYWWYGMKIVVASHVDVCDVYRRVKAEHKRPVRLLQLLKIPEWKWEEIDMDFIVGLPCTPAGYDSIWVIVDRPTKVAHFIPRKTTYSGARLSDLYMSLCVYMAFQRKLYRTEDPSSPLGFGRSYTRVRTQI

SEQ ID NO: 185564 - protein, 535 aa, Zea Mays
MEALQPNIQAGIHTRNLPVKQLGGMIFGCKPDTIEECFKKQLFGLPAVHYSYVKNVKPGMPLFLFNYIDRRLHGIFEAASLGQMSIDPYAWSNEDLLKTPFPAQVRICIRTRYPPMLESRYKTVLGANYYDRHLFYFELDHTQTEALISLFKLLPLVNNQVPAAPRERSIAVSLPPTKRKAPVLPDPKKVKENSKDINPFSVLSNASDGAQENWVDFDSDVENASINENSHSDTDEKEFEEPVSDWEDLDDNALQYQFSPYSNSDEVSQNSSYKTVCQEVELAECIPPVVNPASEEKLTMLVHNEHKAAVCIGKIESEVNSIMDGVGLQPERHTILKKLKELFSMRQQGVSSQDCVESSPDQCVPEETLSCDPLDVTVEDKTSFQEHLGEFDELRQIIADLSKRAEALEKKQKGSDQDLLFLREVVKDSGRKVQQLEYLVDELQFRFDSSLSLPGSMHNTLAKPSIFLIGGYNGVTWLSSLDSFSPEKDTMVGLTPMSFARSYASAAALDGHIFAFGGGGGKSSWYNTAICSCRG

SEQ ID NO: 185565 - protein, 420 aa, Zea Mays
MLESRYKTVLGANYYDRHLFYFELDHTQTEALISLFKLLPLVNNQVPAAPRERSIAVSLPPTKRKAPVLPDPKKVKENSKDINPFSVLSNASDGAQENWVDFDSDVENASINENSHSDTDEKEFEEPVSDWEDLDDNALQYQFSPYSNSDEVSQNSSYKTVCQEVELAECIPPVVNPASEEKLTMLVHNEHKAAVCIGKIESEVNSIMDGVGLQPERHTILKKLKELFSMRQQGVSSQDCVESSPDQCVPEETLSCDPLDVTVEDKTSFQEHLGEFDELRQIIADLSKRAEALEKKQKGSDQDLLFLREVVKDSGRKVQQLEYLVDELQFRFDSSLSLPGSMHNTLAKPSIFLIGGYNGVTWLSSLDSFSPEKDTMVGLTPMSFARSYASAAALDGHIFAFGGGGGKSSWYNTAICSCRG

SEQ ID NO: 185566 - protein, 413 aa, Zea Mays
MSIDPYAWSNEDLLKTPFPAQTEALISLFKLLPLVNNQVPAAPRERSIAVSLPPTKRKAPVLPDPKKVKENSKDINPFSVLSNASDGAQENWVDFDSDVENASINENSHSDTDEKEFEEPVSDWEDLDDNALQYQFSPYSNSDEVSQNSSYKTVCQEVELAECIPPVVNPASEEKLTMLVHNEHKAAVCIGKIESEVNSIMDGVGLQPERHTILKKLKELFSMRQQGVSSQDCVESSPDQCVPEETLSCDPLDVTVEDKTSFQEHLGEFDELRQIIADLSKRAEALEKKQKGSDQDLLFLREVVKDSGRKVQQLEYLVDELQFRFDSSLSLPGSMHNTLAKPSIFLIGGYNGVTWLSSLDSFSPEKDTMVGLTPMSFARSYASAAALDGHIFAFGGGGGKSSWYNTAICSCRG

SEQ ID NO: 185567 - protein, 602 aa, Zea Mays
MEALQPNIQAGIHTRNLPVKQLGGMIFGCKPDTIEECFKKQLFGLPAVHYSYVKNVKPGMPLFLFNYIDRRLHGIFEAASLGQMSIDPYAWSNEDLLKTPFPAQVRICIRTRYPPMLESRYKTVLGANYYDRHLFYFELDHTQTEALISLFKLLPLVNNQVPAAPRERSIAVSLPPTKRKAPVLPDPKKVKENSKDINPFSVLSNASDGAQENWVDFDSDVENASINENSHSDTDEKEFEEPVSDWEDLDDNALQYQFSPYSNSDEVSQNSSYKTVCQEVELAECIPPVVNPASEEKLTMLVHNEHKAAVCIGKIESEVNSIMDGVGLQPERHTILKKLKELFSMRQQGVSSQDCVESSPDQCVPEETLSCDPLDVTVEDKTSFQEHLGEFDELRQIIADLSKRAEALEKKQKGSDQDLLFLREVVKDSGRKVQQLEYLVDELQFRFDSSLSLPGSMHNTLAKPSIFLIGGYNGVTWLSSLDSFSPEKDTMVGLTPMSFARSYASAAALDGHIFAFGGGGGKSSWYNTVECYSSRNNEWIECPSLNRKKGSLAGISLNSKIYAIGGGDGNETFSEVEMFDPYLGKWLCGPSMLIPLQSTSKG

SEQ ID NO: 185568 - protein, 536 aa, Zea Mays
MEALQPNIQAGIHTRNLPVKQLGGMIFGCKPDTIEECFKKQLFGLPAVHYSYVKNVKPGMPLFLFNYIDRRLHGIFEAASLGQMSIDPYAWSNEDLLKTPFPAQVRICIRTRYPPMLESRYKTVLGANYYDRHLFYFELDHTQTEALISLFKLLPLVNNQVPAAPRERSIAVSLPPTKRKAPVLPDPKKVKENSKDINPFSVLSNASDGAQENWVDFDSDVENASINENSHSDTDEKEFEEPVSDWEDLDDNALQYQFSPYSNSDEVSQNSSYKTVCQEVELAECIPPVVNPASEEKLTMLVHNEHKAAVCIGKIESEVNSIMDGVGLQPERHTILKKLKELFSMRQQGVSSQDCVESSPDQCVPEETLSCDPLDVTVEDKTSFQEHLGEFDELRQIIADLSKRAEALEKKQKGSDQDLLFLREVVKDSGRKVQQLEYLVDELQFRFDSSLSLPGSMHNTLAKPSIFLIGGYNGVTWLSSLDSFSPEKDTMVGLTPMSFARSYASAAALDGHIFAFGGGGGKSSWYNTGMPWVSMI

SEQ ID NO: 185569 - protein, 663 aa, Zea Mays
MSIDPYAWSNEDLLKTPFPAQVRICIRTRYPPMLESRYKTVLGANYYDRHLFYFELDHTQTEALISLFKLLPLVNNQVPAAPRERSIAVSLPPTKRKAPVLPDPKKVKENSKDINPFSVLSNASDGAQENWVDFDSDVENASINENSHSDTDEKEFEEPVSDWEDLDDNALQYQFSPYSNSDEVSQNSSYKTVCQEVELAECIPPVVNPASEEKLTMLVHNEHKAAVCIGKIESEVNSIMDGVGLQPERHTILKKLKELFSMRQQGVSSQDCVESSPDQCVPEETLSCDPLDVTVEDKTSFQEHLGEFDELRQIIADLSKRAEALEKKQKGSDQDLLFLREVVKDSGRKVQQLEYLVDELQFRFDSSLSLPGSMHNTLAKPSIFLIGGYNGVTWLSSLDSFSPEKDTMVGLTPMSFARSYASAAALDGHIFAFGGGGGKSSWYNTVECYSSRNNEWIECPSLNRKKGSLAGISLNSKIYAIGGGDGNETFSEVEMFDPYLGKWLCGPSMLIPRFALAVAELNGTIYATGGYDGSMYLQSAERYDQREGVWVRLRSMNTKRGCHALTVLGESLYAMGGYNGDKMVSSVEIFDPRLNAWRMGDPMSAPRGYAAAVTLDGSAYLIGGLESNVQILATVEVYNASSGWSVLGLSSLGKRSFASAVVM

SEQ ID NO: 185570 - protein, 58 aa, Zea Mays
MVVSLDLAEHGTRPAMVVHDHLLQSCESRHYFPCTYLLCFFYCYLLFFLLLFALFLLC

SEQ ID NO: 185571 - protein, 50 aa, Zea Mays
MNRYLRTWIKTVHDVKSMVETKIDVAPKLCARELRLNDGKRNRLKGEKVI

SEQ ID NO: 185572 - protein, 418 aa, Zea Mays
MEMMRCSSLGWSTRRTLYHRLNLLQAGGCTRRTFSLPKFGGSLISVSMSHPLMELRFLFPVFLQEGSAATLELDLEHYVVPSPPTAPPNGYAANLAATPASVIQTEALLTNDILLSDGIQSPSSVSAKLEDCTNHKNIEAWATDSSKKIQNSGLIESKSVGTFTPMQKLDGQKGLFVDRGVGSSMLPKSASACSLASGFSFGSAKTMPEAAGAVAAAAVADRLHGSKEDRKLAIVLVGLPARGKTFTAVKLTRYLRWLGHETRHFNVGKYRRLKLGANQSADFFRDDNPEGIEARNEVAALAMEDMIDWMNGGGQVGIFDATNSTRKRRYMLMKMAEGNCKIIFLETICNDPNIIERNIRLKIQQSPDYAEQLDYEAGLEDFKERLINYEKVYEPVGEGSYIKMIDMVKGQDGQLQAW

SEQ ID NO: 185573 - protein, 633 aa, Zea Mays
MEMMRCSSLGWSTRRTLYHRLNLLQAGGCTRRTFSLPKFGGSLISVSMSHPLMELRFLFPVFLQEGSAATLELDLEHYVVPSPPTAPPNGYAANLAATPASVIQTEALLTNDILLSDGIQSPSSVSAKLEDCTNHKNIEAWATDSSKKIQNSGLIESKSVGTFTPMQKLDGQKGLFVDRGVGSSMLPKSASACSLASGFSFGSAKTMPEAAGAVAAAAVADRLHGSKEDRKLAIVLVGLPARGKTFTAVKLTRYLRWLGHETRHFNVGKYRRLKLGANQSADFFRDDNPEGIEARNEVAALAMEDMIDWMNGGGQVGIFDATNSTRKRRYMLMKMAEGNCKIIFLETICNDPNIIERNIRLKIQQSPDYAEQLDYEAGLEDFKERLINYEKVYEPVGEGSYIKMIDMVKGQDGQLQVNNISGYLPGRIVFFLVNSHLTPRPILLTRHGESLHNVRGRVGGDTVLSETGELYAKKLANFIEKRLKCEKTATIWTSTLQRTILTASPIVGFPKIQWRALDEINSGVCDGMTYEEIKKIMPEEFESRKKDKLRYRYPRGESYLDVIQRLEPVIIELERQRAPVVVISHQAVLRALYAYFADRPLREVPEIEMPLHTIIEIQMGVTGVEEKRYKLMD

SEQ ID NO: 185574 - protein, 427 aa, Zea Mays
MPEAAGAVAAAAVADRLHGSKEDRKLAIVLVGLPARGKTFTAVKLTRYLRWLGHETRHFNVGKYRRLKLGANQSADFFRDDNPEGIEARNEVAALAMEDMIDWMNGGGQVGIFDATNSTRKRRYMLMKMAEGNCKIIFLETICNDPNIIERNIRLKIQQSPDYAEQLDYEAGLEDFKERLINYEKVYEPVGEGSYIKMIDMVKGQDGQLQVNNISGYLPGRIVFFLVNSHLTPRPILLTRHGESLHNVRGRVGGDTVLSETGELYAKKLANFIEKRLKCEKTATIWTSTLQRTILTASPIVGFPKIQWRALDEINSGVCDGMTYEEIKKIMPEEFESRKKDKLRYRYPRGESYLDVIQRLEPVIIELERQRAPVVVISHQAVLRALYAYFADRPLREVPEIEMPLHTIIEIQMGVTGVEEKRYKLMD

SEQ ID NO: 185575 - protein, 228 aa, Zea Mays
MPEAAGAVAAAAVADRLHGSKEDRKLAIVLVGLPARGKTFTAVKLTRYLRWLGHETRHFNVGKYRRLKLGANQSADFFRDDNPEGIEARNEVAALAMEDMIDWMNGGGQVGIFDATNSTRKRRYMLMKMAEGNCKIIFLETICNDPNIIERNIRLKIQQSPDYAEQLDYEAGLEDFKERLINYEKVYEPVGEGSYIKMIDMVKGQDGQLQVNNISGYLPGRIVFFLAW

SEQ ID NO: 185576 - protein, 131 aa, Zea Mays
MFRKRLFGMMNDLPTVFEVVSGGVKQSKERDRSGTDNSGRNKLSAKQTSEPRLENNAREPDEGYDEDDGYHSETLCGTCGGIYSADEFWIGCDVCEKWYHGKCVKITPAKAESIKQYKCPSCCNSKRPRPL

SEQ ID NO: 185577 - protein, 85 aa, Zea Mays
MFTVSFRLSLHMMVMLMWAGRSHLVFIITFLWFLHAMESYGSLYVAGEGIGAEEAFVTFLKVNWAAYAKIITREVYVNIFYLIQG

SEQ ID NO: 185578 - protein, 336 aa, Zea Mays
MHVRICSCSPRVAFEVVPTHMHVLASPATYNTNHKRSGFAPGMAGYVNITQHRGGKVSFIVDDAADSVKPVTYVKQIESHRYDYSVLQVSGVLSSPEAEAPVAPPAPVNLTDILSKKYCKSFAGLLAADPKVFDTLNGTKDTALTVFCPVDAAVAAFMPKFKNLTAKAKTAILLYHAVPDYYSMQFLKSNKGKVTTLATTSVAKKDYTYEAESKDDTVTLDTTVVTSTIQATVRDDDPLAVYACSKFLQPKELFKAKTADLAPAPAPQGPKKKSKKKPTGTSAASAPSDDESADGPSADDDSSDDAADKAAAAPSYLSARWVTAAVTTAVALALAA

SEQ ID NO: 185579 - protein, 220 aa, Zea Mays
MSRYNDRYDHNNRYDRHGRHGSNTKLYVGQISPYTRTQDLEDIFRKYGRLRNVDMKREFGFVEFTDPRDADDARHDLDGRIFDGSHLIVEFARGAQRGPGGVPLDGKGPSFPGRCYNCGMDGHWVRDCKAGDWRDKCFRCGELGHIERNCKNSSKDLKRGRSYLRSASPHHGKGRGRSYSRSLSPYLGRGRGRSYSRSPSHYHRRGRSWSYRSIMSCSTW

SEQ ID NO: 185580 - protein, 496 aa, Zea Mays
MSSWLRSAVSRAVEAGGRSGVARAVKGYADTVAHHAGQAVADILHDRMGVQNYKSFKKTVARLEEAAVSCRGGERVELLKRWLGALQDVDAENGSSDLKVSEANDPSGEMDTLKAQTVLFYDADIDGAPMNFCDVFLYSQALEGITLSMILEPPSEEEVSLLLEIFSICLTGGKEVNKEIMSNVQDLAKAFSEYKDEVLVKREELLEYAQSIISGLKRNADIVRIDAETLELQRKLDEKQKSRGQSPEYQDKTSDKIAAANLEVFKEALGELRLCSRVEELLLKKKSITLGDSLEIHSQKVDKLKVLADSLACSSSKAEQRILEHRRQKEDALNFRVKKENEVSVSEKELLDEITELEKQRDELEAQLKKVNISLNAAAGRLKQTREERDQFDEANNQIIFSLKKKEDDLSKSIALCNVESNVVKIWIGFLEDSWKLQSSYNEQKDNKTCDELEKCVSDFLKLTKHHLSAFKEVLSQLIENIETYVGNLAVLTSRL

SEQ ID NO: 185581 - protein, 361 aa, Zea Mays
MYSCTAKHLKVLHCPCICLTGGKEVNKEIMSNVQDLAKAFSEYKDEVLVKREELLEYAQSIISGLKRNADIVRIDAETLELQRKLDEKQKSRGQSPEYQDKTSDKIAAANLEVFKEALGELRLCSRVEELLLKKKSITLGDSLEIHSQKVDKLKVLADSLACSSSKAEQRILEHRRQKEDALNFRVKKENEVSVSEKELLDEITELEKQRDELEAQLKKVNISLNAAAGRLKQTREERDQFDEANNQIIFSLKKKEDDLSKSIALCNVESNVVKIWIGFLEDSWKLQSSYNEQKDNKTCDELEKCVSDFLKLTKHHLSAFKEVLSQLIENIETYVGNLAVLTSRYFSSFPKVMYFVVQFVW

SEQ ID NO: 185582 - protein, 364 aa, Zea Mays
MSNVQDLAKAFSEYKDEVLVKREELLEYAQSIISGLKRNADIVRIDAETLELQRKLDEKQKSRGQSPEYQDKTSDKIAAANLEVFKEALGELRLCSRVEELLLKKKSITLGDSLEIHSQKVDKLKVLADSLACSSSKAEQRILEHRRQKEDALNFRVKKENEVSVSEKELLDEITELEKQRDELEAQLKKVNISLNAAAGRLKQTREERDQFDEANNQIIFSLKKKEDDLSKSIALCNVESNVVKIWIGFLEDSWKLQSSYNEQKDNKTCDELEKCVSDFLKLTKHHLSAFKEVLSQLIENIETYVGNLAVLTSREEEKEHGDDEASERTDPRKSLEEEYLETEKKVILSHLTLTWSHTWFLKR

SEQ ID NO: 185583 - protein, 225 aa, Zea Mays
MSSWLRSAVSRAVEAGGRSGVARAVKGYADTVAHHAGQAVADILHDRMGVQNYKSFKKTVARLEEAAVSCRGGERVELLKRWLGALQDVDAENGSSDLKVSEANDPSGEMDTLKAQTVLFYDADIDGAPMNFCDVFLYSQALEGITLSMILEPPSEEEVSLLLEIFSICLTGGKEVNKEIMSNVQDLAKAFSEYKDEVLVKREELLEYAQSIISGLKRNADIVRC

SEQ ID NO: 185584 - protein, 148 aa, Zea Mays
MSSWLRSAVSRAVEAGGRSGVARAVKGYADTVAHHAGQAVADILHDRMNYKSFKKTVARLEEAAVSCRGGERVELLKRWLGALQDVDAENGSSDLKVSEANDPSGEMDTLKAQTVLFYDADIDGAPMNFCDVFLYSQALEGITLSMVS

SEQ ID NO: 185585 - protein, 493 aa, Zea Mays
MSSWLRSAVSRAVEAGGRSGVARAVKGYADTVAHHAGQAVADILHDRMNYKSFKKTVARLEEAAVSCRGGERVELLKRWLGALQDVDAENGSSDLKVSEANDPSGEMDTLKAQTVLFYDADIDGAPMNFCDVFLYSQALEGITLSMILEPPSEEEVSLLLEIFSICLTGGKEVNKEIMSNVQDLAKAFSEYKDEVLVKREELLEYAQSIISGLKRNADIVRIDAETLELQRKLDEKQKSRGQSPEYQDKTSDKIAAANLEVFKEALGELRLCSRVEELLLKKKSITLGDSLEIHSQKVDKLKVLADSLACSSSKAEQRILEHRRQKEDALNFRVKKENEVSVSEKELLDEITELEKQRDELEAQLKKVNISLNAAAGRLKQTREERDQFDEANNQIIFSLKKKEDDLSKSIALCNVESNVVKIWIGFLEDSWKLQSSYNEQKDNKTCDELEKCVSDFLKLTKHHLSAFKEVLSQLIENIETYVGNLAVLTSRL

SEQ ID NO: 185586 - protein, 541 aa, Zea Mays
MSSWLRSAVSRAVEAGGRSGVARAVKGYADTVAHHAGQAVADILHDRMNYKSFKKTVARLEEAAVSCRGGERVELLKRWLGALQDVDAENGSSDLKVSEANDPSGEMDTLKAQTVLFYDADIDGAPMNFCDVFLYSQALEGITLSMILEPPSEEEVSLLLEIFSICLTGGKEVNKEIMSNVQDLAKAFSEYKDEVLVKREELLEYAQSIISGLKRNADIVRIDAETLELQRKLDEKQKSRGQSPEYQDKTSDKIAAANLEVFKEALGELRLCSRVEELLLKKKSITLGDSLEIHSQKVDKLKVLADSLACSSSKAEQRILEHRRQKEDALNFRVKKENEVSVSEKELLDEITELEKQRDELEAQLKKVNISLNAAAGRLKQTREERDQFDEANNQIIFSLKKKEDDLSKSIALCNVESNVVKIWIGFLEDSWKLQSSYNEQKDNKTCDELEKCVSDFLKLTKHHLSAFKEVLSQLIENIETYVGNLAVLTSREEEKEHGDDEASERTDPRKSLEEEYLETEKKVILSHLTLTWSHTWFLKR

SEQ ID NO: 185587 - protein, 332 aa, Zea Mays
MSNVQDLAKAFSEYKDEVLVKREELLEYAQSIISGLKRNADIVRIDAETLELQRKLDEKQKSRGQSPEYQDKTSDKIAAANLEVFKEALGELRLCSRVEELLLKKKSITLGDSLEIHSQKVDKLKVLADSLACSSSKAEQRILEHRRQKEDALNFRVKKENEVSVSEKELLDEITELEKQRDELEAQLKKVNISLNAAAGRLKQTREERDQFDEANNQIIFSLKKKEDDLSKSIALCNVESNVVKIWIGFLEDSWKLQSSYNEQKDNKTCDELEKCVSDFLKLTKHHLSAFKEVLSQLIENIETYVGNLAVLTSRYFSSFPKVMYFVVQFVW

SEQ ID NO: 185588 - protein, 403 aa, Zea Mays
MDTLKAQTVLFYDADIDGAPMNFCDVFLYSQALEGITLSMILEPPSEEEVSLLLEIFSICLTGGKEVNKEIMSNVQDLAKAFSEYKDEVLVKREELLEYAQSIISGLKRNADIVRIDAETLELQRKLDEKQKSRGQSPEYQDKTSDKIAAANLEVFKEALGELRLCSRVEELLLKKKSITLGDSLEIHSQKVDKLKVLADSLACSSSKAEQRILEHRRQKEDALNFRVKKENEVSVSEKELLDEITELEKQRDELEAQLKKVNISLNAAAGRLKQTREERDQFDEANNQIIFSLKKKEDDLSKSIALCNVESNVVKIWIGFLEDSWKLQSSYNEQKDNKTCDELEKCVSDFLKLTKHHLSAFKEVLSQLIENIETYVGNLAVLTSRYFSSFPKVMYFVVQFVW

SEQ ID NO: 185589 - protein, 205 aa, Zea Mays
MLTALTNYQVDKLKVLADSLACSSSKAEQRILEHRRQKEDALNFRVKKENEVSVSEKELLDEITELEKQRDELEAQLKKVNISLNAAAGRLKQTREERDQFDEANNQIIFSLKKKEDDLSKSIALCNVESNVVKIWIGFLEDSWKLQSSYNEQKDNKTCDELEKCVSDFLKLTKHHLSAFKEVLSQLIENIETYVGNLAVLTSRL

SEQ ID NO: 185590 - protein, 82 aa, Zea Mays
MCTHVFIVFLYIKDSHGHVVVHCTYIDRNVQLLFRSTTYISMEMQCRYLSSEYIKRLKVPLLKLQPEVAATQDTNSDSGQDE

SEQ ID NO: 185591 - protein, 405 aa, Zea Mays
MASAASGGGGSLKRMGPLRVQYYIVMGAVAAAVVLATLRYMPGPAVPATTARTSGGGVVRSAPAAAAVPVPVPAVEVETGEDEQAQRRRRRRKKKGDGVVLFNFGDSNSDTGGVAAVMGIRIAPPEGRAYFHHPTGRLSDGRVILDFIWSTAMPGVTTFSLDVQVDQFVFFKERCLDSIERGESAPIVEKAFPDAIYTMDIGHNDINGVLHLPYHTMLENLPPVIAEIKKAIERLHENGARKFWIHGTGALGCMPQKLSMPRDDDSDLDEHGCIASINNVCKKFNSLLSEALDELRLTLKSSTIVFVDMFAIKYDLVANHTKYGIEKPLMTCCGHGGPPYNYDPKESCMTSDKYLCKLGEKFISWDGVHFTDAANGIVASKVLSGEYNIPRVKLASLVPVPKSDD

SEQ ID NO: 185592 - protein, 308 aa, Zea Mays
MSRRRGGGGGGRRRVTGSCSSTSATPTATRAAWRRSWGSASRRRRAGPTSTTPRGGSPTDASSSTSSVDQFVFFKERCLDSIERGESAPIVEKAFPDAIYTMDIGHNDINGVLHLPYHTMLENLPPVIAEIKKAIERLHENGARKFWIHGTGALGCMPQKLSMPRDDDSDLDEHGCIASINNVCKKFNSLLSEALDELRLTLKSSTIVFVDMFAIKYDLVANHTKYGIEKPLMTCCGHGGPPYNYDPKESCMTSDKYLCKLGEKFISWDGVHFTDAANGIVASKVLSGEYNIPRVKLASLVPVPKSDD

SEQ ID NO: 185593 - protein, 75 aa, Zea Mays
MFPCRDDLCYAVHLPSAALYAIVCFQLVTVPCTSQPHRGRVVSRSGSPVSVAFEYQEVICEGACSSVVDPVVDSI

SEQ ID NO: 185594 - protein, 57 aa, Zea Mays
MLSTGPDLRNTPCLRILSTCPTMTSPFIGFCVMQVNETGNRTSPVSSRTFPSDIAFS

SEQ ID NO: 185595 - protein, 476 aa, Zea Mays
MGSDLFGSYAESSCAALFVASISSFGAEHNLTAMMYPLLISAVGLLVCAITTVVATDVTEVKGSDEVGPALKRQILISTVLMTAGIAAVTFLALPPSFTLFDFGNDKHVKNWHLFICVSAGLWAGLVIGYVTEYFTSNAYGPVQAVARSCRTGAATNVIFGLAVGYKSVIVPIMAIAAAIYASFRLAAMYGIALAALGMLSTIATGLAIDAYGPISDNAGGIAEMAGMPHRVRERTDALDAAGNTTAAIGKGFAIGSAALVSLALFGAYVSRAGITAVDVLSPRVFVGLLLGAMLPYWFSAMTMRSVGSAALRMVEEVRRQFDTIPGLAEGLAVPDYATCVRISTDASLKKMMAPGALVMFSPLVAGTLFGVETLAGLLAGALVSGVQVAISASNSGGAWDNAKKYIEAGLSEEARSLGPKGSEAHKAAVIGDTIGDPLKDTSGPSLNILIKLMAVESLVFAPFFAAHGGIIFDHL

SEQ ID NO: 185596 - protein, 301 aa, Zea Mays
MPREIITIQVGQCGNQIGMEFWKQLCLEHGIGKDGLLEDFATQGGDRKDVFFYQADDQHFIPRSLLIDLEPRVINGIQNSEYRNLYNHENIFVAEHGGGAGNNWASGYHQGEQVVDDIMDMVDREADGSDSLEGFVLCHSIAGGTGSGMGSYLLETLNDRYSKKLVQTYSVFPNQMETSDVVVQPYNSLLTLKRLTLNADCVVVLDNTALNRIAVERLHLSNPTFAQTNSLVSTVMSASTTTLRYPGYMNNDLVGLLASLIPTPRCHFLMTGYTPLTVERQVNMIRKTTVLDVMRRLLQRM

SEQ ID NO: 185597 - protein, 351 aa, Zea Mays
MDMVDREADGSDSLEGFVLCHSIAGGTGSGMGSYLLETLNDRYSKKLVQTYSVFPNQMETSDVVVQPYNSLLTLKRLTLNADCVVVLDNTALNRIAVERLHLSNPTFAQTNSLVSTVMSASTTTLRYPGYMNNDLVGLLASLIPTPRCHFLMTGYTPLTVERQVNMIRKTTVLDVMRRLLQTKNVMVSSYARTKEASQAKYISILNIIQGEVDPTQVHESLQRIRERKLVNFIDWAPASIQVALSRKSPYVQTTHRVSGLMLANHTSIRHLFGKCLGQYEKLRKKQAFLDNYRKFPMFADNDLSEFDESREIIESLVDEYKACESPDYIKWGMEDPGEANVAADLDSKLVV

SEQ ID NO: 185598 - protein, 99 aa, Zea Mays
MKHTIKLGVARRRGVLGGARRRVAAGAWASCLGGGASARTTEDRARVWWRRGGYGRGVVGSSWSGHSRRSSEVAARCITDARLSPVRKETSSTRWPGGA

SEQ ID NO: 185599 - protein, 319 aa, Zea Mays
MEQPVAKQKHWCGHCKKLAPEYEKLGASFKKAKSVLIAKVDCDEHKSVCSKYGVSGYPTIQWFPKGSLEPKKYEGQRSVEALAEFVNSEAGTNVKIAAIPSSVVVLTSETFDSIVLDETKDVLVEFYAPWCGHCKHLAPIYEKLASVFKQDDGVVIANIDADKHTDLAEKYGVSGFPTLKFFPKGNKAGEDYDGGRDLDDFVKFINEKCGTSRDPKGHLNQEAGLVPSLNPLVKEFLNAADDKRKEVLSKIEEDVAKLSGSAAKHGKIYVTAAKKIIDKGSDYTKKETERLHRMLEKSISPSKADEFIVKKNILSIFSS

SEQ ID NO: 185600 - protein, 255 aa, Zea Mays
MAFPQISRRALGLLLVIAAAAAIVSPATADEVVALTEADFEKEVGQDRGALVEFYAPWCGHCKKLAPEYEKLGASFKKAKSVLIAKVDCDEHKSVCSKYGVSGYPTIQWFPKGSLEPKKYEGQRSVEALAEFVNSEAGTNVKIAAIPSSVVVLTSETFDSIVLDETKDVLVEFYAPWCGHCKHLAPIYEKLASVFKQDDGVVIANIDADKHTDLAENSSLRETKPVKIMMVAGTWMTLSSSLMRSVAPAGIQRAT

SEQ ID NO: 185601 - protein, 751 aa, Zea Mays
MGDSGDAVMARWLQSAGLQHLATSSAAGAGGADYRGGMPGLGGAGAGSMLSSLLMQGYGPESVEEKHRLYTLLRGLNFNGESAPTSMSEPYTPTAQSFGGGNPVEGFYSPELRGELGAGLLDLHAIDDTELLSEDVASEPFEPSPFMPKDIDDDDEDVISGSQQAPLDNYGLVTSEKESTTRENNVAKIKVVVRKRPLNRKELSRKEEDIITVHDSSCLTVYEPKLKVDLTAYVEKHEFCFDAVLDEHVSNDEVYRETVEPIIPIIFQRTKATCFAYGQTGSGKTYTMQPLPLRAAQDMVRLLHQPVYRNQNFKLWLSYFEIYGGKLFDLLSDRRQLLMREDGKKQVCIVGLQEFEVSDVQIVKEYIERGNAARSTGSTGANEESSRSHAILQLAVKKHIIVKDTRRQRDRDANEAKNTKAVGKISFIDLAGSERGADTTDNDRQTRIEGAEINKSLLALKECIRALDNDQIHIPFRGSKLTEVLRDSFVGNSRTVMISCISPNAGSCEHTLNTLRYADRVKSLSKGGNTRKEQPTGPTTTSSRESSSAPSYSLPAEAEEIPNQIQEKRPVDTYRKGTENFTSNPSAEPDRNSFSMVPNYSNKGREDNGAASGNDRERYDLKSTQTAYTSKAQLVQNSTNTQEEKVTKVSPPRRKAYKEDKSDRQGNYVKKDNGPETGRTGYKIQQAKQLQQQQRPTSASASSRQSEKESSCDDVEIDAILEEEEALIAAHRKEIENTMEIVREKLINQVA

SEQ ID NO: 185602 - protein, 332 aa, Zea Mays
MMMTRAPMGPMEGAAVDEMVRRLVEGGRGGRQVQLSEAEIRQLCVEGKRVLLSQPNLLRIHAPVKICGDIHGQFVDLLRLFDLGGYPPASTYVFLGDYVDRGKQSLETICLLLAYKIRYPENIFLLRGNHEDAKINRVYGFYDECKRRFNVRLWKIFSDCFNCLPIAALIDDKILCMHGGLSPELTSLDQIKDIERPAEIPDYGLLCDLLWSDPSPDGEGWGESDRGVSCTFGADKLVEFLEKNDLDLICRAHQVVEDGYEFFAQRRLVTIFSAPNYCGEFDNVGALLSIDESLMCSFQILKPTDMGPPHARKQIPNKAHDLMASKLITSLC

SEQ ID NO: 185603 - protein, 277 aa, Zea Mays
MMMTRAPMGPMEGAAVDEMVRRLVEGGRGGRQVQLSEAEIRQLCVEGKRVLLSQPNLLRIHAPVKICGDIHGQFVDLLRLFDLGGYPPASTYVFLGDYVDRGKQSLETICLLLAYKIRYPENIFLLRGNHEDAKINRVYGFYDECKRRFNVRLWKIFSDCFNCLPIAALIDDKILCMHGGLSPELTSLDQIKDIERPAEIPDYGLLCDLLWSDPSPDGEGWGESDRGVSCTFGADKLVEFLEKNDLDLICRAHQILKPTDMGPPHARKQIPNKPTRG

SEQ ID NO: 185604 - protein, 163 aa, Zea Mays
MSGEAAAVGGGEGEANGIPPNVTIYINNLNEKIKLEELKKSLTAVFSQFGKILDVLAFKTLKHKGQAWVVFEDVASATEALKRMQGFPFYDKTMRIQYAKTKSDIIAKADGTFVPRERRKRTDEKSEKKQKREHHHDAGASQIGMGVTAYPGVYGAPQEDKGS

SEQ ID NO: 185605 - protein, 242 aa, Zea Mays
MSGEAAAVGGGEGEANGIPPNVTIYINNLNEKIKLEELKKSLTAVFSQFGKILDVLAFKTLKHKGQAWVVFEDVASATEALKRMQGFPFYDKTMRIQYAKTKSDIIAKADGTFVPRERRKRTDEKSEKKQKREHHHDAGASQIGMGVTAYPGVYGAPQLTQIPIAGGQRVMMPEIIVPNNILFVQNLPHETTPMMLQMLFCQYPGFKEVRMIEAKPGIAFVEYGDETQATAAMNNNVLFDLI

SEQ ID NO: 185606 - protein, 201 aa, Zea Mays
MRTTGTIMNLHRDMDGREQMRTTIQNQEQVFRQQVHELHRLYHVQKQLMQVRQAHAPAPATRAPAVLDDAKPRRPQLDIWCSETARNPPQQQFISFNTATAPAPAAPAENCNLELTLATGPSSSGSCDAGRWQGKRLKASPNSGSAATAVSSTSTDSELARFGDIDVVATPVARFHGEVTRRMDEVAQGPWMYRCLSLKTA

SEQ ID NO: 185607 - protein, 270 aa, Zea Mays
MGNRPFIRKAVSNIFYRFVFETDHHNGIAELLEVFGSVITGFAKPLKEEHKLFLWKALIPLHKPKTVGVYLPQLTYCITQFIEKEPKLTGTVIRGLLKYWPVTNSQKEMMFLGELEEVLELTEMADFQKCAVPLFRRIAQCLNSSHFQVAERALFLWNNEHLFDLISQNCQVILPIIYPALERNARWHWNQSVLNVTMNVRKMFFDMDERLLLACQTNFQEEEKKRAASEERRRLVWEHLERNAAFHPVTGDIGFAVPPTSAPLVAPTMT

SEQ ID NO: 185608 - protein, 114 aa, Zea Mays
MRRLVPRPPGGVHGRAPRRRGRRGGPRFRGVGGGRQVVGAAAGVVGEGRLPGGAAEAVRGGDDGGEGPGAAGADGADGVLPRRHVPLRHRVAPRTLLLGLVRARPARRWVAPPP

SEQ ID NO: 185609 - protein, 89 aa, Zea Mays
MYIVFGTLEKIISPAEEAVQKDREEKLAETLKNRLHITVQGNKAEFIQHAEAEVSKLRNAVSFLRNILVNWQWHQWLHLIILVKMSRLM

SEQ ID NO: 185610 - protein, 997 aa, Zea Mays
MAANKGMVAGSHNRNEFVMIRHDGDAPVPAKPTKSANGQVCQICGDTVGVSATGDVFVACNECAFPVCRPCYEYERKEGNQCCPQCKTRYKRQKGSPRVHGDDEEEDVDDLDNEFNYKQGNGKGPEWQLQGDDADLSSSARHDPHHRIPRLTSGQQISGEIPDASPDRHSIRSPTSSYVDPSVPVPVRIVDPSKDLNSYGLNSVDWKERVESWRVKQDKNMLQVTNKYPEARGDMEGTGSNGEDMQMVDDARLPLSRIVPISSNQLNLYRIVIILRLIILCFFFQYRISHPVRNAYGLWLVSVICEVWFALSWLLDQFPKWYPINRETYLDRLALRYDREGEPSQLAPIDVFVSTVDPLKEPPLITANTVLSILAVDYPVDKVSCYVSDDGSAMLTFESLSETAEFARKWVPFCKKHNIEPRAPEFYFAQKIDYLKDKIQPSFVKERRAMKREYEEFKIRINALVAKAQKVPEEGWTMADGTAWPGNNPRDHPGMIQVFLGHSGGLDTDGNELPRLVYVSREKRPGFQHHKKAGAMNALIRVSAVLTNGAYLLNVDCDHYFNSSKALREAMCFMMDPALGRKTCYVQFPQRFDGIDLHDRYANRNIVFFDINMKGLDGIQGPVYVGTGCCFNRQALYGYDPVLTEADLEPNIVVKSCCGRRKRKNKSYMDSQSRIMKRTESSAPIFNMEDIEEGIEGYEDERSVLMSQRKLEKRFGQSPIFIASTFMTQGGIPPSTNPASLLKEAIHVISCGYEDKTEWGKEIGWIYGSVTEDILTGFKMHARGWQSIYCMPPRPCFKGSAPINLSDRLNQVLRWALGSVEILLSRHCPIWYGYNGRLKLLERLAYINTIVYPITSVPLIAYCVLPAICLLTNKFIIPEISNYAGMFFILLFASIFATGILELRWSGVGIEDWWRNEQFWVIGGTSAHLFAVFQGLLKVLAGIDTNFTVTSKASDEDGDFAELYVFKWTSLLIPPTTVLVINLVGMVAGISYAINRG

SEQ ID NO: 185611 - protein, 979 aa, Zea Mays
MELAVGASEATLKSLLSKLGALLAEEYALIRGVRGDIQFITDELASMQAFLSNLSKYEEGHDDQTEDWMKQIRDVAYDIEDCIDDFAHSLRPDPRGSGWVTAVRKILYEIRTWYPRRNIATQIVDLKNRAQHIGERRTRYGVRDPQPGKKKSNLGGATGYLAAENQDVTRQLVRAQQPVGVKDMPDLKKWIHEDGKREKTGVLSIVGFGGVGKTTIAMDLYTKYGPEFQRRAMVTVSQNSDPEAVVRNILNQVKPLSNNAERRGEDSSGAVSLGKKNPVIATILSRIRLPFPNQKQDNGGGRDKHEQIKKELKNCLADTRYLLLIDDVWSSSTWQSIWKYFPEENKKGSRIIVTTRFQAVATTCSAHKDQDHIHLVDVLSGEEANSLFIKTLSECRGNSARQSNQTKVPDRVWQMCGGLPLAIVTMAGVVASKPLMIRDEWIAVCNSLFPEPEKCHKPEEFMRIINYCYNDLPSDLKTCCLYLSIFPKGREVSRKRLIRRWIAEGFVSEKQGLSVEDVADTCFKQLIERKMMRPVEHNSNGSVKSCRVHDMVLEYIISKAAEENFITVVGSHWSMSTSSKKVRRLTIHGSDPKRAKNVDSMNLSHVRSLTVFENLDKLHFKSFKTGIVQVLDLEGCKGFRESDANVSDICEMILLKYLSLRKTDIKNLPNNISKLKYLETLDVRETEVKQLPTTVGQLERITNILGGDKRRQRTLKLPKELKGTMKSLRILSGVEIVEGSTAASDFSYFTTLRKLAIYRIHHNEDIFKNLLSSIQYLSGYSLQTLLIVDESSEFFKTLESMSPSHLTDLRALELSGKLLYLPKWLDTLQHLVKLTLSATALCTDNFLVIRKLNSLFSLTFSISEKQDPALAAILEKNKSASRGEIVVPAGGFSKLKLLRIFVPLLPSLTFSKNATPHLERIELRFKKLEGFHGVDELGKLQDVVLTVDGHASERTNSILDGLKQRLEGKCNLIVNKYHD

SEQ ID NO: 185612 - protein, 565 aa, Zea Mays
MCGGLPLAIVTMAGVVASKPLMIRDEWIAVCNSLFPEPEKCHKPEEFMRIINYCYNDLPSDLKTCCLYLSIFPKGREVSRKRLIRRWIAEGFVSEKQGLSVEDVADTCFKQLIERKMMRPVEHNSNGSVKSCRVHDMVLEYIISKAAEENFITVVGSHWSMSTSSKKVRRLTIHGSDPKRAKNVDSMNLSHVRSLTVFENLDKLHFKSFKTGIVQVLDLEGCKGFRESDANVSDICEMILLKYLSLRKTDIKNLPNNISKLKYLETLDVRETEVKQLPTTVGQLERITNILGGDKRRQRTLKLPKELKGTMKSLRILSGVEIVEGSTAASDFSYFTTLRKLAIYRIHHNEDIFKNLLSSIQYLSGYSLQTLLIVDESSEFFKTLESMSPSHLTDLRALELSGKLLYLPKWLDTLQHLVKLTLSATALCTDNFLVIRKLNSLFSLTFSISEKQDPALAAILEKNKSASRGEIVVPAGGFSKLKLLRIFVPLLPSLTFSKNATPHLERIELRFKKLEGFHGVDELGKLQDVVLTVDGHASERTNSILDGLKQRLEGKCNLIVNKYHD

SEQ ID NO: 185613 - protein, 360 aa, Zea Mays
MELAVGASEATLKSLLSKLGALLAEEYALIRGVRGDIQFITDELASMQAFLSNLSKYEEGHDDQTEDWMKQIRDVAYDIEDCIDDFAHSLRPDPRGSGWVTAVRKILYEIRTWYPRRNIATQIVDLKNRAQHIGERRTRYGVRDPQPGKKKSNLGGATGYLAAENQDVTRQLVRAQQPVGVKDMPDLKKWIHEDGKREKTGVLSIVGFGGVGKTTIAMDLYTKYGPEFQRRAMVTVSQNSDPEAVVRNILNQVKPLSNNAERRGEDSSGAVSLGKKNPVIATILSRIRLPFPNQKQDNGGGRDKHEQIKKELKNCLADTSRTFTVLFLQLDLLQLDRAPRDRRGIRLQTWTTTTTLLVKT

SEQ ID NO: 185614 - protein, 588 aa, Zea Mays
MGTIPSQLGRPLSSALQHRQQGLLGERSKISMSTLNKNIVSSQPPLVSSSADLTIPKTTATPLLLASPHQSTSVSTSLHTGFLRSRSTSGLPRQPSYTTGFGIALNIETLVAVTEQRDTPIETPPPEVQDKILFMINNISISNMEVKAKEFNEVIQEQYYPWFAQYMVMKRASIEPNFHDLYLKFFDKVNSKSLNKEILKATYENCKVLLRSDLIKSSSEERSLLKKPRQLVGKVHHWCTIHFNVNNQMTNTVTNMNRYILSLSDDKQLVPGLISLIEQGTDVLRVKALLFVALLCKNSRRWLPHFFCNAKLISAVDRLGKEKEGFIHHCTEAFVQLVASLVPGILDTVSSDIQQVMVGKRHGPVTALAGRAHPKSTIHLFPVILHLLGSASFKHRVVTGHVLLQLANLIKILEAPFQVLFKNLTVDIKDVKPTSLLKDRLREVEGNPDFSNKDVTASQTPVVAEVPSGTIPSLTHMEQQPEINITSRAMSLPNILNQYAAPVRLPTNNTVEDDKVALMMPEQVPSLTQVSPAQTQSTSPSPFSVNQLMAAIPREEIRFKINPKLGSLGPQLQYSKIMDLALDKENIE

SEQ ID NO: 185615 - protein, 396 aa, Zea Mays
MSTLNKNIVSSQPPLVSSSADLTIPKTTATPLLLASPHQSTSVSTSLHTGFLRSRSTSGLPRQPSYTTGFGIALNIETLVAVTEQRDTPIETPPPEVQDKILFMINNISISNMEVKAKEFNEVIQEQYYPWFAQYMVMKRASIEPNFHDLYLKFFDKVNSKSLNKEILKATYENCKVLLRSDLIKSSSEERSLLKKPRQLVGKVHHWCTIHFNVNNQMTNTVTNMNRYILSLSDDKQLVPGLISLIEQGTDVLRVKALLFVALLCKNSRRWLPHFFCNAKLISAVDRLGKEKEGFIHHCTEAFVQLVASLVPGILDTVSSDIQQVMVGKRHGPVTALAGRAHPKSTIHLFPVILHLLGSASFKHRVVTGHVLLQLANLIKILEAPFQKSLQGPSLH

SEQ ID NO: 185616 - protein, 55 aa, Zea Mays
MSTRHRVSQDQNGFTRPESTALHRPAVGLVGTRYSRHGARHVSESTAPHLPVSCH

SEQ ID NO: 185617 - protein, 168 aa, Zea Mays
MHKAARQHLIFYSHLFYFVNSLTHVSVLVYSGDRSPRPELQDQAWLWLLLCCLLLLDRREGGEKQLACRLLLRWPFILYGASRIHLLQKHHKSCLGHYTRASHSATWHSQSEVLEERQIQLPAYLVSEVMLMCKHLHLEFCLARMNQVYFLILLHLRDLFGFQMVCWS

SEQ ID NO: 185618 - protein, 146 aa, Zea Mays
MHKAARQHLIFYSHLFYFVNSLTHVSVLVYSGDRSPRPELQDQAWLWLLLCCLLLLDRREGGEKQLACRLLLRWPFILYGASRIHLLQKHHKSCLGHYTRASHSATWHSQSEVLEERQIQLPAYLVSGRQIEQGFVWLPNGLLVLK

SEQ ID NO: 185619 - protein, 295 aa, Zea Mays
MKARGAGLGFARRDSTGGGHEHAVGYVTGGQFYGAKASLNVWPAQVASPAEFSLSQIWVISGAFGNDLNTIEAGWQVSPQLYGDNSPRTTRTRRRAATTSTARASCRPAAAWPSAPPSRPSPPTPAASSTSRFSSGRTRAGATGGCSSAPARSSATGPPRSSRTSARAPTWCSSGARSSTRAPPARRTRPRRWAPAASPPRDTRAPHTSETCSSSTGTTTSYRPPGSACSPTGRGAMTSPAAAAARGAPTSITVGPAGMHGARNFTSILARNGIECMGWVLYLYVCFVRAHSSTH

SEQ ID NO: 185620 - protein, 265 aa, Zea Mays
MCSDRHVSYPPQTDLLLSDFYRWAGDANTFTGDECIELVCSPNNPDGAIREAVVRSAGAKAIHDLVYYWPQYTPITGPAAHDIMLFSVSKLTGHAGTRLGWALVKDREVARNMVYFVDRSTTGVCKESQMRATEILGVVSDAYEAVPPARASGAVPRLFDFAQRRLEERWRILRATVAATGAFSLPEETSGYCNFAKQTVTACPAFAWLRCEKEGVEDCAELLAGHKIVGSGGEQFGGDARCVRINMLDRDNVFNMLVQRLSSIN

SEQ ID NO: 185621 - protein, 129 aa, Zea Mays
MNTKLYNATSFNEYVLEGSAPVLPETQRLFKKLVSLGIKPVFLTGRTEDQRAITVTNLRRQGYSGWMTLLLKPVGLKATAIAYKSGERQKLQDAGYVIVGNIGDQWSDILGAPEGARTFKLPDPLYYIG

SEQ ID NO: 185622 - protein, 241 aa, Zea Mays
MSSPAEYYKSLPPISKAYGTLCFFTTVLVRLHILNPLFLYLYYPRVFKKFEVWRIFTSFFFLGPFSINFGIRLLMMYGVMLEKGAFDKRTADFLWMMIFGAISLLVLSVIPQLNTYVLGLPMVSMLVYVWSRENPNAQINIYGILQLKAFYLPWVMLLLDVIFGSPLMPGLLGIMVGHLYYYFAVLHPLATGKNYLKTPKWVHKIVARFRIGMQANAPVRAPANGNAGTGAFRGRSYRLNQ

SEQ ID NO: 185623 - protein, 201 aa, Zea Mays
MEDIYKFLLPGTIFHKLWYSPSDDVGVFEISLHRARYGVMLEKGAFDKRTADFLWMMIFGAISLLVLSVIPQLNTYVLGLPMVSMLVYVWSRENPNAQINIYGILQLKAFYLPWVMLLLDVIFGSPLMPGLLGIMVGHLYYYFAVLHPLATGKNYLKTPKWVHKIVARFRIGMQANAPVRAPANGNAGTGAFRGRSYRLNQ

SEQ ID NO: 185624 - protein, 333 aa, Zea Mays
MVAAADLEAAERVVAELREACAARLDEVAAAMEAEMRAGLREEGGSKIKMIVSFVDNLPTGNEEGVFYALDLGGTNFRVLRVQLAGKDRRVAKRDSKEVSIPPHLMSGNASELFGFIASALAKYVAAAGEGDGRQRELGFTFSFPVRQTSIASGTLIKWTKAFSVDDAVGEDVVAELQTAMEKQGVDMRVAALINDTVGTLAAGRYNDEDVVVGVILGTGSNAAYVEEASAIPKLKLEGGELPKSGNMVINTEWGNFYSPCLPITEYDQALDEESLNPGEQIFEKLVSGMYLGEIVRRVLLKIASQSSILGDVSHTNLKTRFSLRRCCCVWHS

SEQ ID NO: 185625 - protein, 65 aa, Zea Mays
MVSARSAALRQKQPHTYYSTDFGATFWTVLGVQILEEADCKRLHLLPHPSSLHGQNSTALVVLCY

SEQ ID NO: 185626 - protein, 57 aa, Zea Mays
MWKTMGWEASELQRRGFMIRTRQGLVRRRLIACGGDGEVGGRGSGLVMVRPPLRWGL

SEQ ID NO: 185627 - protein, 809 aa, Zea Mays
MSVVGFDLGNESCIVAVARQRGIDVVLNEESKRETPAIVCFGDKQRFIGTAGAASSTMNPKNSISQIKRLLGRKYSDPEVQRDLASFPFRVTEGPDGFPLVHVRYLGEERTFTSTQLLAMVLSNLKGIAEGNLNAAVVDCCIGIPVYFTDLQRRAVLDAATIAGLQPLRLFHETTATALAYGIYKTDLPENDQLNVAFVDVGHASMQVSVVGYKKGQLKMLSHTYDQSLGGRDFDEALFKHFAAKFKEEYKIDVYQNARACIRLRVACEKLKKVLSANPEAPLNIECLMDEKDVRGFIKREEFEQISASVLERVKGPLEKALAEAGLTTENVHFVEVVGSGSRVPAIIKIITDFFGKEPRRTMNASECVARGCALQCAILSPTFKVREFQVNDGFPFSIALSWNGDSQNTPQQTLVFPKGNAIPSTKIGPFQTSKGEKAKLKVKVRLNIHGTVTVDSAIMLEDDVEVPVSSANEAPNDTMKMDTDDAPSDPAVASDVNMQEPKSADTAEAAHAAENGPQDTEEKSVPMETDAKVEPSKKKVKKITVPVHELVYGALAAADLQKAVEKEYEMALQDRVMEETKEKKNAVEAYVYDMRNKLYDKYSDFVTSEDKEGLIAKLQEVEDWLYEDGEDETKGVYIAKLEELKKVGDPIELRFKEWEIRSSAVSQLVYCINSFREAAQSTDQKFEHIDMSEKRKVINECSEAETWLIEKKQQQDALPKHANSVLLAADLKKKAETLDRFCKPIMTKPKPAPKPQTPPVAENQAPEPQTPEQQQSGGESTASEGAAEEPRAEQMETDKPEGATDPSA

SEQ ID NO: 185628 - protein, 826 aa, Zea Mays
MSVVGFDLGNESCIVAVARQRGIDVVLNEESKRETPAIVCFGDKQRFIGTAGAASSTMNPKNSISQIKRLLGRKYSDPEVQRDLASFPFRVTEGPDGFPLVHVRYLGEERTFTSTQLLAMVLSNLKGIAEGNLNAAVVDCCIGIPVYFTDLQRRAVLDAATIAGLQPLRLFHETTATALAYGIYKTDLPENDQLNVAFVDVGHASMQVSVVGYKKGQLKMLSHTYDQSLGGRDFDEALFKHFAAKFKEEYKIDVYQNARACIRLRVACEKLKKVLSANPEAPLNIECLMDEKDVRGFIKREEFEQISASVLERVKGPLEKALAEAGLTTENVHFVEVVGSGSRVPAIIKIITDFFGKEPRRTMNASECVARGCALQCAILSPTFKVREFQVNDGFPFSIALSWNGDSQNTPQQTLVFPKGNAIPSTKVLTFFKSSTFEVDVLYVDPNGLQIPQKISTYTIGPFQTSKGEKAKLKVKMLEDDVEVPVSSANEAPNDTMKMDTDDAPSDPAVASDVNMQEPKSADTAEAAHAAENGPQDTEEKSVPMETDAKVEPSKKKVKKITVPVHELVYGALAAADLQKAVEKEYEMALQDRVMEETKEKKNAVEAYVYDMRNKLYDKYSDFVTSEDKEGLIAKLQEVEDWLYEDGEDETKGVYIAKLEELKKVGDPIELRFKEWEIRSSAVSQLVYCINSFREAAQSTDQKFEHIDMSEKRKVINECSEAETWLIEKKQQQDALPKHANSVLLAADLKKKAETLDRFCKPIMTKPKPAPKPQTPPVAENQAPEPQTPEQQQSGGESTASEGAAEEPRAEQMETDKPEGATDPSA

SEQ ID NO: 185629 - protein, 350 aa, Zea Mays
MLEDDVEVPVSSANEAPNDTMKMDTDDAPSDPAVASDVNMQEPKSADTAEAAHAAENGPQDTEEKSVPMETDAKVEPSKKKVKKITVPVHELVYGALAAADLQKAVEKEYEMALQDRVMEETKEKKNAVEAYVYDMRNKLYDKYSDFVTSEDKEGLIAKLQEVEDWLYEDGEDETKGVYIAKLEELKKVGDPIELRFKEWEIRSSAVSQLVYCINSFREAAQSTDQKFEHIDMSEKRKVINECSEAETWLIEKKQQQDALPKHANSVLLAADLKKKAETLDRFCKPIMTKPKPAPKPQTPPVAENQAPEPQTPEQQQSGGESTASEGAAEEPRAEQMETDKPEGATDPSA

SEQ ID NO: 185630 - protein, 167 aa, Zea Mays
MAHSPSGSHVAATSVGNEAFTDAVAEDGGDSKLSALLFAIVRPRLVVADAEFPSSCFLRGIFDAGVRGLSPPLVSVAWFQCVLRIATNLVHIHPILLDVSQQVQDGLQSMLKTSSEIARCDGEIDAELERARDAVAENARALHDERERVQKAALAALDILSGGRCVI

SEQ ID NO: 185631 - protein, 65 aa, Zea Mays
MPWRRMPERCTTNGRESRRPPSPRSTSSAAAVASSEGMPAACRRHRQSAPDLRSRSILARFLLHL

SEQ ID NO: 185632 - protein, 112 aa, Zea Mays
MGLYYSICSRSQTCRSRCRTVSRACSRRAARSRGATARSTRSWSARGMPWRRMPERCTTNGRESRRPPSPRSTSSAAAVASSEGMPAACRRHRQSAPDLRSRSILARFLLHL

SEQ ID NO: 185633 - protein, 168 aa, Zea Mays
MSGGKRRAPPKAEKLVDHHLGIVKDAAVKYQGHPLILMGKSMGSRNDSLLEETLLDIIYKLKGGEDTPVYTNKGVNGAVRDETLLQLKVPTMFVQGSKDALCPLDKLLSTQKKMTCKNELHIIDGGDHSFKVGKKYLESKGLNQYDLEMEAVTKISQFFQDSFTESCT

SEQ ID NO: 185634 - protein, 150 aa, Zea Mays
MAPKRRRADQGSSVPAPPPPLRKAKLQPVVIFAHGAGAPSSSDWMVHWKKMVQDALDAVAVVTFDYPYMSGGKRRAPPKAEKLVDHHLGIVKDAAVKYQGHPLILMGKSMGSRNDSLLEETLLDIIYKLKGGEDTPVYTNKVKNPNSSRD

SEQ ID NO: 185635 - protein, 168 aa, Zea Mays
MAPKRRRADQGSSVPAPPPPLRKAKLQPVVIFAHGAGAPSSSDWMVHWKKMVQDALDAVAVVTFDYPYMSGGKRRAPPKAEKLVDHHLGIVKDAAVKYQGHPLILMGKSMGSRNDSLLEETLLDIIYKLKGGEDTPVYTNKGVNGAVRDETLLQLKVPTMFVQMPCAP

SEQ ID NO: 185636 - protein, 98 aa, Zea Mays
MKNPRDFTQPFFTHAAAALGSDWSATHAEVARRSRSSATTRQGRPAAGGRGRGRRPAAGVDAGGQARGRARRHTNCFCSLSQTSQGPTYASVWFSYLL

SEQ ID NO: 185637 - protein, 245 aa, Zea Mays
MTHDSALGKYLNFALHPTTAPESRIRLLRQPRQGVVIVVHHTHLSETPTTPFPCLYKQRPPPSSLPPPSRFRPKSLSELDQKPPSQYVHSHHLPVQRQSVTHNHNHTMVVLTKGELEQIALPAVQRASPPPPAAVPEVDLAAGDAAAAARAVAKACEDHGFFKVTGHGVPPHLLARLEAAAAAFFALPQREKDRAAGCPFGYASKRIGANGDLGWVEYLLLAVTAAGAAAAPGSACEGAEPSCFR

SEQ ID NO: 185638 - protein, 254 aa, Zea Mays
MPGNRVYLHNKHRADNATPSRRARCNAPRRSSRGHGSCPAPGRQIDRRRTCQLVLLPPCAVLDEYVAAVRRMTCTVLQLMAQGLGLDDRDVFSRLVLDRDSDSMLRVNHYPPAAETRRLTGFGEHTDPQIISVLRSNDASGLEITLRDGTWVSVPSDTESFFVNVGDALQVLTNGRFRSVRHRVMVSSARPRVSVIFFGGPPPRERLAPLPGLVDREGGRRRYREFTWREYKNSAYRTKLADNRLCSFETMATS

SEQ ID NO: 185639 - protein, 91 aa, Zea Mays
MLTKMNEKSVISNGKSGFLEKVTSSHLFGSIALLAKSGNLSLTELMLEWSRTSLCFYATSRVDKGLSSELQNQNWRVLSVANECSIEVPVF

SEQ ID NO: 185640 - protein, 129 aa, Zea Mays
MTSHRTALLICSRRTALMGLMPGAATDPAEADPVASSTRHSEPMRWRMDSTSSSAWSQATRKISQRCLKASSAASVAAVFFSPPDCTRASTTAAAAAMKSSYAALRLKEEQKKLWLKRADKACRQTRSE

SEQ ID NO: 185641 - protein, 536 aa, Zea Mays
MDDGDSVVRSVEKAGAGPGDDGSTTPLPETVQIGNSPSYRIDRKLGKGGFGQVYVGRRISSPSVSDRTPGANALEVAIKFEHRTSKGCNYGAPYEWQVYNTLSGIHGVPRVHYKGKLGEYYIMIMDMLGPSLWDVWNNNSHSMPVEMVACIAIEAISILEKMHSKGYVHGDVKPENFLLGPPGTLQEKKLFLVDLGLATRWKDTGTGEHVEYDQRPDVFRGTVRYASVHAHLGRTGSRRDDLESLAYTLVFLLRGRLPWQGYQGENKGFLVCKKKMATSPESLCCFCPQPFRQFIEYVVNLKFDEEPNYAKYISLFDGIVGPNPDIRPINTDGAQKLVFQVGQKRGRLTMEEDDDEQPKKKIRMGMPATQWISVYNARRPMKQRYHYNVADCRLAQHISKGNEDGLFISSVASCSNLWALIMDAGTGFTSQVYELSPYFLHKEWIMEQWEKNFYITALAGANNGSSLVVMSRGTQYAQQSYKQAVVGQWSCPGILAFRRRLWSLTSCIQVRVSIDDGIMDFASRLLQLHGIRQRLS

SEQ ID NO: 185642 - protein, 258 aa, Zea Mays
MEEDDDEQPKKKIRMGMPATQWISVYNARRPMKQRYHYNVADCRLAQHISKGNEDGLFISSVASCSNLWALIMDAGTGFTSQVYELSPYFLHKEWIMEQWEKNFYITALAGANNGSSLVVMSRGTQYAQQSYKVSDSFPFKWINKKWKEGFYVTAMATAGSRWAVVMSRNSGFSAQVVELDFLYPSEGIHRRWDNGFRITATAATWDQAAFILSIPKRKPADETQETLRTSAFPSQHVKDKWGKNLYLASICYGRTVS

SEQ ID NO: 185643 - protein, 659 aa, Zea Mays
MKNLHKLLKGGHILGLTNVHFEKDRICSACQAGKQVGTQHPHKNIMTTDRPLELLHMDLFGPIAYISIGGSKYCLVIVDDYSRFTWVFFLQDKSHTQEILKRFLRRAQNEFGLRIKKIRSDNGTEFKNSQIEGFLEEEGIKHEFSSPYTPQQNGVVERKNRTLLDMARTMLDEYKTPDRFWAEAVNTACYAINRLYLHRILKKTSYELLTGKKPNVSYFRVFGSKCFILVKRSRKSKFAPKTVEGFLLGYDSNTRAYRVFNKSSGLVEVSCDVVFDETNGSQVEQVDLDEIGEEQAPCITLRNMSIGDVCPKESEEPPHAQDQPSSSMQASPPTQIEDEAQDVEQEDQEDEPPRNDCNDQGGDANDEDKEDEQPRPPHPRVHQAIQRDHPVDTILGDIHKGVTTRSRIAHFCEHYSFVSSIEPHRVEEALQDADWVMAMQEELNNFTRNEVWHLVPRPNQNVVGTKWVFRNKQDEHGVVTRNKARLVAKGYSQVEGLDFGETYAPVARLESIRILLAYATYHGFKLYQMNVKSAFLNGPIKEEVYVEQPPGFEDSEYPNHVYRLSKALYGLKQAPRAWYECLRDFLIANGFKVGKADPTLFTKTLENDLFVCQIYVDDIIFGSTNESTCEEFSRIMTQKFEMSMMGELKYFLGFQVKQL

SEQ ID NO: 185644 - protein, 178 aa, Zea Mays
MADALLLPCRFLAPLSVTSGASSSASSSPPCRWVLSSPGSPWRPRLAAGQRQPRPRRFTRHKICAAERGEQPKWWEKNAGPNMIDIHSTVEFLDALRDAGDRLVIVEFYGTWCGSCRALFPRLCRTALETPDVLFLKVNFDENKPMCKRLNVKVLPFFHFYRGADGLLEAFSCSLAKV

SEQ ID NO: 185645 - protein, 109 aa, Zea Mays
MLMCVSIYANIVCAYYVHRAHDPAHALTIIQYHAATIKTPPRRQGLGFSGGGGSLWCASGGDPGGQQRCHLEVGDRRRRSTRNDRQRRSEAGGQAVTALSKRTDNGSAP

SEQ ID NO: 185646 - protein, 270 aa, Zea Mays
MIQSALTWLLWQVAMSVNDIVTLGAKPLFFLDYYATSKLDVDLAEKVIKGIRDGCEQSDCALLGGETAEMPGFYAEGEYDLSGFAVGVVKKDKVIDGKNIVKGDVLIGLPSSGVHSNGFSLVRRVLEKSGLSLDDQLPRNDGITTTVGEALMAPTFIYVKQVLEIISKGGVKGLAHITGGGFTDNIPRVFPSGCGAKIFTGSWEIPPIFSCLQQAGNIDDAEMRRTFNMGIGMVLVVSRESADRIIEDTHGSNPAYRIGEVIEGDGVQYV

SEQ ID NO: 185647 - protein, 115 aa, Zea Mays
MSAAAASSVTKFIKCVTVGDGAVGKTCMLICYTCNKFPTDYIPTVFDNFSANVSVGGSIVNLGLWDTAGQEDYSRLRPLSYRGADVFILSFSLVSRASYENVLKKFGFHTAITEY

SEQ ID NO: 185648 - protein, 807 aa, Zea Mays
MLYQALMGQFYGKRSFLLMGLAGSSKLALYHLSAKTGEILKDIQESLPGGLLGETVLVSDNVLVALDKARSSLLVIEFKGERISYNKVHVSDLVQDLSGSLELQSLSNGVISLQTSSSISLLKLKGTDGLEVLQRFDQPAAVSDSLTITEKEAAFAVVQHLGSEIEFIVKSTSDLSSEIIKEKLVIDQNRGNVEKVFLNSYIRTDRSHGFRALVVMEDHSLLLIQQGEVVWSREDGLASIVDVTTSELPVEKDGVSVADVEHNLFEWLKGHMLKLKGSLMLANADEVAAIQAMRLKSSEKNKMTRDHNGFRKLLVVLTKAGKVMALHTGDGRVIWSKLVPSLRASRCGGVPSALRIYQWQVPHHSVMRENPSVLVVGKFGAEPSIPGVFSILDSYSGEELNSMKLDHSVVQIIPLTLKDSSEQQLHLFVDSDSNAHLYPKSPDALNVFLHEMSNLYFYSVDIQANVIKGYSLQKSCNLNVGDEYCFSTKELWFIIFPSDSERITISETRKMNEVVHTQAKISGDHDVMYKYLSKNLVFVATLSPKAAVDIGSALPEEASLVAYLIDAVTGRILHRVTHHGAQGPVHAVLSENWVVYHYFNLRAHRFEMAVIEIYDQSRAGNKDVTKLILGKHNLLAPITSYARPEVAVKSQSYFFTHSVKAMAVTQTAKGITSKQLLLGTIGDQVLALDKRYLDPRRSVNPTQQEKEEGIIPLTDSLPIIPQSFVTHSHQVEALRAIVSIPAKLESTIVFTYGVDLFYTQLAPSRTYDSLTDEFSYALLLITIAVLVAAIIGTWIWSEKKELRDKWR

SEQ ID NO: 185649 - protein, 346 aa, Zea Mays
MEDHSLLLIQQGEVVWSREDGLASIVDVTTSELPVEKDGVSVADVEHNLFEWLKGHMLKLKGSLMLANADEVAAIQAMRLKSSEKNKMTRDHNGFRKLLVVLTKAGKVMALHTGDGRVIWSKLVPSLRASRCGGVPSALRIYQWQVPHHSVMRENPSVLVVGKFGAEPSIPGVFSILDSYSGEELNSMKLDHSVVQIIPLTLKDSSEQQLHLFVDSDSNAHLYPKSPDALNVFLHEMSNLYFYSVDIQANVIKGYSLQKSCNLNVGDEYCFSTKELWFIIFPSDSERITISETRKMNEVVHTQAKISGDHDVMYNHWTHTPSCDSSWCTRPCTCSFERELGCLSLF

SEQ ID NO: 185650 - protein, 515 aa, Zea Mays
MRLKSSEKNKMTRDHNGFRKLLVVLTKAGKVMALHTGDGRVIWSKLVPSLRASRCGGVPSALRIYQWQVPHHSVMRENPSVLVVGKFGAEPSIPGVFSILDSYSGEELNSMKLDHSVVQIIPLTLKDSSEQQLHLFVDSDSNAHLYPKSPDALNVFLHEMSNLYFYSVDIQANVIKGYSLQKSCNLNVGDEYCFSTKELWFIIFPSDSERITISETRKMNEVVHTQAKISGDHDVMYKYLSKNLVFVATLSPKAAVDIGSALPEEASLVAYLIDAVTGRILHRVTHHGAQGPVHAVLSENWVVYHYFNLRAHRFEMAVIEIYDQSRAGNKDVTKLILGKHNLLAPITSYARPEVAVKSQSYFFTHSVKAMAVTQTAKGITSKQLLLGTIGDQVLALDKRYLDPRRSVNPTQQEKEEGIIPLTDSLPIIPQSFVTHSHQVEALRAIVSIPAKLESTIVFTYGVDLFYTQLAPSRTYDSLTDEFSYALLLITIAVLVAAIIGTWIWSEKKELRDKWR

SEQ ID NO: 185651 - protein, 592 aa, Zea Mays
MEDHSLLLIQQGEVVWSREDGLASIVDVTTSELPVEKDGVSVADVEHNLFEWLKGHMLKLKGSLMLANADEVAAIQAMRLKSSEKNKMTRDHNGFRKLLVVLTKAGKVMALHTGDGRVIWSKLVPSLRASRCGGVPSALRIYQWQVPHHSVMRENPSVLVVGKFGAEPSIPGVFSILDSYSGEELNSMKLDHSVVQIIPLTLKDSSEQQLHLFVDSDSNAHLYPKSPDALNVFLHEMSNLYFYSVDIQANVIKGYSLQKSCNLNVGDEYCFSTKELWFIIFPSDSERITISETRKMNEVVHTQAKISGDHDVMYKYLSKNLVFVATLSPKAAVDIGSALPEEASLVAYLIDAVTGRILHRVTHHGAQGPVHAVLSENWVVYHYFNLRAHRFEMAVIEIYDQSRAGNKDVTKLILGKHNLLAPITSYARPEVAVKSQSYFFTHSVKAMAVTQTAKGITSKQLLLGTIGDQVLALDKRYLDPRRSVNPTQQEKEEGIIPLTDSLPIIPQSFVTHSHQVEALRAIVSIPAKLESTIVFTYGVDLFYTQLAPSRTYDSLTDEFSYALLLITIAVLVAAIIGTWIWSEKKELRDKWR

SEQ ID NO: 185652 - protein, 806 aa, Zea Mays
MAAPPRRSLLVLLAGILVFGSLTTLATAIYEDQVGLADWHQKYIGKVKQAVYHSQKSGRRRVVVLTEENVISSLDLRSGDIFWRHVIDKNDPLDQLSLSLGKYVLTLSLGGTILRAWNLPDGHMIWETNLRISTASNPQLHVMSNNKVANDNLVLVSAGRWIYAVSSTDGAILWEKEFSLDGLEIKRILQSPENGIVYALGLAGSSKLALYHLSAKTGEILKDIQESLPGGLLGETVLVSDNVLVALDKARSSLLVIEFKGERISYNKVHVSDLVQDLSGSLELQSLSNGVISLQTSSSISLLKLKGTDGLEVLQRFDQPAAVSDSLTITEKEAAFAVVQHLGSEIEFIVKSTSDLSSEIIKEKLVIDQNRGNVEKVFLNSYIRTDRSHGFRALVVMEDHSLLLIQQGEVVWSREDGLASIVDVTTSELPVEKDGVSVADVEHNLFEWLKGHMLKLKGSLMLANADEVAAIQAMRLKSSEKNKMTRDHNGFRKLLVVLTKAGKVMALHTGDGRVIWSKLVPSLRASRCGGVPSALRIYQWQVPHHSVMRENPSVLVVGKFGAEPSIPGVFSILDSYSGEELNSMKLDHSVVQIIPLTLKDSSEQQLHLFVDSDSNAHLYPKSPDALNVFLHEMSNLYFYSVDIQANVIKGYSLQKSCNLNVGDEYCFSTKELWFIIFPSDSERITISETRKMNEVVHTQAKISGDHDVMYKYLSKNLVFVATLSPKAAVDIGSALPEEASLVAYLIDAVTGRILHRVTHHGAQGPVHAVLSENWVVYHYFNLRAHRFEMAVIEIYDQSRAMSRSSY

SEQ ID NO: 185653 - protein, 735 aa, Zea Mays
MLYQALMGQFYGKRSFLLMDLVQDLSGSLELQSLSNGVISLQTSSSISLLKLKGTDGLEVLQRFDQPAAVSDSLTITEKEAAFAVVQHLGSEIEFIVKSTSDLSSEIIKEKLVIDQNRGNVEKVFLNSYIRTDRSHGFRALVVMEDHSLLLIQQGEVVWSREDGLASIVDVTTSELPVEKDGVSVADVEHNLFEWLKGHMLKLKGSLMLANADEVAAIQAMRLKSSEKNKMTRDHNGFRKLLVVLTKAGKVMALHTGDGRVIWSKLVPSLRASRCGGVPSALRIYQWQVPHHSVMRENPSVLVVGKFGAEPSIPGVFSILDSYSGEELNSMKLDHSVVQIIPLTLKDSSEQQLHLFVDSDSNAHLYPKSPDALNVFLHEMSNLYFYSVDIQANVIKGYSLQKSCNLNVGDEYCFSTKELWFIIFPSDSERITISETRKMNEVVHTQAKISGDHDVMYKYLSKNLVFVATLSPKAAVDIGSALPEEASLVAYLIDAVTGRILHRVTHHGAQGPVHAVLSENWVVYHYFNLRAHRFEMAVIEIYDQSRAGNKDVTKLILGKHNLLAPITSYARPEVAVKSQSYFFTHSVKAMAVTQTAKGITSKQLLLGTIGDQVLALDKRYLDPRRSVNPTQQEKEEGIIPLTDSLPIIPQSFVTHSHQVEALRAIVSIPAKLESTIVFTYGVDLFYTQLAPSRTYDSLTDEFSYALLLITIAVLVAAIIGTWIWSEKKELRDKWR

SEQ ID NO: 185654 - protein, 170 aa, Zea Mays
MAAPPRRSLLVLLAGILVFGSLTTLATAIYEDQVGLADWHQKYIGKVKQAVYHSQKSGRRRVVVLTEENVISSLDLRSGDIFWRHVIDKNDPLDQLSLSLGKYVLTLSLGGTILRAWNLPDGHMIWETNLRISTASNPQLHVMFQLGDGFMLYQALMGQFYGKRSFLLMA

SEQ ID NO: 185655 - protein, 865 aa, Zea Mays
MIWETNLRISTASNPQLHVMSNNKVANDNLVLVSAGRWIYAVSSTDGAILWEKEFSLDGLEIKRILQSPENGIVYALGLAGSSKLALYHLSAKTGEILKDIQESLPGGLLGETVLVSDNVLVALDKARSSLLVIEFKGERISYNKVHVSDLVQDLSGSLELQSLSNGVISLQTSSSISLLKLKGTDGLEVLQRFDQPAAVSDSLTITEKEAAFAVVQHLGSEIEFIVKSTSDLSSEIIKEKLVIDQNRGNVEKVFLNSYIRTDRSHGFRALVVMEDHSLLLIQQGEVVWSREDGLASIVDVTTSELPVEKDGVSVADVEHNLFEWLKGHMLKLKGSLMLANADEVAAIQAMRLKSSEKNKMTRDHNGFRKLLVVLTKAGKVMALHTGDGRVIWSKLVPSLRASRCGGVPSALRIYQWQVPHHSVMRENPSVLVVGKFGAEPSIPGVFSILDSYSGEELNSMKLDHSVVQIIPLTLKDSSEQQLHLFVDSDSNAHLYPKSPDALNVFLHEMSNLYFYSVDIQANVIKGYSLQKSCNLNVGDEYCFSTKELWFIIFPSDSERITISETRKMNEVVHTQAKISGDHDVMYKYLSKNLVFVATLSPKAAVDIGSALPEEASLVAYLIDAVTGRILHRVTHHGAQGPVHAVLSENWVVYHYFNLRAHRFEMAVIEIYDQSRAGNKDVTKLILGKHNLLAPITSYARPEVAVKSQSYFFTHSVKAMAVTQTAKGITSKQLLLGTIGDQVLALDKRYLDPRRSVNPTQQEKEEGIIPLTDSLPIIPQSFVTHSHQVEALRAIVSIPAKLESTIVFTYGVDLFYTQLAPSRTYDSLTDEFSYALLLITIAVLVAAIIGTWIWSEKKELRDKWR

SEQ ID NO: 185656 - protein, 120 aa, Zea Mays
MSPPLDLDYIGLSPAAAAAAAHDDLKGTELRLGLPGSGSPDRRVVAATATTLDLLPAKGAKRGFSDEAPTPSPGAASGKGKKVAEEEDDKKVAATPQPVAKWWDGHQSEATARTRCLPPS

SEQ ID NO: 185657 - protein, 74 aa, Zea Mays
MLRPSRTRGSCTSRSAWMARRTSGRLTSRLTRTTRTCRLRLRRCSVASVLVSMGVMPYQARMAYLSTARMVNMF

SEQ ID NO: 185658 - protein, 227 aa, Zea Mays
MTPSLSILTPWRSRSWPRWRSSTTLALRRPYLLGNTSPHPKSELLASLASSVYLHCFRVIIIICTCVMTIAPRHSAGCLVAVDAYFEAPERVAALVLVAPAIFAPRKAVKEGQSGEEEGGQQAQRVPNDENSPPNLFARISGGFLELWKHVAGLVLKMITAIRDVVRSLCLKAVVAFLRSSLGVVLVRWVMDKFGILGVRNAWYDPSKVTDHVIQGYTKLCWNTPYP

SEQ ID NO: 185659 - protein, 56 aa, Zea Mays
MGFFWGFPAKEFFLLYNLKKVFFFWYGLGSIKGLLRLLVYHVAEKLVGREVFSRTL

SEQ ID NO: 185660 - protein, 713 aa, Zea Mays
MEAFGGFFVDEKAVRVENIFLEFLKRFKESDGAGEPFYEAEMEAMRSRESTTMYVDFAHVMRFNDVLQKAISEEYLRFEPYLWNACKRFVLEHRAGENRAPIISDDSPNKDINIAFYNIPMLKKLRELGTAEIGKLTAVMGVVTRTSEVRPELLQGTFKCLDCGNVVKNVEQQFKYTEPIICVNATCQNRTKWALLRQESKFTDWQRVRMQETSKEIPAGSLPRSLDVILRHEIVEKARAGDTVIFTGTVVAVPDVMALTSPGERAECRREAPQRKMGGVQEGVKGLKSLGVRDLSYRLAFVANSVQVADGRREGDIRDRDTDGDDSGRQKFTEEEEDEVVRMRNTPDFFNKIVDSICPTVFGHQEIKRAVLLMLLGGVHKITHEGINLRGDINVCIVGDPSCAKSQFLKYTAGIVPRSVYTSGKSSSAAGLTATVAKEPETGEFCIEAGALMLADNGICCIDEFDKMDIKDQVAIHEAMEQQTISITKAGIQATLNARTSILAAANPTGGRYDKSKPLKYNVALPPAILSRFDLVYIMIDEPDENTDYHIAHHIVRVHQKREEALAPAFSTAQLKRYISFAKSLKPQLSSEAKKVLVESYVTLRRGDSTPGTRVAYRMTVRQLEALIRLSEAIARSHLERVVLPAHVRLAVKLLKTSIISVESSEVDLSDFQDAEDGTNVPSENDAGQPAEEGAAPQQQDAGAFPENDQAAG

SEQ ID NO: 185661 - protein, 517 aa, Zea Mays
MQHARTEQNGPFSARKANSQIGRGSECRRHQKRYLLDHFLVPLMSFCGMRLLRRLELGTLPDVMALTSPGERAECRREAPQRKMGGVQEGVKGLKSLGVRDLSYRLAFVANSVQVADGRREGDIRDRDTDGDDSGRQKFTEEEEDEVVRMRNTPDFFNKIVDSICPTVFGHQEIKRAVLLMLLGGVHKITHEGINLRGDINVCIVGDPSCAKSQFLKYTAGIVPRSVYTSGKSSSAAGLTATVAKEPETGEFCIEAGALMLADNGICCIDEFDKMDIKDQVAIHEAMEQQTISITKAGIQATLNARTSILAAANPTGGRYDKSKPLKYNVALPPAILSRFDLVYIMIDEPDENTDYHIAHHIVRVHQKREEALAPAFSTAQLKRYISFAKSLKPQLSSEAKKVLVESYVTLRRGDSTPGTRVAYRMTVRQLEALIRLSEAIARSHLERVVLPAHVRLAVKLLKTSIISVESSEVDLSDFQDAEDGTNVPSENDAGQPAEEGAAPQQQDAGAFPGVKT

SEQ ID NO: 185662 - protein, 213 aa, Zea Mays
MKRWMLIVDLEEEEDEVVRMRNTPDFFNKIVDSICPTVFGHQEIKRAVLLMLLGGVHKITHEGINLRGDINVCIVGDPSCAKSQFLKYTAGIVPRSVYTSGKSSSAAGLTATVAKEPETGEFCIEAGALMLADNGICCIDEFDKMDIKDQVAIHEAMEQQTISITKAGIQATLNARTSILAAANPTGGRYDKSKPLKVPQVQRGIAPSYPFKI

SEQ ID NO: 185663 - protein, 646 aa, Zea Mays
MPRPLAALLSTACILSFFIALFPRAASSRDILPLGSSLVVESYESSTLQSSDGTFSSGFYEVYTHAFTFSVWYSKTEAAAANNKTIVWSANPDRPVHARRSALTLQKDGNMVLTDYDGAAVWRADGNNFTGVQRARLLDTGNLVIEDSGGYATRNPGNWTEGCMAIVNTTCDRYDKRSMRFVRLPNTDFWGSDQQHLLSVSLRTCRDICISDCTCKGFQYQEGTGSCYPKAYLFSGRTYPTSDVRTIYLKLPTGVSVSNALIPRSDVFDSVPRRLDCDRMNKSIREPFPDVHKTGGGESKWFYFYGFIAAFFVVEVSFISFAWFFVLKRELRPSELWASEKGYKAMTSNFRRYSYRELVKATRKFKVELGRGESGTVYKGVLEDDRHVAVKKLENVRQGKEVFQAELSVIGRINHMNLVRIWGFCSEGSHRLLVSEYVENGSLANILFSEGGNILLDWEGRFNIALGVAKGLAYLHHECLEWVIHCDVKPENILLDQAFEPKITDFGLVKLLNRGGSTQNVSHVRGTLGYIAPEWVSSLPITAKVDVYSYGVVLLELLTGTRVSELVGGTDEVHSMLRKLVRMLSAKLEGEEQSWIDGYLDSKLNRPVNYVQARTLIKLAVSCLEEDRSKRPTMEHAVQTLLSADD

SEQ ID NO: 185664 - protein, 500 aa, Zea Mays
MGHGYATRNPGNWTEGCMAIVNTTCDRYDKRSMRFVRLPNTDFWGSDQQHLLSVSLRTCRDICISDCTCKGFQYQEGTGSCYPKAYLFSGRTYPTSDVRTIYLKLPTGVSVSNALIPRSDVFDSVPRRLDCDRMNKSIREPFPDVHKTGGGESKWFYFYGFIAAFFVVEVSFISFAWFFVLKRELRPSELWASEKGYKAMTSNFRRYSYRELVKATRKFKVELGRGESGTVYKGVLEDDRHVAVKKLENVRQGKEVFQAELSVIGRINHMNLVRIWGFCSEGSHRLLVSEYVENGSLANILFSEGGNILLDWEGRFNIALGVAKGLAYLHHECLEWVIHCDVKPENILLDQAFEPKITDFGLVKLLNRGGSTQNVSHVRGTLGYIAPEWVSSLPITAKVDVYSYGVVLLELLTGTRVSELVGGTDEVHSMLRKLVRMLSAKLEGEEQSWIDGYLDSKLNRPVNYVQARTLIKLAVSCLEEDRSKRPTMEHAVQTLLSADD

SEQ ID NO: 185665 - protein, 89 aa, Zea Mays
MATGVAVIFDQLVLVVVLQVEASEFHGWPVRVLEVVIEHEASSLVHMVCLDLLVLPPRVVVVPPMVMVPIFQLQMPLAAKRTMMIPLHR

SEQ ID NO: 185666 - protein, 91 aa, Zea Mays
MTWMRILPVQLVEQERNEHATLVLQQSPMLKIMRGMWGTLQSNSATAKMVLQGKLRTESIKNAMNLVKKCGAPEGSVEHYMATKLFMKAEN

SEQ ID NO: 185667 - protein, 94 aa, Zea Mays
MKVMTWMRILPVQLVEQERNEHATLVLQQSPMLKIMRGMWGTLQSNSATAKMVLQGKLRTESIKNAMNLVKKCGAPEGSVEHYMATKLFMKAEN

SEQ ID NO: 185668 - protein, 674 aa, Zea Mays
MEFDFDSHGGDAWLLDAMSTSLHFSAVSPPVPSPWPCGDPHHPSMWLDTVALQDDGPSVPAEKSEISKKCEHLNGKCQVHLSLVDGCSDSSYFLKEKLTVALMYFKESTKQHLLVQVWVPIRKGDHYMLSTSGQPFVLDEQSIGLLDYRAVSMMYTFAVDGDSVEELGLPGRVYKQRLPEWTPDVQYYSSIEYARLNHAISYDVHGTVALPVFDSSMKSCIAVVELIMTSKKVNYAREVGEVSKALEAVNLKSTEVIEHPYVQIFNEGHQNVLVEMLEIITVICEELKLPIAQTWVPCKYQNLLIHCGGENKSCFDIHESCAQELCMSTSAVMFHIIDAHMWGFRDACVEHHLKKGQGVSGKAFILRRPCFTKDVTRFSKMEYPLVHYARMFGLAGCFSICLQSAYNRNEDYVLEFFLPPDCREDGEQKVLLDSILALLRQYLNRLQVATDEGSNEVYLQVDAITIIENGDIKNAHVQHMNCEGGIHASDERNMHVIHESDSQKRISPTESETCPSPDNTKCNDKLFARQNGGCISDSLLLENNSKHSGRRQGKEEKTFSLEVIQQYFTGSLKNAAKSLGVCPTTMKRICRQHGISRWPSRQISKVNRTVSKLKKVIESVEGHEGAFTLTSVTGPLPVAFGPSNPISIKNQSQINVSGLPIPSVQENRDSSSQN

SEQ ID NO: 185669 - protein, 571 aa, Zea Mays
MAATLGCSTPCPRRSTFRPFRPRCRRRGRAATRIILPCGWTRLPCKTTARASPPEKLTVALMYFKESTKQHLLVQVWVPIRKGDHYMLSTSGQPFVLDEQSIGLLDYRAVSMMYTFAVDGDSVEELGLPGRVYKQRLPEWTPDVQYYSSIEYARLNHAISYDVHGTVALPVFDSSMKSCIAVVELIMTSKKVNYAREVGEVSKALEAVNLKSTEVIEHPYVQIFNEGHQNVLVEMLEIITVICEELKLPIAQTWVPCKYQNLLIHCGGENKSCFDIHESCAQELCMSTSAVMFHIIDAHMWGFRDACVEHHLKKGQGVSGKAFILRRPCFTKDVTRFSKMEYPLVHYARMFGLAGCFSICLQSAYNRNEDYVLEFFLPPDCREDGEQKVLLDSILALLRQYLNRLQVATDEGSNEVYLQVDAITIIENGDIKNAHVQHMNCEGGIHASDERNMHVIHESDSQKRISPTESETCPSPDNTKCNDKLFARQNGGCISDSLLLENNSKHSGRRQGKEEKTFSLEVIQQYFTGSLKNAAKSLGVCPTTMKRICRQHGISRWPSRQISKYKEPKPN

SEQ ID NO: 185670 - protein, 890 aa, Zea Mays
MAATLGCSTPCPRRSTFRPFRPRCRRRGRAATRIILPCGWTRLPCKTTARASPPVHLSLVDGCSDSSYFLKEKLTVALMYFKESTKQHLLVQVWVPIRKGDHYMLSTSGQPFVLDEQSIGLLDYRAVSMMYTFAVDGDSVEELGLPGRVYKQRLPEWTPDVQYYSSIEYARLNHAISYDVHGTVALPVFDSSMKSCIAVVELIMTSKKVNYAREVGEVSKALEAVNLKSTEVIEHPYVQIFNEGHQNVLVEMLEIITVICEELKLPIAQTWVPCKYQNLLIHCGGENKSCFDIHESCAQELCMSTSAVMFHIIDAHMWGFRDACVEHHLKKGQGVSGKAFILRRPCFTKDVTRFSKMEYPLVHYARMFGLAGCFSICLQSAYNRNEDYVLEFFLPPDCREDGEQKVLLDSILALLRQYLNRLQVATDEGSNEVYLQVDAITIIENGDIKNAHVQHMNCEGGIHASDERNMHVIHESDSQKRISPTESETCPSPDNTKCNDKLFARQNGGCISDSLLLENNSKHSGRRQGKEEKTFSLEVIQQYFTGSLKNAAKSLGVCPTTMKRICRQHGISRWPSRQISKVNRTVSKLKKVIESVEGHEGAFTLTSVTGPLPVAFGPSNPISIKNQSQINVSGLPIPSVQENRDSSSQSKLLENDIHRSTLVPQKSFLANINRQIEAEKASNSRNSSKDCRTHSGRSEESYPVSPANMTFVSTLLEPQQNMYIQDGFTKESFQKEDLRFHGMFVNGSGSLKDCMNHITSAVNGTIIGHPGSLTTAQNSGIITCPGSLISAQNSRIVTVKARYKEDLLRFRFPCSGSFITLKDEVAKRIQMDGVLFDIKYLDDDHEWVKLTCDTDLEECMEISRASGSNVLRLLVTDIAPVLGSSCGSTG

SEQ ID NO: 185671 - protein, 247 aa, Zea Mays
MLLIRLCQNGHTLCSTCKARVHNRCPTCRQELGDIRCLALEKVAESLELPCKYCSLGCPEIFPYYSKIKHEAQCSFRPYTCPYAGSECAVAGDIPFLVAHLRDDHKVDMHSGCTFNHRYVKSNPREVENATWMLTYFCLHFEAFQLGMAPVYMAFLRFMGDENDARNYTYSLEVGGNGRKMVWEGTPRSIRDSHRKVRDSHDGLIIQRNMALFFSGGDRKELKLRVTGRIWKEQTNPDGACIPNLCS

SEQ ID NO: 185672 - protein, 103 aa, Zea Mays
MHSGCTFNHRYVKSNPREVENATWMLTVFHCFGQYFCLHFEAFQLGMAPVYMAFLRFMGDENDARNYTYSLEVGGNGRKMVWEAEGDWADLEGADQPGRGLHS

SEQ ID NO: 185673 - protein, 119 aa, Zea Mays
MVICLTHQPTCHECEDNTPCPPLTHYIFCYILRFLTLVAYRLDSPTCPVCPQGFCGDFKQTLTPSGLDWKMDCGLPYNPWGHAVHDMATESRWMPDEKKLASAATEKFEEEDNTSYCQQ

SEQ ID NO: 185674 - protein, 161 aa, Zea Mays
MVSRLPSGFERTSLLNLISYSLFRIKNNRFGQLAASIQNRSFVHLATCTYSRYALSDKHKYYLYSMHLQVFPLTPQILFQPLYLISISSCAQLLTTHQKGNSYLYTSQILPTCKMFAYTHNIYSTYNETNIKKSKCYIQKMYSPFVFANSNEHILPLFTAL

SEQ ID NO: 185675 - protein, 100 aa, Zea Mays
MQDMYFHGKWTLHNMRCYLLRMLNNMNQSKSLIKHPAMRILQYTFMFRASLGTLFFQGITIFPRENELIFFAKMRIPWKNGVPKLALIEHLLLGTVIKFQ

SEQ ID NO: 185676 - protein, 389 aa, Zea Mays
MGGKCSFEKKITFFRYSMEELNTLVAALEGDLAAVCCWVQDHLGLVCQSGSLKHSKMDSCKSTEFSGLAIDANHVSVFGGIQNQCHDLQKPAGFQQEKGIQDNCLNLNIEDPPCSSRIKEEHGKDRMFLDHRPLQKTDSPFRMSSECSSSLSLYCSGNLVSPSRNQASNSGLACNTTKKLFGVDIGNLAKHSNGQVGQMVMASGQSDASSRPMSGHQVEPLDYGMVMIDKRWFNNQAIFPKGFRSRVTFYNIQDPTAWCFYVSEVLDAGPLGPLFKVTLEQVPDVSFTHTSPMSCWDSVRDKVNEEIENLQGIGKCGVPNFLPPDSVNGLEMFGFLSPQIVQEIEALDPHHQCLDYWLSKSAVVPASMRTLEKLPKKAKLPDGQKLSSI

SEQ ID NO: 185677 - protein, 684 aa, Zea Mays
MTHRRPTSSADSEEKFGFQSGSDFTFEEFQKYADEFKQEYFGMKTSDEISICEIKNHIKTWEPSVEEIEGEYWRIVIGPADEVEVDYGADLDTATFGSGFVKLSSSDGNKQDPYGVSCWNLNNLPRLPGSVISFEEDDISGVVVPWLYVGMCFSSFCWHVEDHFLYSLNYMHFGEPKVWYGVPGGEAVKLEESMRKNLPKLFEEQPDLLHELVTQLSPSVLKAEGVSVYRAVQKSGEFVLTLPRAYHSGFNCGFNCAEAVNVAPVDWLPHGQCAVELYRDQHRKTSISHDKLLLKAAKEAIRQLWMNVLNCRSGKGEYRWLNTCGKDGVLTSAIKTRVKMEVAAWEANVPLKSKKMDKDYDSNDRECFSCFYDLHLSAVSCQCTPDRFACLNHTNLLCSCGMDRKITFFRYSMEELNTLVAALEGDLAAVCCWVQDHLGLVCQSGSLKHSKMDSCKSTEFSGLAIDANHVSVFGGIQNQCHDLQKPAGFQQEKGIQDNCLNLNIEDPPCSSRIKEEHGKDRMFLDHRPLQKTDSPFRMSSECSSSLSLYCSGNLVSPSRNQASNSGLACNTTKKLFGVDIGNLAKHSNGQVGQMVMASGQSDASSRPMSGHQVEPLDYGMVMIDKRWFNNQAIFPKGFRSRVTFYNIQDPTAWCFYVSEVLDAGPLGPLFKSKFLMSLSLIPHR

SEQ ID NO: 185678 - protein, 781 aa, Zea Mays
MTHRRPTSSADSEEKFGFQSGSDFTFEEFQKYADEFKQEYFGMKTSDEISICEIKNHIKTWEPSVEEIEGEYWRIVIGPADEVEVDYGADLDTATFGSGFVKLSSSDGNKQDPYGVSCWNLNNLPRLPGSVISFEEDDISGVVVPWLYVGMCFSSFCWHVEDHFLYSLNYMHFGEPKVWYGVPGGEAVKLEESMRKNLPKLFEEQPDLLHELLSPSVLKAEGVSVYRAVQKSGEFVLTLPRAYHSGFNCGFNCAEAVNVAPVDWLPHGQCAVELYRDQHRKTSISHDKLLLKAAKEAIRQLWMNVLNCRSGKGEYRWLNTCGKDGVLTSAIKTRVKMEVAAWEANVPLKSKKMDKDYDSNDRECFSCFYDLHLSAVSCQCTPDRFACLNHTNLLCSCGMDRKITFFRYSMEELNTLVAALEGDLAAVCCWVQDHLGLVCQSGSLKHSKMDSCKSTEFSGLAIDANHVSVFGGIQNQCHDLQKPAGFQQEKGIQDNCLNLNIEDPPCSSRIKEEHGKDRMFLDHRPLQKTDSPFRMSSECSSSLSLYCSGNLVSPSRNQASNSGLACNTTKKLFGVDIGNLAKHSNGQVGQMVMASGQSDASSRPMSGHQVEPLDYGMVMIDKRWFNNQAIFPKGFRSRVTFYNIQDPTAWCFYVSEVLDAGPLGPLFKVTLEQVPDVSFTHTSPMSCWDSVRDKVNEEIENLQGIGKCGVPNFLPPDSVNGLEMFGFLSPQIVQEIEALDPHHQCLDYWLSKSAVVPASMRTLEKLPKKAKLPDGQKLSSI

SEQ ID NO: 185679 - protein, 497 aa, Zea Mays
MLACSSSKPHRPVKALGAQFSPALPSAASLQPQQHVHFTCPFLPPFPLPPRHLRSPPPAAPAMAMTEGLVPITRTYLARYYDKYPLPPLPDATTDLAARLRALSADLAAVAPIAPDEELLEQEAAGIPAHKIDENLWKNREQMEEILFLINTSHRPVALQQKSTPEDAEIVCTLDDIEAKLKDMLKNLEQFQLKNADNVFNTVMTYMPQDFRGTLIRQQRERSERNKQAEVDALVSAGGSIHDRYALLWKQQMERRVQLAQLGSATGVYKTLVRYLVGVPQVLLDFIRQINDDNGPMEEQRERYGPALYTLTKLVLAIRLYLHVSLARYGQRKIEKDDAAVLQQAVVIYTKEFLKFTEFIGEVFVNAPFFISAEDAGAVDASDEYKETIIPAGKTHEVILSVEAVNSYIAWDFSLQQGALNMDIGFHVEYISPSGEKTLILPYRRYEADQGNFCTVSSGSYKLVWDNSYSSFFKKVLRYKVDAVPPVVEPALSATEL

SEQ ID NO: 185680 - protein, 501 aa, Zea Mays
MLACSSSKPHRPVKALGAQFSPALPSAASLQPQQHVHFTCPFLPPFPLPPRHLRSPPPAAPAMAMTEGLVPITRTYLARYYDKYPLPPLPDATTDLAARLRALSADLAAVAPIAPDEELLEQEAAGIPAHKIDENLWKNREQMEEILFLINTSHRPVALQQKSTPEDAEIVCTLDDIEAKLKDMLKNLEQFQLKNADNVFNTVMTYMPQDFRGTLIRQQRERSERNKQAEVDALVSAGGSIHDRYALLWKQQMERRVQLAQLGSATGVYKTLVRYLVGVPQVLLDFIRQINDDNGPMEEQRERYGPALYTLTKLVLAIRLYLHVSLARYGQRKIEKDDAAVLQQAVVIYTKEFLKFTEFIGEVFVNAPFFISAEDAGAVDARKSDEYKETIIPAGKTHEVILSVEAVNSYIAWDFSLQQGALNMVLDIGFHVEYISPSGEKTLILPYRRYEADQGNFCTVSSGSYKLVWDNSYSSFFKKVLRYKVDAVPPVVEPALSATEL

SEQ ID NO: 185681 - protein, 244 aa, Zea Mays
MLACSSSKPHRPVKALGAQFSPALPSAASLQPQQHVHFTCPFLPPFPLPPRHLRSPPPAAPAMAMTEGLVPITRTYLARYYDKYPLPPLPDATTDLAARLRALSADLAAVAPIAPDEELLEQEAAGIPAHKIDENLWKNREQMEEILFLINTSHRPVALQQKSTPEDAEIVCTLDDIEAKLKDMLKNLEQFQLKNADNVFNTVMTYMPQDFRGTLIRQQRERSERNKQAEEGAISTAWFCNRCI

SEQ ID NO: 185682 - protein, 416 aa, Zea Mays
MLACSSSKPHRPVKALGAQFSPALPSAASLQPQQHVHFTCPFLPPFPLPPRHLRSPPPAAPAMAMTEGLVPITRTYLARYYDKYPLPPLPDATTDLAARLRALSADLAAVAPIAPDEELLEQEAAGIPAHKIDENLWKNREQMEEILFLINTSHRPVALQQKSTPEDAEIVCTLDDIEAKLKDMLKNLEQFQLKNADNVFNTVMTYMPQDFRGTLIRQQRERSERNKQAEVDALVSAGGSIHDRYALLWKQQMERRVQLAQLGSATGVYKTLVRYLVGVPQVLLDFIRQINDDNGPMEEQRERYGPALYTLTKLVLAIRLYLHVSLARYGQRKIEVFVNAPFFISAEDAGAVDARKSDEYKETIIPAGKTHEVILSVEAVNSYIAWDFSLQQGALNMDIGFHVEYISPSGEKTSGV

SEQ ID NO: 185683 - protein, 410 aa, Zea Mays
MAMTEGLVPITRTYLARYYDKYPLPPLPDATTDLAARLRALSADLAAVAPIAPDEELLEQEAAGIPAHKIDENLWKNREQMEEILFLINTSHRPVALQQKSTPEDAEIVCTLDDIEAKLKDMLKNLEQFQLKNADNVFNTVMTYMPQDFRGTLIRQQRERSERNKQAEVDALVSAGGSIHDRYALLWKQQMERRVQLAQLGSATGVYKTLVRYLVGVPQVLLDFIRQINDDNGPMEEQRERYGPALYTLTKLVLAIRLYLHVSLARYGQRKIEVFVNAPFFISAEDAGAVDARKSDEYKETIIPAGKTHEVILSVEAVNSYIAWDFSLQQGALNMDIGFHVEYISPSGEKTLILPYRRYEADQGNFCTVSSGSYKLVWDNSYSSFFKKVLRYKVDAVPPVVEPALSATEL

SEQ ID NO: 185684 - protein, 365 aa, Zea Mays
MAMTEGLVPITRTYLARYYDKYPLPPLPDATTDLAARLRALSADLAAVAPIAPDEELLEQEAAGIPAHKIDENLWKNREQMEEILFLINTSHRPVALQQKSTPEDAEIVCTLDDIEAKLKDMLKNLEQFQLKNADNVFNTVMTYMPQDFRGTLIRQQRERSERNKQAEVLLDFIRQINDDNGPMEEQRERYGPALYTLTKLVLAIRLYLHVSLARYGQRKIEKDDAAVLQQAVVIYTKEFLKFTEFIGKSDEYKETIIPAGKTHEVILSVEAVNSYIAWDFSLQQGALNMDIGFHVEYISPSGEKTLILPYRRYEADQGNFCTVSSGSYKLVWDNSYSSFFKKVLRYKVDAVPPVVEPALSATEL

SEQ ID NO: 185685 - protein, 400 aa, Zea Mays
MAMTEGLVPITRTYLARYYDKYPLPPLPDATTDLAARLRALSADLAAVAPIAPDEELLEQEAAGIPAHKIDENLWKNREQMEEILFLINTSHRPVALQQKSTPEDAEIVCTLDDIEAKLKDMLKNLEQFQLKNADNVFNTVMTYMPQDFRGTLIRQQRERSERNKQAEVDALVSAGGSIHDRYALLWKQQMERRVQLAQLGSATGVYKTLVRYLVGVPQVLLDFIRQINDDNGPMEEQRERYGPALYTLTKLVLAIRLYLHVSLARYGQRKIEKDDAAVLQQAVVIYTKEFLKFTEFIGEVFVNAPFFISAEDAGAVDARKSDEYKETIIPAGKTHEVILSVEAVNSYIAWDFSLQQGALNMVLDIGFHVEYISPSGEKTLILPYRRYEADQRWALQWRR

SEQ ID NO: 185686 - protein, 247 aa, Zea Mays
MLWRVQLAQLGSATGVYKTLVRYLVGVPQVLLDFIRQINDDNGPMEEQRERYGPALYTLTKLVLAIRLYLHVSLARYGQRKIEKDDAAVLQQAVVIYTKEFLKFTEFIGEVFVNAPFFISAEDAGAVDARKSDEYKETIIPAGKTHEVILSVEAVNSYIAWDFSLQQGALNMDIGFHVEYISPSGEKTLILPYRRYEADQGNFCTVSSGSYKLVWDNSYSSFFKKVLRYKVDAVPPVVEPALSATEL

SEQ ID NO: 185687 - protein, 400 aa, Zea Mays
MAMTEGLVPITRTYLARYYDKYPLPPLPDATTDLAARLRALSADLAAVAPIAPDEELLEQEAAGIPAHKIDENLWKNREQMEEILFLINTSHRPVALQQKSTPEDAEIVCTLDDIEAKLKDMLKNLEQFQLKNADNVFNTVMTYMPQDFRGTLIRQQRERSERNKQAEVDALVSAGGSIHDRYALLWKQQMERRVQLAQLGSATGVYKTLVRYLVGVPQVLLDFIRQINDDNGEKDDAAVLQQAVVIYTKEFLKFTEFIGEVFVNAPFFISAEDAGAVDARKSDEYKETIIPAGKTHEVILSVEAVNSYIAWDFSLQQGALNMVLDIGFHVEYISPSGEKTLILPYRRYEADQGNFCTVSSGSYKLVWDNSYSSFFKKVLRYKVDAVPPVVEPALSATEL

SEQ ID NO: 185688 - protein, 332 aa, Zea Mays
MEEILFLINTSHRPVALQQKSTPEDAEIVCTLDDIEAKLKDMLKNLEQFQLKNADNVFNTVMTYMPQDFRGTLIRQQRERSERNKQAEVDALVSAGGSIHDRYALLWKQQMERRVQLAQLGSATGVYKTLVRYLVGVPQVLLDFIRQINDDNGPMEEQRERYGPALYTLTKLVLAIRLYLHVSLARYGQRKIEVFVNAPFFISAEDAGAVDARKSDEYKETIIPAGKTHEVILSVEAVNSYIAWDFSLQQGALNMVLDIGFHVEYISPSGEKTLILPYRRYEADQGNFCTVSSGSYKLVWDNSYSSFFKKVLRYKVDAVPPVVEPALSATEL

SEQ ID NO: 185689 - protein, 76 aa, Zea Mays
MDIGFHVEYISPSGEKTLILPYRRYEADQGNFCTVSSGSYKLVWDNSYSSFFKKVLRYKVDAVPPVVEPALSATEL

SEQ ID NO: 185690 - protein, 90 aa, Zea Mays
MLWIPKKVYPKEWPKKSWWGLLHIVSYKPNRQQTKHTNGSSKEIDIHHAEVNIQIEKDLDHLNNRISVATKTSISLLPSEISNFFKKEDT

SEQ ID NO: 185691 - protein, 363 aa, Zea Mays
MSSWSPAAAAAAAVAKAAKPLHRSVSSTPVSPHLSMSSSHRTPPLAMAAGGSGAVAPSSLLVADQGHRESVLLAARASMGNCLGETRLDLSVSGLRLAAKGKVLNETSLWWFNQTRHITPNAVVSSPDKNVTIAKRCTVFPVEFVVRGFVTGSTDTSLWTVYNKGVRNYCGNVLPDGMVKNEKLSSNILTPTTKAADHDVPVTPDEIIESGLMSKEDFHEAGSKALSLFAYGQKVALENGLILVDTKYEFGKTPDGTIVLIDEVHTPDSSRYWIANSYEDRFKSGLEPENVDKEFLRLWFKNNCNPYEDAVLPEAPEELVCELAWRYIFLFETITKTKFEILEAQEPIHERISRNVAQALRDL

SEQ ID NO: 185692 - protein, 324 aa, Zea Mays
MSSWSPAAAAAAAVAKAAKPLHRSVSSTPVRDVYESGQHLVLVTTDRQSAFDRVLASIPFKGQVLNETSLWWFNQTRHITPNAVVSSPDKNVTIAKRCTVFPVEFVVRGFVTGSTDTSLWTVYNKGVRNYCGNVLPDGMVKNEKLSSNILTPTTKAADHDVPVTPDEIIESGLMSKEDFHEAGSKALSLFAYGQKVALENGLILVDTKYEFGKTPDGTIVLIDEVHTPDSSRYWIANSYEDRFKSGLEPENVDKEFLRLWFKNNCNPYEDAVLPEAPEELVCELAWRYIFLFETITKTKFEILEAQEPIHERISRNVAQALRDL

SEQ ID NO: 185693 - protein, 391 aa, Zea Mays
MSSWSPAAAAAAAVAKAAKPLHRSVSSTPVSPHLSMSSSHRTPPLAMAAGGSGAVAPSSLLVADQGHRESVLLAARASMGNCLGETRLDLSVSGLRLAAKGKVRDVYESGQHLVLVTTDRQSAFDRVLASIPFKGQVLNETSLWWFNQTRHITPNAVVSSPDKNVTIAKRCTVFPVEFVGSTDTSLWTVYNKGVRNYCGNVLPDGMVKNEKLSSNILTPTTKAADHDVPVTPDEIIESGLMSKEDFHEAGSKALSLFAYGQKVALENGLILVDTKYEFGKTPDGTIVLIDEVHTPDSSRYWIANSYEDRFKSGLEPENVDKEFLRLWFKNNCNPYEDAVLPEAPEELVCELAWRYIFLFETITKTKFEILEAQEPIHERISRNVAQALRDL

SEQ ID NO: 185694 - protein, 62 aa, Zea Mays
MTRPSTVQAMLRSICSCAVSGERDGWTHLALMMMPRDERHARPGLTHSPTSRRRGARQCSWS

SEQ ID NO: 185695 - protein, 99 aa, Zea Mays
MAQIHIDSDIPTVLAPPLRASSVLPLCHPVTLPRSLASAAKFKTSQAERRPEKPRPYFPILLIKLALVEKSLPFWPAQFEIPEDHGGGRIGVAARFGRR

SEQ ID NO: 185696 - protein, 700 aa, Zea Mays
MELSQSSFAKGSCSQEEQNDVTLGSHLHVHESLCPDGSTNDGNGASGLPDIHHRLCTSDMDQDKHLQEGMDLDKHLQHEFSQGTDLHLDVDEVPNNFVIKGSQSSNELAVQFHDTEIMNSSKNDGVSLVPHAITPCVPILPSVSGCVHNINVIYEMGIKNDNCFQSEKCQDISIQSGAYSSEAAGSFLAPLYPLQTSEPAIMMGGPVYYQSSVMSLPPGFISSDGASNASGVKSETSYYPVSRQNLEIKTCHNASGDPEQNSYISSEDDRNKTSEPMGRISESEKKQQVDVEQSCLEPAACIGKEALSSHGDTILSKKEDAGALCYEPPCFRSFEFPFVSCELVNSSDLPEYSPLGIRELMRTSLNFPTPVRLWGSPTRDGSPDAVLKNAAKRFMCTPSIMKKRHRDLLSPVSDIRTDKKPNTERDFMSSGISSTRVGKSCMDSADDSADLVSPKESAFQKKLKLCHENKENLNEIADQGENEANAKHSSGILTPSSVDNHNTHKHGPNFRIQELNTTVQALSNSKDIIFSRSKPSEHVEKSAACIDADYEYLNILADTPGIKRGLESPSAWKSPVFTPFQDAYFMSPASRAFDALGLVKQINEQSASAVEEAHEVLANGSPWKQHNKENSDKENIENTALKHEHVTSKPPSILMVEARVLDFNECSTPVRKKDDKKVEIVLGGPATSPVTSSHLWINMR

SEQ ID NO: 185697 - protein, 686 aa, Zea Mays
MAVAPVVRQQSLTEGLISCRTDVQCLHRWQKVLNPELVKGPWSKEEDEIITQMVNKLGPKKWSTIAQALPGRIGKQCRERWHNHLNPGINKDAWTQDEEIRLIHAHQTYGNKWAELTKFLPGRTDNAIKNHWHSSVKKKVDSYRSSGLLAQSQGFTPVEYTAGGLNVDSSSAITNQISEGSGFNVFREAEDSMELSQSSFAKGSCSQEEQNDVTLGSHLHVHESLCPDGSTNDGNGASGLPDIHHRLCTSDMDQDKHLQEGMDLDKHLQHEFSQGTDLHLDVDEVPNNFVIKGSQSSNELAVQFHDTEIMNSSKNDGVSLVPHAITPCVPILPSVSGCVHNINVIYEMGIKNDNCFQSEKCQDISIQSGAYSSEAAGSFLAPLYPLQTSEPAIMMGGPVYYQSSVMSLPPGFISSDGASNASGVKSETSYYPVSRQNLEIKTCHNASGDPEQNSYISSEDDRNKTSEPMGRISESEKKQQVDVEQSCLEPAACIGKEALSSHGDTILSKKEDAGALCYEPPCFRSFEFPFVSCELVNSSDLPEYSPLGIRELMRTSLNFPTPVRLWGSPTRDGSPDAVLKNAAKRFMCTPSIMKKRHRDLLSPVSDIRTDKKPNTERDFMSSGISSTRVGKSCMDSADDSADLVSPKESAFQKKLKLCHENKENLNEIADQGENEANAKIKAIRTC

SEQ ID NO: 185698 - protein, 866 aa, Zea Mays
MAVAPVVRQQSLTEGLISCRTDVQCLHRWQKVLNPELVKGPWSKEITTDVKHFDVTSSFRWHNHLNPGINKDAWTQDEEIRLIHAHQTYGNKWAELTKFLPGRTDNAIKNHWHSSVKKKVDSYRSSGLLAQSQGFTPVEYTAGGLNVDSSSAITNQISEGSGFNVFREAEDSMELSQSSFAKGSCSQEEQNDVTLGSHLHVHESLCPDGSTNDGNGASGLPDIHHRLCTSDMDQDKHLQEGMDLDKHLQHEFSQGTDLHLDVDEVPNNFVIKGSQSSNELAVQFHDTEIMNSSKNDGVSLVPHAITPCVPILPSVSGCVHNINVIYEMGIKNDNCFQSEKCQDISIQSGAYSSEAAGSFLAPLYPLQTSEPAIMMGGPVYYQSSVMSLPPGFISSDGASNASGVKSETSYYPVSRQNLEIKTCHNASGDPEQNSYISSEDDRNKTSEPMGRISESEKKQQVDVEQSCLEPAACIGKEALSSHGDTILSKKEDAGALCYEPPCFRSFEFPFVSCELVNSSDLPEYSPLGIRELMRTSLNFPTPVRLWGSPTRDGSPDAVLKNAAKRFMCTPSIMKKRHRDLLSPVSDIRTDKKPNTERDFMSSGISSTRVGKSCMDSADDSADLVSPKESAFQKKLKLCHENKENLNEIADQGENEANAKHSSGILTPSSVDNHNTHKHGPNFRIQELNTTVQALSNSKDIIFSRSKPSEHVEKSAACIDADYEYLNILADTPGIKRGLESPSAWKSPVFTPFQDAYFMSPASRAFDALGLVKQINEQSASAVEEAHEVLANGSPWKQHNKENSDKENIENTALKHEHVTSKPPSILMVATSPGAGCKSPWAACRCRADAPFPSPYRHAGVTTVRWD

SEQ ID NO: 185699 - protein, 840 aa, Zea Mays
MAVAPVVRQQSLTEGLISCRTDVQCLHRWQKVLNPELVKGPWSKEITTDVKHFDVTSSFRWHNHLNPGINKDAWTQDEEIRLIHAHQTYGNKWAELTKFLPGRTDNAIKNHWHSSVKKKVDSYRSSGLLAQSQGFTPVEYTAGGLNVDSSSAITNQISEGSGFNVFREAEDSMELSQSSFAKGSCSQEEQNDVTLGSHLHVHESLCPDGSTNDGNGASGLPDIHHRLCTSDMDQDKHLQEGMDLDKHLQHEFSQGTDLHLDVDEVPNNFVIKGSQSSNELAVQFHDTEIMNSSKNDGVSLVPHAITPCVPILPSVSGCVHNINVIYEMGIKNDNCFQSEKCQDISIQSGAYSSEAAGSFLAPLYPLQTSEPAIMMGGPVYYQSSVMSLPPGFISSDGASNASGVKSETSYYPVSRQNLEIKTCHNASGDPEQNSYISSEDDRNKTSEPMGRISESEKKQQVDVEQSCLEPAACIGKEALSSHGDTILSKKEDAGALCYEPPCFRSFEFPFVSCELVNSSDLPEYSPLGIRELMRTSLNFPTPVRLWGSPTRDGSPDAVLKNAAKRFMCTPSIMKKRHRDLLSPVSDIRTDKKPNTERDFMSSGISSTRVGKSCMDSADDSADLVSPKESAFQKKLKLCHENKENLNEIADQGENEANAKHSSGILTPSSVDNHNTHKHGPNFRIQELNTTVQALSNSKDIIFSRSKPSEHVEKSAACIDADYEYLNILADTPGIKRGLESPSAWKSPVFTPFQDAYFMSPASRAFDALGLVKQINEQSASAVEEAHEVLANGSPWKQHNKENSDKENIENTALKHEHVTSKPPSILMDDEAEEQDDEAEE

SEQ ID NO: 185700 - protein, 683 aa, Zea Mays
MAVAPVVRQQSLTEGLISCRTDVQCLHRWQKVLNPELVKGPWSKEITTDVKHFDVTSSFRWHNHLNPGINKDAWTQDEEIRLIHAHQTYGNKWAELTKFLPGRTDNAIKNHWHSSVKKKVDSYRSSGLLAQSQGFTPVEYTAGGLNVDSSSAITNQISEGSGFNVFREAEDSMELSQSSFAKGSCSQEEQNDVTLGSHLHVHESLCPDGSTNDGNGASGLPDIHHRLCTSDMDQDKHLQEGMDLDKHLQHEFSQGTDLHLDVDEVPNNFVIKGSQSSNELAVQFHDTEIMNSSKNDGVSLVPHAITPCVPILPSVSGCVHNINVIYEMGIKNDNCFQSEKCQDISIQSGAYSSEAAGSFLAPLYPLQTSEPAIMMGGPVYYQSSVMSLPPGFISSDGASNASGVKSETSYYPVSRQNLEIKTCHNASGDPEQNSYISSEDDRNKTSEPMGRISESEKKQQVDVEQSCLEPAACIGKEALSSHGDTILSKKEDAGALCYEPPCFRSFEFPFVSCELVNSSDLPEYSPLGIRELMRTSLNFPTPVRLWGSPTRDGSPDAVLKNAAKRFMCTPSIMKKRHRDLLSPVSDIRTDKKPNTERDFMSSGISSTRVGKSCMDSADDSADLVSPKESAFQKKLKLCHENKENLNEIADQGENEANAKGFLLRAVLTTIIHISMVQIFEFRS

SEQ ID NO: 185701 - protein, 672 aa, Zea Mays
MELSQSSFAKGSCSQEEQNDVTLGSHLHVHESLCPDGSTNDGNGASGLPDIHHRLCTSDMDQDKHLQEGMDLDKHLQHEFSQGTDLHLDVDEVPNNFVIKGSQSSNELAVQFHDTEIMNSSKNDGVSLVPHAITPCVPILPSVSGCVHNINVIYEMGIKNDNCFQSEKCQDISIQSGAYSSEAAGSFLAPLYPLQTSEPAIMMGGPVYYQSSVMSLPPGFISSDGASNASGVKSETSYYPVSRQNLEIKTCHNASGDPEQNSYISSEDDRNKTSEPMGRISESEKKQQVDVEQSCLEPAACIGKEALSSHGDTILSKKEDAGALCYEPPCFRSFEFPFVSCELVNSSDLPEYSPLGIRELMRTSLNFPTPVRLWGSPTRDGSPDAVLKNAAKRFMCTPSIMKKRHRDLLSPVSDIRTDKKPNTERDFMSSGISSTRVGKSCMDSADDSADLVSPKESAFQKKLKLCHENKENLNEIADQGENEANAKHSSGILTPSSVDNHNTHKHGPNFRIQELNTTVQALSNSKDIIFSRSKPSEHVEKSAACIDADYEYLNILADTPGIKRGLESPSAWKSPVFTPFQDAYFMSPASRAFDALGLVKQINEQSASAVEEAHEVLANGSPWKQHNKENSDKENIENTALKHEHVTSKPPSILMPSSSLRLLEISNKDYGC

SEQ ID NO: 185702 - protein, 812 aa, Zea Mays
MVNKLGPKKWSTIAQALPGRIGKQCRERWHNHLNPGINKDAWTQDEEIRLIHAHQTYGNKWAELTKFLPGRTDNAIKNHWHSSVKKKVDSYRSSGLLAQSQGFTPVEYTAGGLNVDSSSAITNQISEGSGFNVFREAEDSMELSQSSFAKGSCSQEEQNDVTLGSHLHVHESLCPDGSTNDGNGASGLPDIHHRLCTSDMDQDKHLQEGMDLDKHLQHEFSQGTDLHLDVDEVPNNFVIKGSQSSNELAVQFHDTEIMNSSKNDGVSLVPHAITPCVPILPSVSGCVHNINVIYEMGIKNDNCFQSEKCQDISIQSGAYSSEAAGSFLAPLYPLQTSEPAIMMGGPVYYQSSVMSLPPGFISSDGASNASGVKSETSYYPVSRQNLEIKTCHNASGDPEQNSYISSEDDRNKTSEPMGRISESEKKQQVDVEQSCLEPAACIGKEALSSHGDTILSKKEDAGALCYEPPCFRSFEFPFVSCELVNSSDLPEYSPLGIRELMRTSLNFPTPVRLWGSPTRDGSPDAVLKNAAKRFMCTPSIMKKRHRDLLSPVSDIRTDKKPNTERDFMSSGISSTRVGKSCMDSADDSADLVSPKESAFQKKLKLCHENKENLNEIADQGENEANAKHSSGILTPSSVDNHNTHKHGPNFRIQELNTTVQALSNSKDIIFSRSKPSEHVEKSAACIDADYEYLNILADTPGIKRGLESPSAWKSPVFTPFQDAYFMSPASRAFDALGLVKQINEQSASAVEEAHEVLANGSPWKQHNKENSDKENIENTALKHEHVTSKPPSILMPSSSLRLLEISNKDYGC

SEQ ID NO: 185703 - protein, 651 aa, Zea Mays
MVNKLGPKKWSTIAQALPGRIGKQCRERWHNHLNPGINKDAWTQDEEIRLIHAHQTYGNKWAELTKFLPGRTDNAIKNHWHSSVKKKVDSYRSSGLLAQSQGFTPVEYTAGGLNVDSSSAITNQISEGSGFNVFREAEDSMELSQSSFAKGSCSQEEQNDVTLGSHLHVHESLCPDGSTNDGNGASGLPDIHHRLCTSDMDQDKHLQEGMDLDKHLQHEFSQGTDLHLDVDEVPNNFVIKGSQSSNELAVQFHDTEIMNSSKNDGVSLVPHAITPCVPILPSVSGCVHNINVIYEMGIKNDNCFQSEKCQDISIQSGAYSSEAAGSFLAPLYPLQTSEPAIMMGGPVYYQSSVMSLPPGFISSDGASNASGVKSETSYYPVSRQNLEIKTCHNASGDPEQNSYISSEDDRNKTSEPMGRISESEKKQQVDVEQSCLEPAACIGKEALSSHGDTILSKKEDAGALCYEPPCFRSFEFPFVSCELVNSSDLPEYSPLGIRELMRTSLNFPTPVRLWGSPTRDGSPDAVLKNAAKRFMCTPSIMKKRHRDLLSPVSDIRTDKKPNTERDFMSSGISSTRVGKSCMDSADDSADLVSPKESAFQKKLKLCHENKENLNEIADQGENEANAKGFLLRAVLTTIIHISMVQIFEFRS

SEQ ID NO: 185704 - protein, 808 aa, Zea Mays
MVNKLGPKKWSTIAQALPGRIGKQCRERWHNHLNPGINKDAWTQDEEIRLIHAHQTYGNKWAELTKFLPGRTDNAIKNHWHSSVKKKVDSYRSSGLLAQSQGFTPVEYTAGGLNVDSSSAITNQISEGSGFNVFREAEDSMELSQSSFAKGSCSQEEQNDVTLGSHLHVHESLCPDGSTNDGNGASGLPDIHHRLCTSDMDQDKHLQEGMDLDKHLQHEFSQGTDLHLDVDEVPNNFVIKGSQSSNELAVQFHDTEIMNSSKNDGVSLVPHAITPCVPILPSVSGCVHNINVIYEMGIKNDNCFQSEKCQDISIQSGAYSSEAAGSFLAPLYPLQTSEPAIMMGGPVYYQSSVMSLPPGFISSDGASNASGVKSETSYYPVSRQNLEIKTCHNASGDPEQNSYISSEDDRNKTSEPMGRISESEKKQQVDVEQSCLEPAACIGKEALSSHGDTILSKKEDAGALCYEPPCFRSFEFPFVSCELVNSSDLPEYSPLGIRELMRTSLNFPTPVRLWGSPTRDGSPDAVLKNAAKRFMCTPSIMKKRHRDLLSPVSDIRTDKKPNTERDFMSSGISSTRVGKSCMDSADDSADLVSPKESAFQKKLKLCHENKENLNEIADQGENEANAKHSSGILTPSSVDNHNTHKHGPNFRIQELNTTVQALSNSKDIIFSRSKPSEHVEKSAACIDADYEYLNILADTPGIKRGLESPSAWKSPVFTPFQDAYFMSPASRAFDALGLVKQINEQSASAVEEAHEVLANGSPWKQHNKENSDKENIENTALKHEHVTSKPPSILMDDEAEEQDDEAEE

SEQ ID NO: 185705 - protein, 668 aa, Zea Mays
MELSQSSFAKGSCSQEEQNDVTLGSHLHVHESLCPDGSTNDGNGASGLPDIHHRLCTSDMDQDKHLQEGMDLDKHLQHEFSQGTDLHLDVDEVPNNFVIKGSQSSNELAVQFHDTEIMNSSKNDGVSLVPHAITPCVPILPSVSGCVHNINVIYEMGIKNDNCFQSEKCQDISIQSGAYSSEAAGSFLAPLYPLQTSEPAIMMGGPVYYQSSVMSLPPGFISSDGASNASGVKSETSYYPVSRQNLEIKTCHNASGDPEQNSYISSEDDRNKTSEPMGRISESEKKQQVDVEQSCLEPAACIGKEALSSHGDTILSKKEDAGALCYEPPCFRSFEFPFVSCELVNSSDLPEYSPLGIRELMRTSLNFPTPVRLWGSPTRDGSPDAVLKNAAKRFMCTPSIMKKRHRDLLSPVSDIRTDKKPNTERDFMSSGISSTRVGKSCMDSADDSADLVSPKESAFQKKLKLCHENKENLNEIADQGENEANAKHSSGILTPSSVDNHNTHKHGPNFRIQELNTTVQALSNSKDIIFSRSKPSEHVEKSAACIDADYEYLNILADTPGIKRGLESPSAWKSPVFTPFQDAYFMSPASRAFDALGLVKQINEQSASAVEEAHEVLANGSPWKQHNKENSDKENIENTALKHEHVTSKPPSILMDDEAEEQDDEAEE

SEQ ID NO: 185706 - protein, 108 aa, Zea Mays
MIQLLFSLLAAEAALVLALLFPTPVRRLALLAIDRAKRGRGPVMAKTIAGTMLLVLVSAFYSVAKIRRREGELGQLTPTDQRVENVEERHGGCNRAGPDTRSSKIRKH

SEQ ID NO: 185707 - protein, 251 aa, Zea Mays
MFKSNDILRKQTALKGERKISVLIGITVIFMIHVFGVYWWYRNDDLLRPLFMLPPKDIPPFWHAIFVIMVNDTMVRQAAMAVKCMLLLYYKNCRGRNYRRQGQMLTLVEYLLLLYRALLPTSVWYRFFLNKEYGSLFSSLTTGLYLTFKLTSVVEKVQSFLAAVKALSRKDVHYGSYATAEQVLAAGDMCAICQEKMHVPVLLRCKHIFCEDCVSEWFERERTCPLCRALVKPADIRSFGDGSTSLFFQLF

SEQ ID NO: 185708 - protein, 137 aa, Zea Mays
MAIPLLVPHMNLNDGKLAGYDIPAESKILVNAWFLANDPKRWVRPDEFRPERFLEEDKSVEAHGNDFRFVPFGVGRRSCPGIILALPIIGITLASLVQNFQLLPPPGLDKIDTTEKPGQFSNQIAKHATIVCKPLKA

SEQ ID NO: 185709 - protein, 1318 aa, Zea Mays
MPTQIPRAISTTEVPKTSSHAGGPMAAVAELERRVMAAVKASAERGDPPLLQAAEAARCIREAPAFTPGGLALSQALVANLCFAHNTAAMWKLLDQAMLSRLVDPLHTLALLTPRVVPNRREQPEAYMLYLELLGRYAVAPVYPERMENKDMLAKSIDGAMQLSHRFGFQHLDFGHTVILFVLSLVDMLIDCILDDCGLPVTSADEHGNRKDMNFNGKGRSFDRGDEHREHLRRKNILMSIEVVEKVTANKITQVFLRLVNRNTPENFNYLLRKLHLIGALKKKNALSPCNLLDSLIVNIQNAISTGYQLDRKRLLGVPVSIQPCSSAIYSIFVTGKGSCWIPFDMFMENAMDGRHLHTISSVEYLTELSKTLQVLNRATWQETFQALWISALRLVQRGPDASEGPFPHLDSRMCMLLAIIPLSIATIVKEEAGNLKGETTSVIRGQLVSSLQILRQFFGLLSPPPATVHLANAAARKAAVVLSNLKTGSENMYSSFKDSSSIKAVGNMLHLIVEACIARNLIDASAYFWPGYVVPLKESSPVQASPWSSLVEGSPLIELKDALMVTPASSVEELEKLYSFAVSGSPEEKLAASKILCGASLLRGWNIQEHVVQMVLKLLSTFLPLDSGSEGRYVQHMPMLHALVSGISSIDTVHILSLYGLVPEVASMLMPLCENFGSLPPSDHRSCKLEEASVYSVFSCAFLSLLRLWKFHRPPIESALSRRGVSVWSELRLDFLLLLRNSHSSLKNLSNVTQSSIFELDPPFQKPLYIDSFPKLRAWYFQNQACIASTLSSACSRTTVLHVANMILKIICHNKVPKGGVLSVNPQSTANSTTSSSPAGVQEDMCQWPTLPAWEILEAVPFVLEAMLTSCAHGRLSSRDLVTGLRDLADFLPASLAAIVSYFSAEVTSGIWKPVMLNGMDWPSPAATLPVVESEIKEALAFAGVHINICPRPRSAMPMLPLPIAALMSLSITVKMEEFSHLHGIISQGIEICATSSSWPTMQIIGALWSQKARRWHDFIILTCSQSPFTRDNTAVAQLIRSCFSSFLGPLVDGRSCSVANRGVANLLGQSSDEKAHRLAVAPGFLYMRSCRLFPNNTFVCEEILEVVIERAHALANDRSSDRPARLRSECLPLSAASSLVEQIASLAATMLCHAGGVNLIRLLYEQIMPTLLLSGGEAKLGSGGMVCSIIEGYTLAYVLLFSGATVWGVGETSPAYTLIYTSKRQRVLDRHLEFMARVMEGNIVLGCGDATWRSYVLCFVNLLVSFVPAWVPEVKLNTLQKLASGLRRWHEGDLALSLLELGGAKTVTSVVESLLR

SEQ ID NO: 185710 - protein, 810 aa, Zea Mays
MLHLIVEACIARNLIDASAYFWPGYVVPLKESSPVQASPWSSLVEGSPLIELKDALMVTPASSVEELEKLYSFAVSGSPEEKLAASKILCGASLLRGWNIQEHVVQMVLKLLSTFLPLDSGSEGRYVQHMPMLHALVSGISSIDTVHILSLYGLVPEVASMLMPLCENFGSLPPSDHRSCKLEEASVYSVFSCAFLSLLRLWKFHRPPIESALSRRGVSVWSELRLDFLLLLRNSHSSLKNLSNVTQSSIFELDPPFQKPLYIDSFPKLRAWYFQNQACIASTLSSACSRTTVLHVANMILKIICHNKVPKGGVLSVNPQSTANSTTSSSPAGVQEDMCQWPTLPAWEILEAVPFVLEAMLTSCAHGRLSSRDLVTGLRDLADFLPASLAAIVSYFSAEVTSGIWKPVMLNGMDWPSPAATLPVVESEIKEALAFAGVHINICPRPRSAMPMLPLPIAALMSLSITVKMEEFSHLHGIISQGIEICATSSSWPTMQIIGALWSQKARRWHDFIILTCSQSPFTRDNTAVAQLIRSCFSSFLGPLVDGRSCSVANRGVANLLGQSSDEKAHRLAVAPGFLYMRSCRLFPNNTFVCEEILEVVIERAHALANDRSSDRPARLRSECLPLSAASSLVEQIASLAATMLCHAGGVNLIRLLYEQIMPTLLLSGGEAKLGSGGMVCSIIEGYTLAYVLLFSGATVWGVGETSPAYTLIYTSKRQRVLDRHLEFMARVMEGNIVLGCGDATWRSYVLCFVNLLVSFVPAWVPEVKLNTLQKLASGLRRWHEGDLALSLLELGGAKTVTSVVESLLR

SEQ ID NO: 185711 - protein, 755 aa, Zea Mays
MPLWSHLLREELEKLYSFAVSGSPEEKLAASKILCGASLLRGWNIQEHVVQMVLKLLSTFLPLDSGSEGRYVQHMPMLHALVSGISSIDTVHILSLYGLVPEVASMLMPLCENFGSLPPSDHRSCKLEEASVYSVFSCAFLSLLRLWKFHRPPIESALSRRGVSVWSELRLDFLLLLRNSHSSLKNLSNVTQSSIFELDPPFQKPLYIDSFPKLRAWYFQNQACIASTLSSACSRTTVLHVANMILKIICHNKVPKGGVLSVNPQSTANSTTSSSPAGVQEDMCQWPTLPAWEILEAVPFVLEAMLTSCAHGRLSSRDLVTGLRDLADFLPASLAAIVSYFSAEVTSGIWKPVMLNGMDWPSPAATLPVVESEIKEALAFAGVHINICPRPRSAMPMLPLPIAALMSLSITVKMEEFSHLHGIISQGIEICATSSSWPTMQIIGALWSQKARRWHDFIILTCSQSPFTRDNTAVAQLIRSCFSSFLGPLVDGRSCSVANRGVANLLGQSSDEKAHRLAVAPGFLYMRSCRLFPNNTFVCEEILEVVIERAHALANDRSSDRPARLRSECLPLSAASSLVEQIASLAATMLCHAGGVNLIRLLYEQIMPTLLLSGGEAKLGSGGMVCSIIEGYTLAYVLLFSGATVWGVGETSPAYTLIYTSKRQRVLDRHLEFMARVMEGNIVLGCGDATWRSYVLCFVNLLVSFVPAWVPEVKLNTLQKLASGLRRWHEGDLALSLLELGGAKTVTSVVESLLR

SEQ ID NO: 185712 - protein, 1158 aa, Zea Mays
MQLSHRFGFQHLDFGHTVILFVLSLVDMLIDCILDDCGLPVTSADEHGNRKDMNFNGKGRSFDRGDEHREHLRRKNILMSIEVVEKVTANKITQVFLRLVNRNTPENFNYLLRKLHLIGALKKKNALSPCNLLDSLIVNIQNAISTGYQLDRKRLLGVPVSIQPCSSAIYSIFVTGKGSCWIPFDMFMENAMDGRHLHTISSVEYLTELSKTLQVLNRATWQETFQALWISALRLVQRGPDASEGPFPHLDSRMCMLLAIIPLSIATIVKEEAGNLKGETTSVIRGQLVSSLQILRQFFGLLSPPPATVHLANAAARKAAVVLSNLKTGSENMYSSFKDSSSIKAVGNMLHLIVEACIARNLIDASAYFWPGYVVPLKESSPVQASPWSSLVEGSPLIELKDALMVTPASSVEELEKLYSFAVSGSPEEKLAASKILCGASLLRGWNIQEHVVQMVLKLLSTFLPLDSGSEGRYVQHMPMLHALVSGISSIDTVHILSLYGLVPEVASMLMPLCENFGSLPPSDHRSCKLEEASVYSVFSCAFLSLLRLWKFHRPPIESALSRRGVSVWSELRLDFLLLLRNSHSSLKNLSNVTQSSIFELDPPFQKPLYIDSFPKLRAWYFQNQACIASTLSSACSRTTVLHVANMILKIICHNKVPKGGVLSVNPQSTANSTTSSSPAGVQEDMCQWPTLPAWEILEAVPFVLEAMLTSCAHGRLSSRDLVTGLRDLADFLPASLAAIVSYFSAEVTSGIWKPVMLNGMDWPSPAATLPVVESEIKEALAFAGVHINICPRPRSAMPMLPLPIAALMSLSITVKMEEFSHLHGIISQGIEICATSSSWPTMQIIGALWSQKARRWHDFIILTCSQSPFTRDNTAVAQLIRSCFSSFLGPLVDGRSCSVANRGVANLLGQSSDEKAHRLAVAPGFLYMRSCRLFPNNTFVCEEILEVVIERAHALANDRSSDRPARLRSECLPLSAASSLVEQIASLAATMLCHAGGVNLIRLLYEQIMPTLLLSGGEAKLGSGGMVCSIIEGYTLAYVLLFSGATVWGVGETSPAYTLIYTSKRQRVLDRHLEFMARVMEGNIVLGCGDATWRSYVLCFVNLLVSFVPAWVPEVKLNTLQKLASGLRRWHEGDLALSLLELGGAKTVTSVVESLLR

SEQ ID NO: 185713 - protein, 704 aa, Zea Mays
MVLKLLSTFLPLDSGSEGRYVQHMPMLHALVSGISSIDTVHILSLYGLVPEVASMLMPLCENFGSLPPSDHRSCKLEEASVYSVFSCAFLSLLRLWKFHRPPIESALSRRGVSVWSELRLDFLLLLRNSHSSLKNLSNVTQSSIFELDPPFQKPLYIDSFPKLRAWYFQNQACIASTLSSACSRTTVLHVANMILKIICHNKVPKGGVLSVNPQSTANSTTSSSPAGVQEDMCQWPTLPAWEILEAVPFVLEAMLTSCAHGRLSSRDLVTGLRDLADFLPASLAAIVSYFSAEVTSGIWKPVMLNGMDWPSPAATLPVVESEIKEALAFAGVHINICPRPRSAMPMLPLPIAALMSLSITVKMEEFSHLHGIISQGIEICATSSSWPTMQIIGALWSQKARRWHDFIILTCSQSPFTRDNTAVAQLIRSCFSSFLGPLVDGRSCSVANRGVANLLGQSSDEKAHRLAVAPGFLYMRSCRLFPNNTFVCEEILEVVIERAHALANDRSSDRPARLRSECLPLSAASSLVEQIASLAATMLCHAGGVNLIRLLYEQIMPTLLLSGGEAKLGSGGMVCSIIEGYTLAYVLLFSGATVWGVGETSPAYTLIYTSKRQRVLDRHLEFMARVMEGNIVLGCGDATWRSYVLCFVNLLVSFVPAWVPEVKLNTLQKLASGLRRWHEGDLALSLLELGGAKTVTSVVESLLR

SEQ ID NO: 185714 - protein, 298 aa, Zea Mays
MIQSPVTPEDEAIHHGHTSHSPVGAGEDAPFRWDHVRVKLKKEIVTFGDPGVMPTKIVGKYVKPKDWNDLISDPDTVIIDVRNMYEIRIGKFKKAVDPRTNSFREFPTWVDDQFQLVQSGTLGSGGDDNGTGEPSADLNASKSKQLPRVAMYCTGGIRCEKASSFLLGKGFKEVYHLEGGILKYLEEIPKAESLWEGECFVFDKRVSVGHGLAQGTHKLCYGCKQPVSDEDMLSPHWEYGVSCPHCFATKSEEEKERARARQRQFETFGVIGGPHMGKSPRGSAANNAVEFIQLPKSV

SEQ ID NO: 185715 - protein, 233 aa, Zea Mays
MLTAPPLAAAARRAATAAACGAAHRLLLPVCFLSSNPSAPSTLVPRRRFGHMSQECMAPRAPLPPVGRNFAVAVGDEILYGDAPELVVVSFYRFADFPDHAAFRLPLKELCEELRVSGGIILAPEGINGSICGTPVAVDKILNFIQEDGRLKGLRMIQSPVTPEDEAIHHGHTSHSPVGAGEDAPFRWDHVRVKLKKEIVTFGDPGVMPTKIVGKYVKPKDWNDLISDPDTAP

SEQ ID NO: 185716 - protein, 148 aa, Zea Mays
MYCTGGIRCEKASSFLLGKGFKEVYHLEGGILKYLEEIPKAESLWEGECFVFDKRVSVGHGLAQGTHKLCYGCKQPVSDEDMLSPHWEYGVSCPHCFATKSEEEKERARARQRQFETFGVIGGPHMGKSPRGSAANNAVEFIQLPKSV

SEQ ID NO: 185717 - protein, 712 aa, Zea Mays
MAATTSTAAAAVSFSLPSPPHCRGARRRRAPSLLRAASTAAPPSPDLSIQLSPRASPPASTNGAATALGPPVSASFARDRAEDLQAEARAMARAAGATVYSPELLAARYGSRPFKVALRAGEVLSKLASFGVKVLLDERRGESSSERRRARAVELRTIFTRLGPTFVKIGQGLSTRPDLCPAEYLEELAELQDSLPTFPDEEAFACIERELGFTLDSIYSTISPSPIAAASLGQVYKARLKYSGKLVAVKVQRPSIEKAIGLDFYLLRGLGFLINKYVDIVTSDVVALIDEFARRVFQELNYVQEGQNARRFKKLYADKQDVLVPDIFWDYTSAKVLTMEWIEGVKLNQQAVIESQGLKVLDLVNIGIQCSLRQLLEYGYFHADPHPGNILATPEGKLAFLDFGMMSETPEDARVAIIGHVVHLVNRDYEAMARDYYALDFLEPDVDVSPIVPALKNFFDDALNATVSELNFKTIVDGLGAVLYQYPFNAYYALILRSLTVLEGLALYADPDFKVLAASYPYFAKRLLTDPNPYLRDALIELVFKDGKFRWNRLENLLVQGRQDREFAAKDALQPVLKLLLGPGGEELRALVVKEAVRVTEAIAIGTLVDSYNAAPSFLKPLISSGNLAEPFKFSETEQEQMMELRDQVFRVWGLLRSSNNFDPSLLQPIVQVLQEPEARVLGSRVAGGVTQRLAARLLQQLLRTPPAPGSS

SEQ ID NO: 185718 - protein, 712 aa, Zea Mays
MAATTSTAAAAVSFSLPSPPHCRGARRRRAPSLLRAASTAAPPSPDLSIQLSPRASPPASTNGAATALGPPVSASFARDRAEDLQAEARAMARAAGATVYSPELLAARYGSRPFKVALRAGEVLSKLASFGVKVLLDERRGESSSERRRARAVELRTIFTRLGPTFVKIGQGLSTRPDLCPAEYLEELAELQDSLPTFPDEEAFACIERELGFTLDSIYSTISPSPIAAASLGQVYKARLKYSGKLVAVKVQRPSIEKAIGLDFYLLRGLGFLINKYVDIVTSDVVALIDEFARRVFQELNYVQEGQNARRFKKLYADKQDVLVPDIFWDYTSAKVLTMEWIEGVKLNQQAVIESQGLKVLDLVNIGIQCSLRQLLEYGYFHADPHPGNILATPEGKLAFLDFGMMSETPEDARVAIIGHVVHLVNRDYEAMARDYYALDFLEPDVDVSPIVPALKNFFDDALNATVSELNFKTIVDGLGAVLYQYPFNVPAYYALILRSLTVLEGLALYADPDFKVLAASYPYFAKRLLTDPNPYLRDALIELVFKDGKFRWNRLENLLVQGRQDREFAAKDALQPVLKLLLGPGGEELRALVVKEAVRVTEAIAIGTLVDSYNAAPSFLKPLISSGNLAEPFKFSETEQEQMMELRDQVFRVWGLLRSSNNFDPSLLQPIVLQEPEARVLGSRVAGGVTQRLAARLLQQLLRTPPAPGSS

SEQ ID NO: 185719 - protein, 89 aa, Zea Mays
MNAEGAALQGSGWVWLALDKEAKKLSVETTANQDPLVTKGASLVPLLGIDVWEHAYYLQYKNVRPDYLNNIWKVMNWKYAGEVYENVLA

SEQ ID NO: 185720 - protein, 53 aa, Zea Mays
MHGLPILFVLLACYSVSAPSFWHHVYVEQGDAQGKPFPLLSPLIKSAELPMFA

SEQ ID NO: 185721 - protein, 1085 aa, Zea Mays
MDEENVVELLQRYRRDRQVLLNYILSGNLIKKVAMPPGAISLDDVDIDQVSVDYVLNCAKKGEPLDLGDAIRLFHDSLDYPYVNNTGAVDEFYLLTKPEYSGPAPTREPPPIPATAPSSVVIPPPDVEPAPIIVSSPVTATNLPKSQPFDSPTEKELTIDDIEDFEDDEDEFDGRRASRRHQTDASDLSLLLPSFETGITDNDLREAAYEILVAAAGASGGLIVPQKEKKKEKRHRLMRKLGRSKSESVDINTQRQPGLVGLLETMRAQLEITESMDIRTRQGLLNAMVGKVGKRMDNLLIPLELLCCISRTEFSDMKAYLRWQKRQLNMLEEGLINHPVVGFGELGRKVNEIRSLFRKIEESESLPPSAAEVQRTECLRSLREVATSLSERPARGDLTGEVCHWADGYHLNVALYEKMLGSVFDILDEGKLTEEAEEILELLRSTWRTLGITETVHDTCYAWVLFRQFVLTGEQGLLKVVIDNLRKIPLKEQRGPQERLHLKSLRSSVDAEGSYQDFTFFQSFLSPIQKWTDKKLNDYHLHFSEGSSLMADVVTVAMLTRRILGEENDKVAESPDRDQIDRYITSSVKNTFLKMAHSVEFKADTTNEHVLASLAEETKKLLKKDTAIFTPVLTKWHPQAAVVSASLIHKLYGNKLRPFLEHAEHLTEDVVSVFPAADALEQYVMSVMASVTGDDGLDSLCRHKLVPYQIESKSGTLVLRWVNGQLERIETWVKRAADQEVWDPISPQQRHGNSIVEVYRIIEETADQFFAFKVPMRDGELNSLCRGLDKAFQVYTQLVTAPLVDKEDLAPPIPVLTRYKKELGIKAFVKKEVQEVRTVDERKASEITQLTMPKLCVRLNSLYYGISQLSKLEDSINERWARKKSENTNIRRKSEKSKSAVPNQKNQFDGSRKEINTAIDRTKVIFWDLQQPFVENLYRNGVAQARLDTITEVLDLVLNQLCDVIVEQLRDRVVTGLLQACLDGFLRVILDGGSTRVFSPNDAALLEEDLETLKEFFVSGGDGLPRGTVENLVSRVRPVINLIKQETRVLIDDLREVTQGGKSKFGADSKTLLRVLCHRNDSEAS

SEQ ID NO: 185722 - protein, 771 aa, Zea Mays
MDEENVVELLQRYRRDRQVLLNYILSGNLIKKVAMPPGAISLDDVDIDQVSVDYVLNCAKKGEPLDLGDAIRLFHDSLDYPYVNNTGAVDEFYLLTKPEYSGPAPTREPPPIPATAPSSVVIPPPDVEPAPIIVSSPVTATNLPKSQPFDSPTEKELTIDDIEDFEDDEDEFDGRRASRRHQTDASDLSLLLPSFETGITDNDLREAAYEILVAAAGASGGLIVPQKEKKKEKRHRLMRKLGRSKSESVDINTQRQPGLVGLLETMRAQLEITESMDIRTRQGLLNAMVGKVGKRMDNLLIPLELLCCISRTEFSDMKAYLRWQKRQLNMLEEGLINHPVVGFGELGRKVNEIRSLFRKIEESESLPPSAAEVQRTECLRSLREVATSLSERPARGDLTGEVCHWADGYHLNVALYEKMLGSVFDILDEGKLTEEAEEILELLRSTWRTLGITETVHDTCYAWVLFRQFVLTGEQGLLKVVIDNLRKIPLKEQRGPQERLHLKSLRSSVDAEGSYQDFTFFQSFLSPIQKWTDKKLNDYHLHFSEGSSLMADVVTVAMLTRRILGEENDKVAESPDRDQIDRYITSSVKNTFLKMAHSVEFKADTTNEHVLASLAEETKKLLKKDTAIFTPVLTKWHPQAAVVSASLIHKLYGNKLRPFLEHAEHLTEDVVSVFPAADALEQYVMSVMASVTGDDGLDSLCRHKLVPYQIESKSGTLVLRWVNGQLERIETWVKRAADQEVWDPISPQQRHGNSIVEVYRIIEEVSPPTKA

SEQ ID NO: 185723 - protein, 1028 aa, Zea Mays
MPPGAISLDDVDIDQVSVDYVLNCAKKGEPLDLGDAIRLFHDSLDYPYVNNTGAVDEFYLLTKPEYSGPAPTREPPPIPATAPSSVVIPPPDVEPAPIIVSSPVTATNLPKSQPFDSPTEKELTIDDIEDFEDDEDEFDGRRASRRHQTDASDLSLLLPSFETGITDNDLREAAYEILVAAAGASGGLIVPQKEKKKEKRHRLMRKLGRSKSESVDINTQRQPGLVGLLETMRAQLEITESMDIRTRQGLLNAMVGKVGKRMDNLLIPLELLCCISRTEFSDMKAYLRWQKRQLNMLEEGLINHPVVGFGELGRKVNEIRSLFRKIEESESLPPSAAEVQRTECLRSLREVATSLSERPARGDLTGEVCHWADGYHLNVALYEKMLGSVFDILDEGKLTEEAEEILELLRSTWRTLGITETVHDTCYAWVLFRQFVLTGEQGLLKVVIDNLRKIPLKEQRGPQERLHLKSLRSSVDAEGSYQDFTFFQSFLSPIQKWTDKKLNDYHLHFSEGSSLMADVVTVAMLTRRILGEENDKVAESPDRDQIDRYITSSVKNTFLKMAHSVEFKADTTNEHVLASLAEETKKLLKKDTAIFTPVLTKWHPQAAVVSASLIHKLYGNKLRPFLEHAEHLTEDVVSVFPAADALEQYVMSVMASVTGDDGLDSLCRHKLVPYQIESKSGTLVLRWVNGQLERIETWVKRAADQEVWDPISPQQRHGNSIVEVYRIIEETADQFFAFKVPMRDGELNSLCRGLDKAFQVYTQLVTAPLVDKEDLAPPIPVLTRYKKELGIKAFVKKEVQEVRTVDERKASEITQLTMPKLCVRLNSLYYGISQLSKLEDSINERWARKKSENTNIRRKSEKSKSAVPNQKNQFDGSRKEINTAIDRLCEFTGTKVIFWDLQQPFVENLYRNGVAQARLDTITEVLDLVLNQLCDVIVEQLRDRVVTGLLQACLDGFLRVILDGGSTRVFSPNDAALLEEDLETLKQVMSCWSRKGLLAHIPHGKLAMPFLLAWQNRIAMPPGLAWLG

SEQ ID NO: 185724 - protein, 507 aa, Zea Mays
MADVVTVAMLTRRILGEENDKVAESPDRDQIDRYITSSVKNTFLKMAHSVEFKADTTNEHVLASLAEETKKLLKKDTAIFTPVLTKWHPQAAVVSASLIHKLYGNKLRPFLEHAEHLTEDVVSVFPAADALEQYVMSVMASVTGDDGLDSLCRHKLVPYQIESKSGTLVLRWVNGQLERIETWVKRAADQEVWDPISPQQRHGNSIVEVYRIIEETADQFFAFKVPMRDGELNSLCRGLDKAFQVYTQLVTAPLVDKEDLAPPIPVLTRYKKELGIKAFVKKEVQEVRTVDERKASEITQLTMPKLCVRLNSLYYGISQLSKLEDSINERWARKKSENTNIRRKSEKSKSAVPNQKNQFDGSRKEINTAIDRTKVIFWDLQQPFVENLYRNGVAQARLDTITEVLDLVLNQLCDVIVEQLRDRVVTGLLQACLDGFLRVILDGGSTRVFSPNDAALLEEDLETLKQVMSCWSRKGLLAHIPHGKLAMPFLLAWQNRIAMPPGLAWLG

SEQ ID NO: 185725 - protein, 167 aa, Zea Mays
MRDGELNSLCRGLDKAFQVYTQLVTAPLVDKEDLAPPIPVLTRYKKELGIKAFVKKEVQEVRTVDERKASEITQLTMPKLCVRLNSLYYGISQLSKLEDSINERWARKKSENTNIRRKSEKSKSAVPNQKNQFDGSRKEINTAIDRLCEFTGKEIYRGNVLVETYCY

SEQ ID NO: 185726 - protein, 235 aa, Zea Mays
MESMWGLGVRVRKDEKGLVTRDKVERCIKDVMDGDSKDKYRKSATMWMQKAKAAMQNGGSSDKNITEFIAKRPHAASSGRDSLHGGGVTLNREPLQGRHLHAISVYVSRILTVRETLLFAAEFRLPCALSSERKRVGVDQLGLFYTADTIIGNRGHHGTSSAAATCTRCVLVMQVAAWAWAWAAYTRSCTTTSLVYVSRPLGGGPSGGSSGSSSTARRGEEERPLPYGPGPDAHV

SEQ ID NO: 185727 - protein, 239 aa, Zea Mays
MESMWGLGVRVRKDEKGLVTRDKVERCIKDVMDGDSKDKYRKSATMWMQKAKAAMQNGGSSDKNITEFIANTHCRRPHAASSGRDSLHGGGVTLNREPLQGRHLHAISVYVSRILTVRETLLFAAEFRLPCALSSERKRVGVDQLGLFYTADTIIGNRGHHGTSSAAATCTRCVLVMQVAAWAWAWAAYTRSCTTTSLVYVSRPLGGGPSGGSSGSSSTARRGEEERPLPYGPGPDAHV

SEQ ID NO: 185728 - protein, 77 aa, Zea Mays
MCQGHWVEARAEVQVEAPRRLDGEKRSAHFPMVLVQMPMYNELEVHKLLAAACELQWSKDRIIVQVVDYSTDPFIKT

SEQ ID NO: 185729 - protein, 667 aa, Zea Mays
MGMPHSSSLHHFLRHVSFPPDPHLLPTAFKSCPTLPLARALHAVAEVSGLARDPFVASSLLHAYLRLGTTGNARALFDGMPRPQRTVVGWSALVAAHAARGDAEGAWRLLEEMRRDGGVEPNVITWNGLVSGLNRSGRARDAVVALATMHGEGLLRPDATGVSCALSAVGDVGLVSVGQQLHGYAVKAGCRADACVVTALIDMYGKCGQAAEVVRVFDESSHMDVASCNALIAGLSRNAQVCEALRLFKEFVDRGVELNVVSWTSIVACCVQNGKDLEAVEFFREMQAQGTEPNSVTIPCVLPAFANVAALMHGRSAHCFALRKGFLHDVYVSSALVDMYAKCGRVKDARIIFDTMVSRNVVSWNAMIGGYAMYGEAVNAVWMFHSMLKCKQKPDMVTFTCLLAACTQAGLTEEGRHYFKEMHNEYGVSPRMEHYACMVTLLGRAGKLDEAYDLISDMPFEPDAYIWGSLLGSCRVHGNVDLAEVAAEKLFHLEPENAGNYVLLSNIYASKKMWDRVNRVREMMKDVGLKKEKGCSWIEIKNKVHMLLAGDDSHPMMTAIIEKINQLNIQMRKLGFVPSTDFVLHDVEEQEKDDILAVHSEKLAVALGLISTSPGTTLRVIKNLRICGDCHEAMKFISSFEGREISVRDTNRFHHFSGGKCSCGDFW

SEQ ID NO: 185730 - protein, 79 aa, Zea Mays
MELSSAGRWTDLPEDIALAVASRLQEADVCALGGCSRTWRRACDADCIWERLFRCRWPAAVAEASASSSRMQASRTKVS

SEQ ID NO: 185731 - protein, 152 aa, Zea Mays
MAAAISNVVEFVGGSLNNGSLESEYYLKAIADLAMILDIGFLDVQFFLFSRNHSAIINLIGLHYSIASLHVLPAEVSKALQAHRVSERMVCVNLLKLGRWFYGFRLPDEYESRKISLGELTTAEGAEILAILNRGAVHEVFRLRIGLVNVDK

SEQ ID NO: 185732 - protein, 158 aa, Zea Mays
MAPTAPTQRPTMRHSSAFLLPSTAPSSPAPGPDDAAVAVVVLNQPLPRFAPLLWSRAAVRVCADGGANRVFDGMPALLPGQDPDEVRASYKPDVIKGDMDSVRPEVKEHYSNLGTRIVDESHDQDTTDLHKCIAFIAENYSATNKSNHLGPWSTWGKV

SEQ ID NO: 185733 - protein, 159 aa, Zea Mays
MAPTAPTQRPTMRHSSAFLLPSTAPSSPAPGPDDAAVAVVVLNQPLPRFAPLLWSRAAVRVCADGGANRVFDGMPALLPGQDPDEVRASYKPDVIKGDMDSVRPEVKEHYSNLGTRIVDESHDQDTTDLHKCIAFIAENYSATNKSNQHLGPWSTWGKV

SEQ ID NO: 185734 - protein, 87 aa, Zea Mays
MARSSSIHCSIVLAPTSASVYSFRPVNGTRTILQCAPKRNPQFRTIVYLLFESCLDLPILLCHFVDCRSSLLFFCQANYAGINHTVV

SEQ ID NO: 185735 - protein, 142 aa, Zea Mays
MRSAAPPCQLPSPNPDASPPPSPMTPRAPQVRMRDVPMATEFGPSPVGGVGVWSGGVGAAAEAAVTDSEYGSEPGYRGDVELGYGDEIDEEEEDGRQQLFWGGVIGDMNKMKIDGDNNFGEQKSHHRCRRKKHDVRILDSLS

SEQ ID NO: 185736 - protein, 1314 aa, Zea Mays
MPTAPAAVLPRTCMDSLIAFLHHHLRALLADPAALHATRRRCLALLTPPRRHHCRKNLSGAQEEEENEDDAVLAALHGSIDALLPSPVDGAAAVCLAGVEEALQAPALLPEHGETAGLDNRRVAACAYFYLALVRCAQGDAWQMSMDLLQAVAVCPAAVAAGREDGARRAGLAPRALWEGLFDDGVLARAGGAGEEDAARRAARRYKDWLMYYKVVAAAPEQNGGYLQAGRSGSSVISRWLSSSEDRTNHSVDPEGITTVSASEFGAHDGFTELKDFLSIADQDFQEDTKGSSDSRCLHEMLEESQSDSPVSFYSHLDSSEQSDSEAAPYDKGRSAKIMPIDADFLAAKLHERSNHNKNLTWCTSPENAMIYAPESSMYQVDDRETKPNCLQSNRSHGSLNNLSNSVLELKNADSYSTSNYSAKDAMFTQCSPRHDLRCFNAFSAKFIKKSSLSDLVSRGSMSRKFKTSTASDDWSDVSSRWAKDSQVDFLERFEKAVSKLLISDGLESCLDAGSEVTTIWQLLNNTCEARHMSSVRQDILDRLLDSISTSKKDKVVRASVYVLLLMISEDRNVMRGIKRKDFHLSNLAVALKRDVHEAAILIYLLDPTPLEIKNLDLLPSLLHVACSSGTQKWPSMLPLTPTSASIALIEILVTAFDYVTNNVHLASLSSPPILSKLVDVAKNHNLEEGVALAAILIRCVRLNGNCKKFLSQATPVDPFLHLLRRKEHRAKCAALEYFHEILQIPRSSANSLLEEIRRQGGIAIMHTLMVSLHQTGPEHRVLGASLLLQLDMMERSDGRSVFQDEAMEVLLDSLSSQENSRVQALSACFLSNLGGTYSWSGESYTAAWLTKKAGLTSTSQRNTIRNIDWLDSCLQDTEISTWSNKSARAIIKIGVPFISALAKGMQSKVKGTSQNCLLCTAWLGSELAALGENAIRYSACEILLHDIASHLHPGNELDERVLACMCLYNYTSGKGKQMLMSLPEGSRESLRRLSSFTWMAEELLQVTDYFLSSKPRVSCVHTQILEIGQPGNGAATAIAFFRGQLFAGYSNGTIRAWDIKGQRAVIIREVKEHKKAVTCFSLSETGENLLSGSADKSIRVWEMAQRKLECVEMIQTREAVQKLDICGDKILVLTQNSVLKFSCASRSTQTFYRSKHVKSLAVYQGKAYLGCKDASIQELDVSVESNSAMIRIPRGGWMVRKQSISSIVVYRDWMYCAGAQVEGSALKDWKKRCKPNMTMPIPKGTSVEAMAVVEDFIYLNCSRSPSIIQIWLREKQQKVGRLSAGSKITSLFTANDMVFCGTETGLIKAWIPL

SEQ ID NO: 185737 - protein, 870 aa, Zea Mays
MPTAPAAVLPRTCMDSLIAFLHHHLRALLADPAALHATRRRCLALLTPPRRHHCRKNLSGAQEEEENEDDAVLAALHGSIDALLPSPVDGAAAVCLAGVEEALQAPALLPEHGETAGLDNRRVAACAYFYLALVRCAQGDAWQMSMDLLQAVAVCPAAVAAGREDGARRAGLAPRALWEGLFDDGVLARAGGAGEEDAARRAARRYKDWLMYYKVVAAAPEQNGGYLQAGRSGSSVISRWLSSSEDRTNHSVDPEGITTVSASEFGAHDGFTELKDFLSIADQDFQEDTKGSSDSRCLHEMLEESQSDSPVSFYSHLDSSEQSDSEAAPYDKGRSAKIMPIDADFLAAKLHERSNHNKNLTWCTSPENAMIYAPESSMYQVDDRETKPNCLQSNRSHGSLNNLSNSVLELKNADSYSTSNYSAKDAMFTQCSPRHDLRCFNAFSAKFIKKSSLSDLVSRGSMSRKFKTSTASDDWSDVSSRWAKDSQVDFLERFEKAVSKLLISDGLESCLDAGSEVTTIWQLLNNTCEARHMSSVRQDILDRLLDSISTSKKDKVVRASVYVLLLMISEDRNVMRGIKRKDFHLSNLAVALKRDVHEAAILIYLLDPTPLEIKNLDLLPSLLHVACSSGTQKWPSMLPLTPTSASIALIEILVTAFDYVTNNVHLASLSSPPILSKLVDVAKNHNLEEGVALAAILIRCVRLNGNCKKFLSQATPVDPFLHLLRRKEHRAKCAALEYFHEILQIPRSSANSLLEEIRRQGGIAIMHTLMERSDGRSVFQDEAMEVLLDSLSSQENSRVQALSACFLSNLGGTYSWSGESYTAAWLTKKAGLTSTSQRNTIRNIDWLDSCLQVKYQNIFSFGKYRKKNIT

SEQ ID NO: 185738 - protein, 1040 aa, Zea Mays
MPTAPAAVLPRTCMDSLIAFLHHHLRALLADPAALHATRRRCLALLTPPRRHHCRKNLSGAQEEEENEDDAVLAALHGSIDALLPSPVDGAAAVCLAGVEEALQAPALLPEHGETAGLDNRRVAACAYFYLALVRCAQGDAWQMSMDLLQAVAVCPAAVAAGREDGARRAGLAPRALWEGLFDDGVLARAGGAGEEDAARRAARRYKDWLMYYKVVAAAPEQNGGYLQAGRSGSSVISRWLSSSEDRTNHSVDPEGITTVSASEFGAHDGFTELKDFLSIADQDFQEDTKGSSDSRCLHEMLEESQSDSPVSFYSHLDSSEQSDSEAAPYDKGRSAKIMPIDADFLAAKLHERSNHNKNLTWCTSPENAMIYAPESSMYQVDDRETKPNCLQSNRSHGSLNNLSNSVLELKNADSYSTSNYSAKDAMFTQCSPRHDLRCFNAFSAKFIKKSSLSDLVSRGSMSRKFKTSTASDDWSDVSSRWAKDSQVDFLERFEKAVSKLLISDGLESCLDAGSEVTTIWQLLNNTCEARHMSSVRQDILDRLLDSISTSKKDKVVRASVYVLLLMISEDRNVMRGIKRKDFHLSNLAVALKRDVHEAAILIYLLDPTPLEIKNLDLLPSLLHVACSSGTQKWPSMLPLTPTSASIALIEILVTAFDYVTNNVHLASLSSPPILSKLVDVAKNHNLEEGVALAAILIRCVRLNGNCKKFLSQATPVDPFLHLLRRKEHRAKCAALEYFHEILQIPRSSANSLLEEIRRQGGIAIMHTLMVSLHQTGPEHRVLGASLLLQLDMMERSDGRSVFQDEAMEVLLDSLSSQENSRVQALSACFLSNLGGTYSWSGESYTAAWLTKKAGLTSTSQRNTIRNIDWLDSCLQDTEISTWSNKSARAIIKIGVPFISALAKGMQSKVKGTSQNCLLCTAWLGSELAALGENAIRYSACEILLHDIASHLHPGNELDERVLACMCLYNYTSGKGKQMLMSLPEGSRESLRRLSSFTWMAEELLQVTDYFLSSKPCSVYHVYIHKFSKLVNQAMVQQLL

SEQ ID NO: 185739 - protein, 628 aa, Zea Mays
MSTWLPSAPLLFCPSLWMLQRTTTWRKATPVDPFLHLLRRKEHRAKCAALEYFHEILQIPRSSANSLLEEIRRQGGIAIMHTLMVSLHQTGPEHRVLGASLLLQLDMMERSDGRSVFQDEAMEVLLDSLSSQENSRVQALSACFLSNLGGTYSWSGESYTAAWLTKKAGLTSTSQRNTIRNIDWLDSCLQDTEISTWSNKSARAIIKIGVPFISALAKGMQSKVKGTSQNCLLCTAWLGSELAALGENAIRYSACEILLHDIASHLHPGNELDERVLACMCLYNYTSGKGKQMLMSLPEGSRESLRRLSSFTWMAEELLQVTDYFLSSKPRVSCVHTQILEIGQPGNGAATAIAFFRGQLFAGYSNGTIRAWDIKGQRAVIIREVKEHKKAVTCFSLSETGENLLSGSADKSIRVWEMAQRKLECVEMIQTREAVQKLDICGDKILVLTQNSVLKFSCASRSTQTFYRSKHVKSLAVYQGKAYLGCKDASIQELDVSVESNSAMIRIPRGGWMVRKQSISSIVVYRDWMYCAGAQVEGSALKDWKKRCKPNMTMPIPKGTSVEAMAVVEDFIYLNCSRSPSIIQIWLREKQQKVGRLSAGSKITSLFTANDMVFCGTETGLIKAWIPL

SEQ ID NO: 185740 - protein, 101 aa, Zea Mays
MKRQPRTGSGEMARVAHTLLAKDRLKGVVCSRVARTCSCGGGSVGMVDMCKRVKRSICRVVGDPQLGINRFGSPNFSDMKTGSSTLIVDNKRNKSWILKES

SEQ ID NO: 185741 - protein, 932 aa, Zea Mays
MNMERLPPPAGSRHGHHRYTRMPRQADLEGEAAPADQEREPERRPEVLAASASASLRVPDAARVFDELPRASIVAVSRPDAGDITPMLLSYTIEVHYKQFRWRLYKKASQVLYLHFALKRREFLEEFHEKQEQVKEWLQNLGIGEHMPVVHDEDEADDVNVPPQSDDNSIRNRNVPSSAVLPVIRPALGRQNSISDRAKVAMQEYLNHFLGNLDIVNSREVCKFLEVSCLSFLPEYGPKLKEDNVSVGHLPKIQKDRKKRCCSCGLFNCCKSNWQKTWAVLKPGFLALLEDPFDPKLLDVIIFDALPHMDITGEGQVSLAKEIKERNPLHFGFQVSSGGRTIKLRATSSSRVKDWVTAINAARQPPEGWCYPHRFGSFAPPRGLLEDGSMVQWFVDGQAAFKAIASSIEEAKSEIFITGWWLCPELYLRRPFQHHGSSRLDALLEARAKQGVQIYILLYKEVALALKINSLYSKQRLLNIHENVKVLRYPDHFSSGVYLWSHHEKIVIVDNQVCYIGGLDLCFGRYDSPEHKVADSPPEMWPGKDYYNPRESEPNSWEDTMKDELDRDKYPRMPWHDVQCALYGPPCRDVARHFVQRWNYAKRNKALNEQAIPLLMPHYHMVIPHYKGRSKETNDEAEGKQYNDKDVDIGKPVLTSRTSCQDVPLLLPQELEPRELSSSDLRVNDLDINHSDRLNKKNFNQPLLNRKAKLDSSHQDLPMRSFVDNLSSLEPSSVRRFDSSKDDRNHIDKKWWEMQERGNQVASLLDIGQVGPRVTCRCQVVRSVGQWSAGTTQIEGSIHNAYFSLIEKAEHFVYIENQFFISGLSGDDTIKNRVLEALYRRILRAEREKKRFKAIIIIPLLPGFQGGIDDGGAASVRAIMHWQYRTICRGSNSILQNLFDVIGPKAHDYISFYGLRAHGKLHDGGPLVTSQV

SEQ ID NO: 185742 - protein, 825 aa, Zea Mays
MLLSYTIEVHYKQFRWRLYKKASQVLYLHFALKRREFLEEFHEKQEQVKEWLQNLGIGEHMPVVHDEDEADDVNVPPQSDDNSIRNRNVPSSAVLPVIRPALGRQNSISDRAKVAMQEYLNHFLGNLDIVNSREVCKFLEVSCLSFLPEYGPKLKEDNVSVGHLPKIQKDRKKRCCSCGLFNCCKSNWQKTWAVLKPGFLALLEDPFDPKLLDVIIFDALPHMDITGEGQVSLAKEIKERNPLHFGFQVSSGGRTIKLRATSSSRVKDWVTAINAARQPPEGWCYPHRFGSFAPPRGLLEDGSMVQWFVDGQAAFKAIASSIEEAKSEIFITGWWLCPELYLRRPFQHHGSSRLDALLEARAKQGVQIYILLYKEVALALKINSLYSKQRLLNIHENVKVLRYPDHFSSGVYLWSHHEKIVIVDNQVCYIGGLDLCFGRYDSPEHKVADSPPEMWPGKDYYNPRESEPNSWEDTMKDELDRDKYPRMPWHDVQCALYGPPCRDVARHFVQRWNYAKRNKALNEQAIPLLMPHYHMVIPHYKGRSKETNDEAEGKQYNDKDVDIGKPVLTSRTSCQDVPLLLPQELEPRELSSSDLRVNDLDINHSDRLNKKNFNQPLLNRKAKLDSSHQDLPMRSFVDNLSSLEPSSVRRFDSSKDDRNHIDKKWWEMQERGNQVASLLDIGQVGPRVTCRCQVVRSVGQWSAGTTQIEGSIHNAYFSLIEKAEHFVYIENQFFISGLSGDDTIKNRVLEALYRRILRAEREKKRFKAIIIIPLLPGFQGGIDDGGAASVRAIMHWQYRTICREHMVNSMMGVPWLLVRFMYIAS

SEQ ID NO: 185743 - protein, 1051 aa, Zea Mays
MLLSYTIEVHYKQFRWRLYKKASQVLYLHFALKRREFLEEFHEKQEQVKEWLQNLGIGEHMPVVHDEDEADDVNVPPQSDDNSIRNRNVPSSAVLPVIRPALGRQNSISDRAKVAMQEYLNHFLGNLDIVNSREVCKFLEVSCLSFLPEYGPKLKEDNVSVGHLPKIQKDRKKRCCSCGLFNCCKSNWQKTWAVLKPGFLALLEDPFDPKLLDVIIFDALPHMDITGEGQVSLAKEIKERNPLHFGFQVSSGGRTIKLRATSSSRVKDWVTAINAARQPPEGWCYPHRFGSFAPPRGLLEDGSMVQWFVDGQAAFKAIASSIEEAKSEIFITGWWLCPELYLRRPFQHHGSSRLDALLEARAKQGVQIYILLYKEVALALKINSLYSKQRLLNIHENVKVLRYPDHFSSGVYLWSHHEKIVIVDNQVCYIGGLDLCFGRYDSPEHKVADSPPEMWPGKDYYNPRESEPNSWEDTMKDELDRDKYPRMPWHDVQCALYGPPCRDVARHFVQRWNYAKRNKALNEQAIPLLMPHYHMVIPHYKGRSKETNDEAEGKQYNDKDVDIGKPVLTSRTSCQDVPLLLPQELEPRELSSSDLRVNDLDINHSDRLNKKNFNQPLLNRKAKLDSSHQDLPMRSFVDNLSSLEPSSVRRFDSSKDDRNHIDKKWWEMQERGNQVASLLDIGQVGPRVTCRCQVVRSVGQWSAGTTQIEGSIHNAYFSLIEKAEHFVYIENQFFISGLSGDDTIKNRVLEALYRRILRAEREKKRFKAIIIIPLLPGFQGGIDDGGAASVRAIMHWQYRTICRGSNSILQNLFDVIGPKAHDYISFYGLRAHGKLHDGGPLVTSQIYVHSKLMIVDDRITLIGSANINDRSLLGSRDSEIAVVIEDKEVVNSKMDGRPWEAGKSSLSLRLSLWVEHLGLHPGEVSHIMDPIDDSTFKNIWMATAKTNTMIYQDVFGCVPNDLIHSRVQFRQSFAHLRDKIGHTTIDLGVAQEKLEAYQEGDLKSINPMDRLQLVRGHLVSFPLDFMCQEDLRPYFSESIDELPELTTYIYV

SEQ ID NO: 185744 - protein, 982 aa, Zea Mays
MPVVHDEDEADDVNVPPQSDDNSIRNRNVPSSAVLPVIRPALGRQNSISDRAKVAMQEYLNHFLGNLDIVNSREVCKFLEVSCLSFLPEYGPKLKEDNVSVGHLPKIQKDRKKRCCSCGLFNCCKSNWQKTWAVLKPGFLALLEDPFDPKLLDVIIFDALPHMDITGEGQVSLAKEIKERNPLHFGFQVSSGGRTIKLRATSSSRVKDWVTAINAARQPPEGWCYPHRFGSFAPPRGLLEDGSMVQWFVDGQAAFKAIASSIEEAKSEIFITGWWLCPELYLRRPFQHHGSSRLDALLEARAKQGVQIYILLYKEVALALKINSLYSKQRLLNIHENVKVLRYPDHFSSGVYLWSHHEKIVIVDNQVCYIGGLDLCFGRYDSPEHKVADSPPEMWPGKDYYNPRESEPNSWEDTMKDELDRDKYPRMPWHDVQCALYGPPCRDVARHFVQRWNYAKRNKALNEQAIPLLMPHYHMVIPHYKGRSKETNDEAEGKQYNDKDVDIGKPVLTSRTSCQDVPLLLPQELEPRELSSSDLRVNDLDINHSDRLNKKNFNQPLLNRKAKLDSSHQDLPMRSFVDNLSSLEPSSVRRFDSSKDDRNHIDKKWWEMQERGNQVASLLDIGQVGPRVTCRCQVVRSVGQWSAGTTQIEGSIHNAYFSLIEKAEHFVYIENQFFISGLSGDDTIKNRVLEALYRRILRAEREKKRFKAIIIIPLLPGFQGGIDDGGAASVRAIMHWQYRTICRGSNSILQNLFDVIGPKAHDYISFYGLRAHGKLHDGGPLVTSQIYVHSKLMIVDDRITLIGSANINDRSLLGSRDSEIAVVIEDKEVVNSKMDGRPWEAGKSSLSLRLSLWVEHLGLHPGEVSHIMDPIDDSTFKNIWMATAKTNTMIYQDVFGCVPNDLIHSSFAHLRDKIGHTTIDLGVAQEKLEAYQEGDLKSINPMDRLQLVRGHLVSFPLDFMCQEDLRPYFSESEYYTSPQVFH

SEQ ID NO: 185745 - protein, 67 aa, Zea Mays
MRTRTAGMDELALSNRPNALVPPRRRLAPSPCLAHADAPREQGRPRRATARPGDGARRAMARRVQNA

SEQ ID NO: 185746 - protein, 304 aa, Zea Mays
MAAVHEERKPIRTPTDLAAAIHAAADADIDAVAALALSAASDVPLPTHSLALLLRRLFTTRSIAATRGLLDKLHPSGEDGCPRPNPALRGALLALADAVCRRGPPASQLPCDGRPSRRARPLHPPIVRACLSGPLKRGIHLLGIFLTCGIRWRGGTESEKPGSRSGQEGAEDLHLCIDSSLSLLSEALRMPQPAAFVSMQPFDGQPTPSNVSNKKMKHDGEVSFLDGAGEVTVTIGGNSQQPLSTAPPPDSPDFKPQVWAKYLQCSRRNVAPALTVSPTRLRWQKRATLRRMRWRQGIPWETCL

SEQ ID NO: 185747 - protein, 644 aa, Zea Mays
MISARTAAASPASLWKRGGQSEGGGSCDGCRTYRNTLRRAAAAKVRALPSRAVEAVKMGSAAEVEQEEAEVAAAADGVVVEDHYGEDSATEELPIMPWAFSVASGYTLLRDPHHNKGLAFTEKERDAHHLRGLLPPAVVPQELQIKKIMHNLRQYQVPLQRYMAMMDLQERNERLFYKLLIDNVEELLPVVYTPTVGEACQKYGSIFRQPQGLYVSLRDKGKVLEVLRNWPHRNIQVICVTDGERILGLGDLGSQGMGIPVGKLALYTALGGVRPSACLPITIDVGTNNEKLLNDEFYIGLRQKRATGEEYHELMEEFMAAVKQIYGEKVLIQFEDFANHNAFNLLAKYSKSHLVFNDDIQGTASVVLAGLLAALKVVGRTLAEHTYLFLGAGEAGTGIAELIALEISKQTSAPIEECRKKIWLVDSKGLIVDSRKNSVQSFKKPWAHEHEPLTTLYDAVQSIKPTVLIGTSGVGRTFTKEVVEAMASFNERPIIFSLSNPTSHSECTAEEAYNWTQGRVIFASGSPFDPVEYDGKVFVPGQSNNAYIFPGFGLGLVISGAIRVHEDMLLAASEALAAQATQENFDKGSIFPPFTNIRKISARIAAAVAAKAYELGLATRLPPPRDLVKYAQSCMYTPVYRNYR

SEQ ID NO: 185748 - protein, 644 aa, Zea Mays
MISARTAAASPASLWKRGGQSEGGGSCDGCRTYRNTLRRAAAAKVRALPSRAVEAVKMGSAAEVEQEEAEVAAAADGVVVEDHYGEDSATEELPIMPWAFSVASGYTLLRDPHHNKGLAFMEKERDAHHLRGLLPPAVVPQELQIKKIMHNLRQYQVPLQRYMAMMDLQERNERLFYKLLIDNVEELLPVVYTPTVGEACQKYGSIFRQPQGLYVSLRDKGKVLEVLRNWPHRNIQVICVTDGERILGLGDLGSQGMGIPVGKLALYTALGGVRPSACLPITIDVGTNNEKLLNDEFYIGLRQKRATGEEYHELMEEFMAAVKQIYGEKVLIQFEDFANHNAFNLLAKYSKSHLVFNDDIQGTASVVLAGLLAALKVVGRTLAEHTYLFLGAGEAGTGIAELIALEISKQTSAPIEECRKKIWLVDSKGLIVDSRKNSVQSFKKPWAHEHEPLTTLYDAVQSIKPTVLIGTSGVGRTFTKEVVEAMASFNERPIIFSLSNPTSHSECTAEEAYNWTQGRVIFASGSPFDPVEYDGKVFVPGQSNNAYIFPGFGLGLVISGAIRVHEDMLLAASEALAAQATQENFDKGSIFPPFTNIRKISARIAAAVAAKAYELGLATRLPPPRDLVKYAQSCMYTPVYRNYR

SEQ ID NO: 185749 - protein, 658 aa, Zea Mays
MISARTAAASPASLWKRGGQSEGGGSCDGCRTYRNTLRRAAAAKVRALPSRAVEAVKMGSAAEVEQEEAEVAAAADGVVVEDHYGEDSATEELPIMPWAFSVASWLKKYAEESYFYISGYTLLRDPHHNKGLAFMEKERDAHHLRGLLPPAVVPQELQIKKIMHNLRQYQVPLQRYMAMMDLQERNERLFYKLLIDNVEELLPVVYTPTVGEACQKYGSIFRQPQGLYVSLRDKGKVLEVLRNWPHRNIQVICVTDGERILGLGDLGSQGMGIPVGKLALYTALGGVRPSACLPITIDVGTNNEKLLNDEFYIGLRQKRATGEEYHELMEEFMAAVKQIYGEKVLIQFEDFANHNAFNLLAKYSKSHLVFNDDIQGTASVVLAGLLAALKVVGRTLAEHTYLFLGAGEAGTGIAELIALEISKQTSAPIEECRKKIWLVDSKGLIVDSRKNSVQSFKKPWAHEHEPLTTLYDAVQSIKPTVLIGTSGVGRTFTKEVVEAMASFNERPIIFSLSNPTSHSECTAEEAYNWTQGRVIFASGSPFDPVEYDGKVFVPGQSNNAYIFPGFGLGLVISGAIRVHEDMLLAASEALAAQATQENFDKGSIFPPFTNIRKISARIAAAVAAKAYELGLATRLPPPRDLVKYAQSCMYTPVYRNYR

SEQ ID NO: 185750 - protein, 159 aa, Zea Mays
MASFNERPIIFSLSNPTSHSECTAEEAYNWTQGRVIFASGSPFDPVEYDGKVFVPGQSNNAYIFPGFGLGLVISGAIRVHEDMLLAASEALAAQATQENFDKGSIFPPFTNIRKISARIAAAVAAKAYELGLATRLPPPRDLVKYAQSCMYTPVYRNYR

SEQ ID NO: 185751 - protein, 658 aa, Zea Mays
MISARTAAASPASLWKQGGRSEGGGSCDGCRTYRNTLRRAAAAKVRALPSRAVEAVKMGSAAEMEQEEAEVAAAAAGVVVEDHYGEDSATEELPILPWAFSVASWLKKYAEESYFYISGYTLLRDPHHNKGLAFMEKERDAHHLRGLLPPAVVPQELQIKKIMHNLRQYQVPLQRYMAMMDLQERNERLFYKLLIDNVEELLPVVYTPTVGEACQKYGSIFRQPQGLYVSLRDKGKVLEVLRNWPHRNIQVICVTDGERILGLGDLGSQGMGIPVGKLALYTALGGVRPSACLPITIDVGTNNEKLLNDEFYIGLRQKRATGEEYHELMEEFMAAVKQIYGEKVLIQFEDFANHNAFNLLAKYSKSHLVFNDDIQGTASVVLAGLLAALKVVGRTLAEHTYLFLGAGEAGTGIAELIALEISKQTSAPIEECRKKIWLVDSKGLIVDSRKNSVQSFKKPWAHEHEPLTTLYDAVQSIKPTVLIGTSGVGRTFTKEVVEAMASFNERPIIFSLSNPTSHSECTAEEAYNWTQGRVIFASGSPFDPVEYDGKVFVPGQSNNAYIFPGFGLGLVISGAIRVHEDMLLAASEALAAQATQENFDKGSIFPPFTNIRKISARIAAAVAAKAYELGLATRLPPPRDLVKYAQSCMYTPVYRNYR

SEQ ID NO: 185752 - protein, 576 aa, Zea Mays
MISARTAAASPASLWKQGGRSEGGGSCDGCRTYRNTLRRAAAAKVRALPSRAVEAVKMGSAAEMEQEEAEVAAAAAGVVVEDHYGEDSATEELPILPWAFSVASGYTLLRDPHHNKGLAFMEKERDAHHLRGLLPPAVVPQELQIKKIMHNLRQYQVPLQRYMAMMDLQERNERLFYKLLIDNVEELLPVVYTPTVGEACQKYGSIFRQPQGLYVSLRDKGKVLEVLRNWPHRNIQVICVTDGERILGLGDLGSQGMGIPVGKLALYTALGGVRPSACLPITIDVGTNNEKLLNDEFYIGLRQKRATGEEYHELMEEFMAAVKQIYGEKVLIQFEDFANHNAFNLLAKYSKSHLVFNDDIQGTASVVLAGLLAALKVWAHEHEPLTTLYDAVQSIKPTVLIGTSGVGRTFTKEVVEAMASFNERPIIFSLSNPTSHSECTAEEAYNWTQGRVIFASGSPFDPVEYDGKVFVPGQSNNAYIFPGFGLGLVISGAIRVHEDMLLAASEALAAQATQENFDKGSIFPPFTNIRKISARIAAAVAAKAYELGLATRLPPPRDLVKYAQSCMYTPVYRNYR

SEQ ID NO: 185753 - protein, 342 aa, Zea Mays
MEKERDAHHLRGLLPPAVVPQELQIKKIMHNLRQYQVPLQRYMAMMDLQERNERLFYKLLIDNVEELLPVVYTPTVGEACQKYGSIFRQPQGLYVSLRDKGKVLEVLRNWPHRNIQVICVTDGERILGLGDLGSQGMGIPVGKLALYTALGGVRPSACLPITIDVGTNNEKLLNDEFYIGLRQKRATGEEYHELMEEFMAAVKQIYGEKVLIQFEDFANHNAFNLLAKYSKSHLVFNDDIQGTASVVLAGLLAALKVVGRTLAEHTYLFLGAGEAGTGIAELIALEISKQTSAPIEECRKKIWLVDSKGLIVDSRKNSVQSFKKPWAHEHEPLTTLYDAVQF

SEQ ID NO: 185754 - protein, 262 aa, Zea Mays
MEEFMAAVKQIYGEKVLIQFEDFANHNAFNLLAKYSKSHLVFNDDIQGTASVVLAGLLAALKVWAHEHEPLTTLYDAVQSIKPTVLIGTSGVGRTFTKEVVEAMASFNERPIIFSLSNPTSHSECTAEEAYNWTQGRVIFASGSPFDPVEYDGKVFVPGQSNNAYIFPGFGLGLVISGAIRVHEDMLLAASEALAAQATQENFDKGSIFPPFTNIRKISARIAAAVAAKAYELGLATRLPPPRDLVKYAQSCMYTPVYRNYR

SEQ ID NO: 185755 - protein, 84 aa, Zea Mays
MDAADVWGRSSSSSSSSAAAARRLQARYDLYMGIDDADAGLDEVTEPRGGAESYNCPFCGEDFDFVGLCCHIDDEHAVEAKSGG

SEQ ID NO: 185756 - protein, 90 aa, Zea Mays
MDAADVWGRSSSSSSSSAAAARRLQARYDLYMGIDDADAGLDEVTEPRGGAESYNCPFCGEDFDFVGLCCHIDDEHAVEAKSGGMMKSVF

SEQ ID NO: 185757 - protein, 52 aa, Zea Mays
MVHGYRRTKCRGEEKRHGEDESRKLCVQDGSHDGYALMLLELVDLSLRLVLG

SEQ ID NO: 185758 - protein, 84 aa, Zea Mays
MCTSKTPGLEYQLIHYFTCITKELTPYMANKTFIIITQNDSRHVMPRDTLTVLCALFETSTNLVLITNKQHMGHMYHVCDDLPA

SEQ ID NO: 185759 - protein, 140 aa, Zea Mays
MCRHVFERLVGTVQQVDPYFVQRPNCVGGMGLYTVQKVVGDIRILAYGVPPNVVDEYVLIAEFTAHEALQRFCKAIVTAFALCYLRPHTPHDLTRLLQVCESRRFLGYLEASIACIGSEKTALPRPCGRVCSQAKGSTRP

SEQ ID NO: 185760 - protein, 128 aa, Zea Mays
MGEYHRPYRGDLRSPPSSVPDPAFTHANGYFSSSASPNSNNGYFSPVFAKNDAFPGTGAGAGGAGGGRKAGGGGGGASMWCLSDPEMKRRRRVASYKAYSVEGKVKASLRRGLRWFKGKCSEIFHHGW

SEQ ID NO: 185761 - protein, 239 aa, Zea Mays
MGLGADQTSISRRSKHANLEGKQSKQAKTINSPFASRRHRRRRRLLLCHPAHPPPPQTHRYRFPHHLSSVRRGMENGGIEEADDALPEPAPPNGRRYRPVGSSDRAVIQMTSMEPGSSSATIDAVVTPQPPRNLKPDANLTIDPSMREGSPDDHVTSSGSQGDSKLELFGFDSLVNILGLKSMTGEQVQAPSSPRDGEDVAITIGRPKQSGPKFGTMMGVFVPCLQNILGIIYYIRFTW

SEQ ID NO: 185762 - protein, 419 aa, Zea Mays
MEISPLEPFTCWGIVLCCLIYYYVSIKGKAGDWGDGFKSAYFQLALRSLRSLGANQVHPKNWYPIPLIFCRPWGKLPENVPCHPKLADFANCMKKKGRGMSIFVSIIDGDYHELAEDAKTACRQLDAYIDYKRCEGVAEIIVAPTMSDGFRSIVQTMGLGNLKPNIVVMRYPEIWRRENLTQIPSTFVSIINDCIIANKAVVIVKGLDEWPNEYQRQYGTIDLYWIVRDGGLMLLLSQLLLTKESFESCKIQVFCISEEDTDAEELKADVKKFLYDLRMQAEVIVVTMKSWESHMESSSSGVQQDNSHEAYTSAQQRIETYLDEMKETAQRERQPLKENGRQVVVNEQKVDKFLYTMLKLNSTILRYSRMAAVVLVSLPPPPLNHPAYFYMEYMDLLVENVPRMLIVRGYTRDVVTFFT

SEQ ID NO: 185763 - protein, 423 aa, Zea Mays
MTVMMISAAGGQEAVGEEVEGATGGATRFGPRSDRFDNDRSRTATTWEMRRMRERRWKASQEELLDSVLGQILSIDGYSRTAESVTVVNNTLVNGTETTGTSTISTPSLHDLQVYGVIVTILLCFIVFGGVKIINKVAPAFLIPVLFSLLCIYLGVFIAPRHNAPRGITGLSITTLKDNWGEDYQRTNNAGVPDPSGSIYWDFNALVGLFFPAVTGIMAGSNRSASLKDTQRSIPIGTLYATLTTTAMYLFSVLLFGALATREELLTDRLLTATVAWPAPAVIYIGIILSTLGAALQSLTGAPRLLAAIANDDILPVLNYFKVSEGSEPHAATLFTAFICICCVVIGNLDLITPTITMFFLLCYAGVNLSCFLLDLLDAPSWRPRWKFHHWSLSLVGALFCVGMVLNTFTILFCFITIFSMNS

SEQ ID NO: 185764 - protein, 217 aa, Zea Mays
MSPEEHRHRGRHESHPSSRVSRSAAHIEDINSRGGEASRNGDPDALATMNATAEALEAKEKQKPSFELSGKLAEETNRVAGVNLLYSEPPEARKSEIRWRLYVFKDGEPLNEPLYVHRMTCYLFGRERKVADVPTDHPSCSKQHAVLQYRLVEKEQLDGMMTKKIRPYLMDLDSTNGTFINGNRIEPRRYYELFEKDTIKFGNSSREYVLLHENSTE

SEQ ID NO: 185765 - protein, 540 aa, Zea Mays
MASAVERRREEHARRSRSPARGRERRGTPPRRRSSPERRKGSPARARSPAAKSSASHRDRERSPPREKVKERVRSPESPAKVSLLHKGRERSSPREKAKDQRVRSPKRKQEQSRSPSPARRHFSRSPSPRSKRTRGAQGEREAVQFTGSDRRKASHREEQDTLRHREHDEGRDASRDRKVDREAVHVTNGDRRKPSHGEERDSWGKHREHDEGRVASIDRKSDREDTRGTAKDKKYVRDDEKDHSRERGAGRDDKYGASKVALPVWDDDRHGRPNRGDWKSASSREQRLDSGDRRDSTRVKPTDHDGSNGGSGRSFRHGRSMSPEEHRHRGRHESHPSSRVSRSAAHIEDINSRGGEASRNGDPDALATMNATAEALEAKEKVQKPSFELSGKLAEETNRVAGVNLLYSEPPEARKSEIRWRLYVFKDGEPLNEPLYVHRMTCYLFGRERKVADVPTDHPSCSKQHAVLQYRLVEKEQLDGMMTKKIRPYLMDLDSTNGTFINGNRIEPRRYYELFEKDTIKFGNTGSMFCSTKIQQNEF

SEQ ID NO: 185766 - protein, 197 aa, Zea Mays
MEREEELPSSSSSLGYMMQCRVCHEEEDQGRATMESPCGCSGSLKRWCDEKGSTLCEICLQNFKPGYTMPPKKTPVVETAVTISEHEDMQHLEPPEGLVDGADYTRCSYAADQCATWCRSLAITFTIVTLAWHLVAVATAEAAEHCAFSLLTMYLLRAAGILLPLYLVMRMIGVVQSGQRQYRLQLLEEQRRNASTI

SEQ ID NO: 185767 - protein, 336 aa, Zea Mays
MRNGRRDDDYQKWRWQPDGCDLPRFEAKLLLEKLRNKRLMFVGDSLNRNQWESMVCLVQSEAPWDKKSLVKNGSLNVFHLQEYNATVEFYWSPFLVESNSDDPDIHSISDRMIKPTSIAKHAANWEGVDYLIFNTYIWWMNTPQMKTLHGGSFSRKHVKYDEIERVEAYRKVLKTWSRWVEAHVDPKRTTVLFMSVSPVHMQSEGWGSPNAVKCFSETQPAISYNKKLEVGTDWDLFATAQRVTRSMKKVPVHFVNITALSEIRKDAHTSVHTLRQGKLLTPEQKANPRKFADCIHWCLPGVPDTWNEFVYGHIVSSTPPPQQQQQQKITEDEPHR

SEQ ID NO: 185768 - protein, 248 aa, Zea Mays
MIMSGPCLTGYTQTLNDWYDRDIDAINEPYRPIPSGAISENEVITQIWVLLLGGLGLGALLDVWAGHDFPIVFYLAVGGSLLSYIYSAPPLKLKQNGWIGNFALGASYISLPWWAGQALFGTLTPDIIVLTTLYSIAGLGIAIVNDFKSIEGDRTLGLQSLPVAFGMETAKWICVGAIDITQLSVAGYLLSTGKLYYALVLLGLTIPQVFFQFQYFLKDPVKYDVKYQASAQPFFVLGLLVTALATSH

SEQ ID NO: 185769 - protein, 258 aa, Zea Mays
MAAAHLLAALSSSTALRPPLRLRSPQHPPHIRFNCTGRRPFPVVRAAETDAKNAKANAKAPNKAPAADGSSFNQLLGIKGAKQESDIWKIRLQLTKPVTWPPLVWGVLCGAAASGNFHWTVEDVAKSIVCMIMSGPCLTGYTQTLNDWYDRDIDAINEPYRPIPSGAISENEVITQIWVLLLGGLGLGALLDVWDMIFLLCFILLWVAPYFLTYIQHHLSSSSRMDGLGTSLWVRVTSACPGGLARRYLELLHQISLS

SEQ ID NO: 185770 - protein, 267 aa, Zea Mays
MREGNFHWTVEDVAKSIVCMIMSGPCLTGYTQTLNDWYDRDIDAINEPYRPIPSGAISENEVITQIWVLLLGGLGLGALLDVWAGHDFPIVFYLAVGGSLLSYIYSAPPLKLKQNGWIGNFALGASYISLPWWAGQALFGTLTPDIIVLTTLYSIAGLGIAIVNDFKSIEGDRTLGLQSLPVAFGMETAKWICVGAIDITQLSVAGYLLSTGKLYYALVLLGLTIPQVFFQFQYFLKDPVKYDVKYQASAQPFFVLGLLVTALATSH

SEQ ID NO: 185771 - protein, 83 aa, Zea Mays
MLTPSLAARSPPDSSVVLRPPFFPISLYPCCPSCSLRVWPPRLRPANVEAITQYVQATFQNISGSHTTRVIKANDSELTYADG

SEQ ID NO: 185772 - protein, 212 aa, Zea Mays
MSSDDEVREEKELDLSSNDVVTKYKAAAEILNNALKIVVSQCKPKVKIVDLCEKGDSFIREQTGNVYKNAKRKIERGIAFPTCVSVNDTVCHFSPLATDDAVLEENDMVKIDMGCHIDGFIAVVAHTHVITNGPVTGRAGDVLAAANTAAEVAMRLVRPGKKLCSVSPMLIQRLMMLNLKKMKYMQSILSPALGRGSPSYWMRNRPPSTKGP

SEQ ID NO: 185773 - protein, 327 aa, Zea Mays
MFTRTQRGRLKGVLLSQPVYPSMTQFATSHRLQPMMPFWKKMTCDMGCHIDGFIAVVAHTHVITNGPVTGRAGDVLAAANTAAEVAMRLVRPGKKNKDVTEAIQKVAAAYDCKIVEGVLSHQLKQFVIDGNKVVLSVSNADTKVDDAEFEENEVYAIDIVTSTGEGKPKLLDEKQTTIYKRAVDKNYHLKMKASRFIFSEISQKFPIMPFTARALEEKRARLGLVECMNHELLQPYPVLHEKPGDLVAHIKFTVLLMPNGSDKITSHPLQELKPTKSIEDNAEIKAWLALGTKSKKKGGGKKKKGKKGDAAEADPMEEATNGATSQE

SEQ ID NO: 185774 - protein, 72 aa, Zea Mays
MACFGDEIKEEGWWEEEERQERRCSRSRSHGGGDKRCYKPRIILIFGITATSFFLVSSLHLMVLYYIQLWKN

SEQ ID NO: 185775 - protein, 155 aa, Zea Mays
MADKEPVVERSEASEEEDASAAAAAGEEEDTGAQVAPIVRLEEVLVTTGEEDEDVLLDMKAKLYRFDKDGNQWKERGTGTVKLLKNKETGKVRLVMRQAKTLKICANHLVAPTTRMQEHAGSDKSCVWHASDFADGELKEEMFAIRFGSVESKAA

SEQ ID NO: 185776 - protein, 120 aa, Zea Mays
MADKEPVVERSEASEEEDASAAAAAGEEEDTGAQVAPIVRLEEVLVTTGEEDEDVLLDMKAKLYRFDKDGNQWKERGTGTVKLLKNKETGKVRLVMRQAKTLKENAGTCRQRQIVRLARF

SEQ ID NO: 185777 - protein, 546 aa, Zea Mays
MMSSTPLSQPATAGDDDDDMESLPLAAASDYASVASTFDPLFSSTSATATSPRSPPTRAAAFTLSPTFSSSFVDPPSYADATGAGAGAVSSSPCSASSPSSASPRSARVAASEYSFLAVSDPETEAEPAATSLVPGSAPTYVSYLVTSVRRGDPDQRRHSVRRRFRDFVTLADRLADAFRGHFVPPRPDKNTVESQVMQRDEFVAQRRAALERYLWRLAEHPAIGPSDELRVFLQAEGKMPLPGTTDMASRMLDGAARLPRQLIAGEDTVTAPQEVVQPAKGGRDLLRIFKELKQSVVTDWAGVKPPLVEEDREFLEKKEKLQEWEQQLTSASQQAEALVKAQQDMAETMGALGLAFVRLTKFETEEAMYDSQRMRAADSRRVATAAVKASRACRDLNAQTVKYLDTLHEHLSIMLSVRTAFSDRASALLTVQTLMSDLASLESRIEKLEAASLKIFGGDKARTRKVEELRETIRATEDAKFCALREYERIKENNRSELQRLDSERKEEFMRMLKGFVASGLRGQNRGWMGDGSGGDERLCWCAWI

SEQ ID NO: 185778 - protein, 61 aa, Zea Mays
MANCRKAYQLNSSYFYCKYFFLKISGELCTDNLFFILIVFNIKRSTYQFVIILFNHTANCV

SEQ ID NO: 185779 - protein, 250 aa, Zea Mays
MSVPPAQAPAPFPAGVVSNPGHSIALPPQPAVVVPADAGSRPAVGAGVPAGGAGARPRSGGVGRPVYAMAAAGASLAAAAAVALLVLCYRSSSVVTVRPWATGLSGQLQKAFVTGVPSLKRSELEAACEDFSNVIGSLSDYMVYKGTLSTGVEIAVVSTTKNSAKEWSKHCESQFRKKITSLSRVNHKNFVNLLGYCQEEQPFTRMMVFEYAPNGTLFEHLHAEKTVTWTGPLACAWRSASPTAWSTCTS

SEQ ID NO: 185780 - protein, 75 aa, Zea Mays
MYLARIHLSIVAHLYCNYDCGKISQVFLPSHLDTYALCFYTCDCFNVNNCFTNILFHCFLICVIKLLLSSCRQLV

SEQ ID NO: 185781 - protein, 75 aa, Zea Mays
MSAISNQKKRTLEALQQQYTAAKAKKLQDEQVKSQKKSNFNTPKPKFDAPRGSKGLVITPRRTYVQPSHKRCSIF

SEQ ID NO: 185782 - protein, 101 aa, Zea Mays
MSAISNQKKRTLEALQQQYTAAKAKKLQDEQVKSQKKSNFNTPKPKFDAPRGSKGLVITPRRTYAQPSPHKDVAFSSSNCQQKPSTSSGFGWHRGCSQCYI

SEQ ID NO: 185783 - protein, 120 aa, Zea Mays
MSAISNQKKRTLEALQQQYTAAKAKKLQDEQVKSQKKSNFNTPKPKFDAPRGSKGLVITPRRTYAQPSPHKDVAFSSSNCQQKPSTSSERWRCWENYKGSQKVETGKGILLDEGNLDPYH

SEQ ID NO: 185784 - protein, 115 aa, Zea Mays
MNRLRVRRRAILIPLSLNLMHQGEAKVKKSILCMLNFLVLFMTLCPKDLDGTEVVHNVIYDIIQKGGDAGKITKGAKKLKLEKGSFWMREIWIHTIKRSPLWIHTITISLTCGST

SEQ ID NO: 185785 - protein, 115 aa, Zea Mays
MSLKQHKKCGSFDLDGTFHKYYLYKLMHEMWKDYIKELMDMSPKNKFTENLLSADLHGALLIVAEHKAASYKSVNGIMIRDTAETFGIISEDNRFRVYQKLVQFSYFKQTAGSSH

SEQ ID NO: 185786 - protein, 483 aa, Zea Mays
METIKPVFFWILQDMRSQAFGAMRARGARVTDICIVVVAADDGVRPQTSEAIAHARAAGVPIIIAINKIDKEGANAERVMQELSQIGIMPEMWGGDTPMVEISALTGDNVDELLETVMLVAELQELKANPHRNAKGTVIEACLDKAKGPLATLVVQNGTLNKADIIVCGEAYGKIRALYDDCGKLVDKAGPSNAVQVIGLNNVPLAGDEFEVVDNLDVARERANGRAEALRIERISAKAGEGKVTLSAIAASVSSAKQVGIDTHELNVILKVDFQGSIEAIRQAIQTLPQENVSLRFLLQGPGDVSVSDVDLAVASEGIIFGFNVRAPGSVKNYAKKKGVEIRMYKVIYDLIDDLRKAMEGLLEPAEEEVPIGSAKVRAVFSSGSGKVAGCMITTGKVVQDCNVRVLRKGKEVYVGSLDSLRRVKETVKEVGAGLECGIGVDDFDEWEEGDIIEAFNTVNKARTLEEASATVTAALKDAGVQL

SEQ ID NO: 185787 - protein, 868 aa, Zea Mays
MKTASLPDQKPAGATLDDREKVRESLDAVLEKAEKLEASSFGNADGGNLGSRQSNVSMSNGPGPTAVEEGGNSRKTKTLKSVWRKGNPVPTVRKVIREQPRTETRSQSIPVAKPSVSSASKPSPLLLSKPSVAQPPRRPIKSDTSNEKKGPILIDKFASKRAAVDPIVPEELLDPLKPVRGPPAKVRVDRRKKPDTQAGSRRRMSNDDGLVDEDTTDVPISGVPVRKGRRWSKAKRRAARLEAMQAEEPVRVEILEVGEEGMLIEDLAYELAIGESEILRFLSVRGVMLDNVQTLDKDLVKMVCMEYDVEVLESGPVKVEEMAKKKEFLDDEDLDKLEVRPPIVTIMGHVDHGKTTLLDYIRKSKLVASEAGGITQGIGAYQVLLPVDGNHQACVFLDTPGHEAFGAMRARGARVTDICIVVVAADDGVRPQTSEAIAHARAAGVPIIIAINKIDKEGANAERVMQELSQIGIMPEMWGGDTPMVEISALTGDNVDELLETVMLVAELQELKANPHRNAKGTVIEACLDKAKGPLATLVVQNGTLNKADIIVCGEAYGKIRALYDDCGKLVDKAGPSNAVQVIGLNNVPLAGDEFEVVDNLDVARERANGRAEALRIERISAKAGEGKVTLSAIAASVSSAKQVGIDTHELNVILKVDFQGSIEAIRQAIQTLPQENVSLRFLLQGPGDVSVSDVDLAVASEGIIFGFNVRAPGSVKNYAKKKGVEIRMYKVIYDLIDDLRKAMEGLLEPAEEEVPIGSAKVRAVFSSGSGKVAGCMITTGKVVQDCNVRVLRKGKEVYVGSLDSLRRVKETVKEVGAGLECGIGVDDFDEWEEGDIIEAFNTVNKARTLEEASATVTAALKDAGVQL

SEQ ID NO: 185788 - protein, 286 aa, Zea Mays
MERSVHCMMTVGSSLTKQDHPMQCRANGRAEALRIERISAKAGEGKVTLSAIAASVSSAKQVGIDTHELNVILKVDFQGSIEAIRQAIQTLPQENVSLRFLLQGPGDVSVNDVDLAVALEGIIFGFNVRAPGSVKNYAKKKGVEIRMYKVIYDLIDDLRKAMEGLLEPAEEEVPIGSAKVRAVFSSGSGKVAGCMITTRKVVQDCNVRVLRKGKEVYVCSLDSLRRVKETVKEVGAGLECGIGVDDFDEWEEGDIIEAFSTVNKTRTLEEASVTLTVALKDAGVQL

SEQ ID NO: 185789 - protein, 170 aa, Zea Mays
MSNDDGLVDEDTTDVPISGVPVRKGRRWSKAKRRAARLEAMQAEEPVRVEILEVGEEGMLIEDLAYELAIGESEILRFLSVRGVMLDNVQTLDKDLVKMVCMEYDVEVLESGPVKVEEMAKKKEFLDDEDLDKLEVRPPIVTIMGHVDHGKVLRLMLTLGTHNFSKVLVV

SEQ ID NO: 185790 - protein, 89 aa, Zea Mays
MKKKFTENLLSADLHGALLIECKRNHDSGYCRDVWNYIRGQPLPGLPKAGSVFVLQADRWKFTLIGDKLSPREKLKEDQRQQRAQSLIR

SEQ ID NO: 185791 - protein, 516 aa, Zea Mays
MASPASVTNLGSNGRSGPLPAAAARRAQLVTRIRFTGFDGIRRWQYEPGRLCRCMVVTNLIEEKVVQFSSRGSVSVKADDDNDLLLKPPQKPVRSNGPPESMKTASLPDQKPAGATLDDREKVRESLDAVLEKAEKLEASSFGNADGGNLGSRQSNVSMSNGPGPTAVEEGGNSRKTKTLKSVWRKGNPVPTVRKVIREQPRTETRSQSIPVAKPSVSSASKPSPLLLSKPSVAQPPRRPIKSDTSNEKKGPILIDKFASKRAAVDPIVPEELLDPLKPVRGPPAKVRVDRRKKPDTQAGSRRRMSNDDGLVDEDTTDVPISGVPVRKGRRWSKAKRRAARLEAMQAEEPVRVEILEVGEEGMLIEDLAYELAIGESEILRFLSVRGVMLDNVQTLDKDLVKMVCMEYDVEVLESGPVKVEEMAKKKEFLDDEDLDKLEVRPPIVTIMGHVDHGKTTLLDYIRKSKLVASEAGGITQGIGAYQVLLPVDGNHQACVFLDTPGHEISGVWCNESSRS

SEQ ID NO: 185792 - protein, 377 aa, Zea Mays
MAAVKVDKATNELLLGPDWTLNIDICDAVNSDHGQGKEVIKALKKRIQHKNANVQFLALTLLETLIKNCGDHVHYQVVERNILEEMMKIVKKKADMQVRDKILMLLDSWQDAFGGPGGKHPHYYWAYAELKRSGVEFPKRSPDAASMFISPVTQPESLPTYLQAGYGMPVDSSSRLDEAMSSNGAPLSISDLERMLGAVELLNEMLRAVNPNEKDAANDEIITELVTQCRSYQKKIMSSVSLVRDEDLLGQALDLNDRLQILLEKHDSIASCSPSSADVIDVVCEVPSGTAPNQGTNFPPQAALRTAIVPTNVLDDEDEENEDDEFSMLARSPQTPRAPLHQPSMMKQQALQPLFPIQHRHQLRTTHCLRTILQPRQ

SEQ ID NO: 185793 - protein, 200 aa, Zea Mays
MAAVKVDKATNELLLGPDWTLNIDICDAVNSDHGQGKEVIKALKKRIQHKNANVQFLALTLLETLIKNCGDHVHYQVVERNILEEMMKIVKKKADMQVRDKILMLLDSWQDAFGGPGGKHPHYYWAYAELKPESLPTYLQAGYGMPVDSSSRLDEAMSSNGAPLSISDLERMLGAVELLNEMLRAVNPNEKDEDELAPLI

SEQ ID NO: 185794 - protein, 392 aa, Zea Mays
MLGAVELLNEMLRAVNPNEKDAANDEIITELVTQCRSYQKKIMSSVSLVRDEDLLGQALDLNDRLQILLEKHDSIASCSPSSADVIDVVCEVPSGTAPNQGTNFPPQAALRTAIVPTNVLDDEDEENEDDEFSMLARRNSRFQPTNTQSTSSPTVHDETASSTASVPYTASPSVANNALPPHDPPAPPVRVSPEEQVMSDLLALTVSSNPSPSSYTPVTPEPGRLNQSSAPTGELPRAYHGDQGHVSAPYVAPWAQPQSQTAGSQQPTRTQAQVSYSSYAYPPPPWASQDSTESNPFVAAASSSQQYQSTSRTPTMPPNLRPLLQQSHSFGVPLPTASLDSPINGNLKQPLSAGARRPSYVSSNKFFDDLFERNSDGSLKVGSTRHSDVYGK

SEQ ID NO: 185795 - protein, 545 aa, Zea Mays
MAAVKVDKATNELLLGPDWTLNIDICDAVNSDHGQGKEVIKALKKRIQHKNANVQFLALTLLETLIKNCGDHVHYQVVERNILEEMMKIVKKKRSGVEFPKRSPDAASMFISPVTQPESLPTYLQAGYGMPVDSSSRLDEAMSSNGAPLSISDLERMLGAVELLNEMLRAVNPNEKDAANDEIITELVTQCRSYQKKIMSSVSLVRDEDLLGQALDLNDRLQILLEKHDSIASCSPSSADVIDVVCEVPSGTAPNQGTNFPPQAALRTAIVPTNVLDDEDEENEDDEFSMLARRFQPTNTQSTSSPTVHDETASSTASVPYTASPSVANNALPPHDPPAPPVRVSPEEQVMSDLLALTVSSNPSPSSYTPVTPEPGRLNQSSAPTGELPRAYHGDQGHVSAPYVAPWAQPQSQTAGSQQPTRTQAQVSYSSYAYPPPPWASQDSTESNPFVAAASSSQQYQSTSRTPTMPPNLRPLLQQSHSFGVPLPTASLDSPINGNLKQPLSAGARRPSYVSSNKFFDDLFERNSDGSLKVGSTRHSDVYGK

SEQ ID NO: 185796 - protein, 455 aa, Zea Mays
MAAVKVDKATNELLLGPDWTLNIDICDAVNSDHGQGKEVIKALKKRIQHKNANVQFLALTLLETLIKNCGDHVHYQVVERNILEEMMKIVKKKADMQVRDKILMLLDSWQDAFGGPGGKHPHYYWAYAELKRSGVEFPKRSPDAASMFISPVTQPESLPTYLQAGYGMPVDSSSRLDEAMSSNGAPLSISDLERMLGAVELLNEMLRAVNPNEKDAANDEIITELVTQCRSYQKKIMSSVSLVRDEDLLGQALDLNDRLQILLEKHDSIASCSPSSADVIDVVCEVPSGTAPNQGTNFPPQAALRTAIVPTNVLDDEDEENEDDEFSMLARRNSRFQPTNTQSTSSPTVHDETASSTASVPYTASPSVANNALPPHDPPAPPVRVSPEEQVSFRGLIMETKDTCLHLTSLRGLSRSPRPQEVSNRHALRHRYLTARMLTHRRHGRHRTAPNRTLL

SEQ ID NO: 185797 - protein, 60 aa, Zea Mays
MGNSKQNELTKETTVQATGVASNLVEAIQGAGFKLQTLSLSFDDFDEPAAGAGGTVQSSE

SEQ ID NO: 185798 - protein, 401 aa, Zea Mays
MERQGMEGNNLLHFLDTPSAHYRRTCDGFEAQHGGDEHSETSDTDPANAREMLEYLLNQPANKICADCGSPDPKWVWSPRFRLQLNCFCTCRALPFGTFICIKCSGTHRSLGVHISKVISVNLDEWTDDEVNCLAESGGNSVVNSRYEAFLPENKKLKQDCSTEERNDFIRKKYQFQQFVCDPQFSCPLPLNRKHAPPDKNHQQHNSSKYGFGHTFRNSWRKKDSDSKSLKKMSDVGMIEFVGLVKVNIVKGTDLAVRDVMSSDPYVLIHLGHQSMKTKVIKNTLNPIWNERLMLSIPDPIPPLKLQVFDKDTFSSDDRMGEAEVDIRPLIAATKEHENSTITESTELYRWSASEDSNGVLAKDSVISVASGKVKQEITLRLQNVERGEVEIEIECVPLSQ

SEQ ID NO: 185799 - protein, 232 aa, Zea Mays
MDGGRAAAVGGDPSPIAAPSNPPALSSRPVDVSSFTHTPCYCEENVYMLCNELIRTGVADPAGTDLYVPLWHQKAGHSDDGFICWDYHVICIQSRRSKEVLDFVWDLDSDLPFPSPLIQYVSEAIQPLSFGNSRYARLFRVVHAPVFLQSFASDRSHMKDPEGNWIQLPPKYEPIVAEDGTTNNLNEYIMMSVGDVADRERMANDVYCNKHGVVLNETIFPEFFAQLPAPHT

SEQ ID NO: 185800 - protein, 197 aa, Zea Mays
MSPRSPIPRATAKKMFTCYVTSLLEPEWLILRALIFMLFSYPTRKKSVSWYFLMCIWKSRRSKEVLDFVWDLDSDLPFPSPLIQYVSEAIQPLSFGNSRYARLFRVVHAPVFLQSFASDRSHMKDPEGNWIQLPPKYEPIVAEDGTTNNLNEYIMMSVGDVADRERMANDVYCNKHGVVLNETIFPEFFAQLPAPHT

SEQ ID NO: 185801 - protein, 104 aa, Zea Mays
MDGGRAAAVGGDPSPIAAPSNPPALSSRPVDVSSFTHTPCYCEENVYMLCNELIRTGVADPAGTDLYVVFISNEEKKVPLWHQKAGHSDDGFICWDYHVICIQV

SEQ ID NO: 185802 - protein, 219 aa, Zea Mays
MLCNELIRTGVADPAGTDLYVVFISNEEKKVIYCLFFYCWRSYFPSVGNFPSIQVPLWHQKAGHSDDGFICWDYHVICIQSRRSKEVLDFVWDLDSDLPFPSPLIQYVSEAIQPLSFGNSRYARLFRVVHAPVFLQSFASDRSHMKDPEGNWIQLPPKYEPIVAEDGTTNNLNEYIMMSVGDVADRERMANDVYCNKHGVVLNETIFPEFFAQLPAPHT

SEQ ID NO: 185803 - protein, 52 aa, Zea Mays
MLPMKIFVQVEVILPQDQPELGISAKDKLYLPISRAKHFFVNHILILHQKYL

SEQ ID NO: 185804 - protein, 209 aa, Zea Mays
MKQMSSAKFVESAEAHFRMNLDPKYNDQQLRATVNLPKGTGQSVKIAVLTQGEKIDEARAAGADIVGGEDLIEQIKGGFMEFDKLIASPDMMPKVAGLGKILGPRGLMPNPKAGTVSSNITQAIEEFKKGKVEYRVDKSGIVHIPFGKVDFPEEDLIANFMSVVRSVERNKPSGAKGIYWKTAYLCSSMGPSIKLNIKEMLDYGLESSD

SEQ ID NO: 185805 - protein, 226 aa, Zea Mays
MASPPPTSLSSPHLIHLRLQPLPSVPPLHLTTLPFLRSLPLHLHSLRLNRPHLPPLPLASSGSGSDITGSGGEDDLPPSGGGGGGGGGEGDGEGEGDGSEGDSVNRREALFVLAQLGRKLESLPADLAAAVEGGRIPGEIVRRFVDLEASPVFRWLLQFGGFKERLLADDLFLTKVAIECGVGIFTKTAAEYEKRRENFVKELDFVIADVGGGGHTCAQQGEAMAK

SEQ ID NO: 185806 - protein, 220 aa, Zea Mays
MPGRFHGSDLFLESGLGCDCRSVEYEKRRENFVKELDFVIADVVMAIVADFMLVWLPAPTVSLQPPLAMNSGAIAKFFYNCPDNAFQVALSGTSYSLLQRVGAILRNGAKLFAVGTSASLIGTGVTNALIKARQAASKDFAGEVENIPILSTSVAYGVYMAVSSNLRYQVLAGVIEQRMLEPLLHQHKLVLSAACFAVRTGNTFLGSLLWIDYARWIGVQ

SEQ ID NO: 185807 - protein, 516 aa, Zea Mays
MGSGSSKATTSSSSPTAAEAGGEVKRPNGSGKGRRGRSLLPLPSSSCFRGSTTPCEGDAAAAAVDFECNKGGETASLTSLTHTVKSHEDVLAMPKSHPSEGEAPPSSDSERDQDDDVLQNAATSTSTAANQLPNPSRRSRPRFGVNFGLSRAVSLGSSVACSILSSGLPPSANPGEGRGDVHDSSETGISQQGSAPTSGIDSTLDMLRDSVTAQARAAHQARRNLIESEDASFRSSYRRMGSHEPFEGSVRFSRTLSVGRLRDRVLRRPPFSDGLFTPSLLYDRAVWPSGNASARQDSAVMQRTNSDRSSEPRSDPSTSDMYNSSSERQASNGDLLERRSAFLERRRRIRSQVRALQRLGSRFENLSGHERSCILSGQHRTGNCNCRTGSRQGNPDEETSTRASISRIVMLAEALFEVLDEIHHQSAALSSSRPSFSSIGSVPAPREIVERLPSKVYRKPLKYQSEEAAQCYICLVEYEEGDCLRILPCHHEFHLTCVDKWLKEIHRSDAPIGKTS

SEQ ID NO: 185808 - protein, 361 aa, Zea Mays
MGSGSSKATTSSSSPTAAEAGGEVKRPNGSGKGRRGRSLLPLPSSSCFRGSTTPCEGDAAAAAVDFECNKGGETASLTSLTHTVKSHEDVLAMPKSHPSEGEAPPSSDSERDQDDDVLQNAATSTSTAANQLPNPSRRSRPRFGVNFGLSRAVSLGSSVACSILSSGLPPSANPGEGRGDVHDSSETGISQQGSAPTSGIDSTLDMLRDSVTAQARAAHQARRNLIESEDASFRSSYRRMGSHEPFEGSVRFSRTLSVGRLRDRVLRRPPFSDGLFTPSLLYDRAVWPSGNASARQDSAVMQRTNSDRSSEPRSDPSTSDMYNSSSERQASNGDLLERRSAFLERRRRIRSQSSTKVGQQV

SEQ ID NO: 185809 - protein, 137 aa, Zea Mays
MMSCQKSSMPFLSAIKNLVFCVMLVSLGVTLVFHFSHHHLVCLVPLNLYTVIVDFPVVIVSDFKYYLVIFDDFVHYLWMLPLHLKSVTFDTLTSFIAFVSTQFVVTIKALQYNNGREWRTTSPRRRGYNPLTRSTLV

SEQ ID NO: 185810 - protein, 460 aa, Zea Mays
MEEVELLVDAASRLSEPFLLVIVGEFNSGKSTFINALLGRQYLQEGVVPTTNEITLLSYSEVESENFERCERHPDGQFMCYLSVPILKEMNLVDTPGTNVILQRQQRLTEEYVPRADLVLFVLSSDRPLTESEVGFLQYVQQWKKKVVFILNKLDLYRNSNELEEATAFVKENAMKLLTAEDVTLFPVSSRSALEAKLSYSKNSDGKHSTEAMYNDPRWRSSKFFELEDYLLSFLDSSTENGKERVRLKLETPIGIADRLLTSCQRLVKLEYEKAVEDLASIKDLVYGANNYAIKLKSDSSSWQNQISSLIERAKGRAVTLMESTLQLSNIDLIFAYTIKGKTGSSMRATSFVQNDILSPTLDDAVNLLGDYSTWLSSSNTREANVYLECFCERWDALVAPEERALLDPNGLVNEGEKLTIKALEGFNASAAAKDFEEEIRELVVKLPADSFLDDELLVP

SEQ ID NO: 185811 - protein, 917 aa, Zea Mays
MFAASNATATRLILPRPSVPFRALLIPRRRGRLRRAVHANAVAGGGGGSEGVAKEPPRTLFPGGFKRPEIQVPALVLRVGTEEALRCGDEVADAVSRGVGIVVLEAGEEGGGRSYEAARALRATVGDRAYLLIAERVDVASAVGASGVVLADDGIPAIVARSMMMKSNADSIYLPIVARRIQSANSALSASSSEGADFLIVNTGSGDFVDVINDVVGQHVKIPIFVTLNHLSEGTYSDFTSRLLQSGASGVVTSLAGMELLNDDLIKKDFTKVGSAEELPQASYSSAGMLEDVNNVMVLTRDCEKTKVAGFTKLDEEVIKLIEIEKPILNEAITIIRKAAPMMEEVELLVDAASRLSEPFLLVIVGEFNSGKSTFINALLGRQYLQEGVVPTTNEITLLSYSEVESENFERCERHPDGQFMCYLSVPILKEMNLVDTPGTNVILQRQQRLTEEYVPRADLVLFVLSSDRPLTESEVGFLQYVQQWKKKVVFILNKLDLYRNSNELEEATAFVKENAMKLLTAEDVTLFPVSSRSALEAKLSYSKNSDGKHSTEAMYNDPRWRSSKFFELEDYLLSFLDSSTENGKERVRLKLETPIGIADRLLTSCQRLVKLEYEKAVEDLASIKDLVYGANNYAIKLKSDSSSWQNQISSLIERAKGRAVTLMESTLQLSNIDLIFAYTIKGKTGSSMRATSFVQNDILSPTLDDAVNLLGDYSTWLSSSNTREANVYLECFCERWDALVAPEERALLDPNGLVNEGEKLTIKALEGFNASAAAKDFEEEIRELAFGTFGGLGIAGLSASLLTSVLSTTLEDLLALALCSAGGFFVLSSFPGRRKHAIDKINKAADELSRKVDEAIQKDISQSANNLIRFVEVISKPYQEACQRKIDWLQGVQGELSAVERKLQTLKVEIQNLNGS

SEQ ID NO: 185812 - protein, 382 aa, Zea Mays
MCYLSVPILKEMNLVDTPGTNVILQRQQRLTEEYVPRADLVLFVLSSDRPLTESEVGFLQYVQQWKKKVVFILNKLDLYRNSNELEEATAFVKENAMKLLTAEDVTLFPVSSRSALEAKLSYSKNSDGKHSTEAMYNDPRWRSSKFFELEDYLLSFLDSSTENGKERVRLKLETPIGIADRLLTSCQRLVKLEYEKAVEDLASIKDLVYGANNYAIKLKSDSSSWQNQISSLIERAKGRAVTLMESTLQLSNIDLIFAYTIKGKTGSSMRATSFVQNDILSPTLDDAVNLLGDYSTWLSSSNTREANVYLECFCERWDALVAPEERALLDPNGLVNEGEKLTIKALEGFNASAAAKDFEEEIRELVVKLPADSFLDDELLVP

SEQ ID NO: 185813 - protein, 100 aa, Zea Mays
MVIAPLPSLLILGTASASLYLVVVVYLLSIPFAKIYHKSKADLEVSQPFLLSLDFVHVFFFCFIHVFLAVCNMNCVGALDGYSSFLGGRTNVAGLVGLLI

SEQ ID NO: 185814 - protein, 228 aa, Zea Mays
MERYHFFASSCRQFGFGVRSLSESLQDERESDGALATVLDVLKRIHATFFDMAAETDLSSRDIRQVIKTLRKEILQGCKIVFSRVFPNNTRPQEQMVWKMAEYLGAVCVKDVDPSVTHVVTVDLGTEKARWGLNNKKFLVHPRWIEAANFRWHRQPEEDFPVTAPKEKSKEKDSDNDVAGKKETSEDKENTAAGMKETRNDEGNVTGKDKADAKENVVTTSATCPADS

SEQ ID NO: 185815 - protein, 301 aa, Zea Mays
MSLTEAPSPSPSSSSGSDDFAAFLASELELTSGADSAFPGDPSSVFPATDDEGEDEDPEELEVEAIEQNGTKRRRVEEQCQDQGTSVRPDKIPTGASKIVQVEACPHPGHFGGLCIICGKPQDEEDVSGVAFGYIHKGLRLGTSEIDRLRGADLKNLLRERKLVLILDLDHTLINSTKLQDISSAEKDLGIQSAASKDDPNRSIFALDLMPMLTKLRPFVREFLKEASNMFEMYIYTMGDKAYAIEIAKLLDPSNIYFPSKVISNSDCTQRHQKGLDVILGAESVAVILDDTEYGRSIKRT

SEQ ID NO: 185816 - protein, 469 aa, Zea Mays
MSLTEAPSPSPSSSSGSDDFAAFLASELELTSGADSAFPGDPSSVFPATDDEGEDEDPEELEVEAIEQNGTKRRRVEEQCQDQGTSVRPDKIPTGASKIVQVEACPHPGHFGGLCIICGKPQDEEDVSGVAFGYIHKGLRLGTSEIDRLRGADLKNLLRERKLVLILDLDHTLINSTKLQDISSAEKDLGIQSAASKVISNSDCTQRHQKGLDVILGAESVAVILDDTEYVWQKHKENLILMERYHFFASSCRQFGFGVRSLSESLQDERESDGALATVLDVLKRIHATFFDMAAETDLSSRDIRQVIKTLRKEILQGCKIVFSRVFPNNTRPQEQMVWKMAEYLGAVCVKDVDPSVTHVVTVDLGTEKARWGLNNKKFLVHPRWIEAANFRWHRQPEEDFPVTAPKEKSKEKDSDNDVAGKKETSEDKENTAAGMKETRNDEGNVTGKDKADAKENVVTTSATCPADS

SEQ ID NO: 185817 - protein, 557 aa, Zea Mays
MSVAVGKRVLDTGWLAARSTEVALTGVQLTTTHPPAADPAPAAPWMSAAVPGTVLGTLLKNKLIPDPFYGLNNQAIIDIADAGREYYTFWFFTTFQCALSGNQHATLNFRGINYSAEMYLNGHKEVLPKGMFRRHNIDITDILHPDGNNLLAVLVHPPDHPGKIPPQGGQGGDHEIGKDVATQYVEGWDWMCPIRDRNTGIWDEVSISISGPVNITDPHLVSTFHDDFKRSYLHCTLQLENKSSWIADCTLKIQVSTELEGNICLVEHLQSYAITVPPQSDIEYTIPSLFFYKPNLWWPNGMGKQSLYNIEISVDVKGFGESDSWSHYFGFRKIESTIDDSTGGRIFKVNGEPIFIRGGNWILSDGLLRLTKKRYMTDIKFHADMNFNMLRCWGGGLAERPDFYHFCDVYGLMALKLPVLVPIMTESTFPKWWKKSKKVWQEFWITGDVDGRGIPVSNPNGPLDHDLFLLCARDTVKLLRNHASLALWVGGNEQVPPVDINKALKNDLKLHPMFDQCGMVLRMVKGTSLMVHMRFSIQRVFSRTASTNMGSTLKLGL

SEQ ID NO: 185818 - protein, 886 aa, Zea Mays
MYLNGHKEVLPKGMFRRHNIDITDILHPDGNNLLAVLVHPPDHPGKIPPQGGQGGDHEIGKDVATQYVEGWDWMCPIRDRNTGIWDEVSISISGPVNITDPHLVSTFHDDFKRSYLHCTLQLENKSSWIADCTLKIQVSTELEGNICLVEHLQSYAITVPPQSDIEYTIPSLFFYKPNLWWPNGMGKQSLYNIEISVDVKGFGESDSWSHYFGFRKIESTIDDSTGGRIFKVNGEPIFIRGGNWILSDGLLRLTKKRYMTDIKFHADMNFNMLRCWGGGLAERPDFYHFCDVYGLMALKLPVLVPIMTESTFPKWWKKSKKVWQEFWITGDVDGRGIPVSNPNGPLDHDLFLLCARDTVKLLRNHASLALWVGGNEQVPPVDINKALKNDLKLHPMFVSYQTSKSEVIYLSEESTDPSKYLDGTRVYVQGSMWDGFANGKGDFTDGPYEIQYPESFFKDSFYKYGFNPEVGSVGVPVAATIRATMPPVGWSIPILKKRIDGYIEEVPNPIWDYHKYIPYSKPGKVHDQIELYGAPKDLDDFCEKAQLVNYVQYRALLEGWTSFMWTKFTGVLIWKTQNPWTGLRGQFYDHLQDQTAGFYGCRCAAQPIHVQLNLVTYFVEVVNTTADELKDMAVEISVWDLDGACPYYKVTEKIVIPPKKVKQIIEMKYPKMKDAKPVYFLLLKLFRLSDNGTISRNFYWLHLPGQDYKSLEQYQQKKIPLKIDSDVSVSGTRHKVRMTVENISKKSVVDSTRSVSAMDLGDASGSHSTRKETTRKGNGSDGLWRKIRSGLGVARPSDNRRTLEVSGTDSGVAFFLHFSVHTSESSTDGEEYNDTRILPVHYSDNYFSLTPGENMAVDISFEAPQGSSPRVVLRGWNHHLDHAVMI

SEQ ID NO: 185819 - protein, 455 aa, Zea Mays
MWDGFANGKGDFTDGPYEIQYPESFFKDSFYKYGFNPEVGSVGVPVAATIRATMPPVGWSIPILKKRIDGYIEEVPNPIWDYHKYIPYSKPGKVHDQIELYGAPKDLDDFCEKAQLVNYVQYRALLEGWTSFMWTKFTGVLIWKTQNPWTGLRGQFYDHLQDQTAGFYGCRCAAQPIHVQLNLVTYFVEVVNTTADELKDMAVEISVWDLDGACPYYKVTEKIVIPPKKVKQIIEMKYPKMKDAKPVYFLLLKLFRLSDNGTISRNFYWLHLPGQDYKSLEQYQQKKIPLKIDSDVSVSGTRHKVRMTVENISKKSVVDSTRSVSAMDLGDASGSHSTRKETTRKGNGSDGLWRKIRSGLGVARPSDNRRTLEVSGTDSGVAFFLHFSVHTSESSTDGEEYNDTRILPVHYSDNYFSLTPGENMAVDISFEAPQGSSPRVVLRGWNHHLDHAVMI

SEQ ID NO: 185820 - protein, 491 aa, Zea Mays
MFVSYQTSKSEVIYLSEESTDPSKYLDGTRVYVQGSMWDGFANGKGDFTDGPYEIQYPESFFKDSFYKYGFNPEVGSVGVPVAATIRATMPPVGWSIPILKKRIDGYIEEVPNPIWDYHKYIPYSKPGKVHDQIELYGAPKDLDDFCEKAQLVNYVQYRALLEGWTSFMWTKFTGVLIWKTQNPWTGLRGQFYDHLQDQTAGFYGCRCAAQPIHVQLNLVTYFVEVVNTTADELKDMAVEISVWDLDGACPYYKVTEKIVIPPKKVKQIIEMKYPKMKDAKPVYFLLLKLFRLSDNGTISRNFYWLHLPGQDYKSLEQYQQKKIPLKIDSDVSVSGTRHKVRMTVENISKKSVVDSTRSVSAMDLGDASGSHSTRKETTRKGNGSDGLWRKIRSGLGVARPSDNRRTLEVSGTDSGVAFFLHFSVHTSESSTDGEEYNDTRILPVHYSDNYFSLTPGENMAVDISFEAPQGSSPRVVLRGWNHHLDHAVMI

SEQ ID NO: 185821 - protein, 363 aa, Zea Mays
MAADGFMLTRHRGLQCEPAVIRALKVTFCHCLCRRCGIVHDESRSRCLSQEHLASRTGTAGQRSTRLDALSGLQSCSPAAQPPASTLSLYLREPAGKEGSNTQGRMGVGECKSNDYGAAAYWDARYSSGSPASAAAGCGFFDWYQTYPALRPLLRARVPTSSRVLMLGCGNSLLSEDMVKDGYEDIVNIDISSVVIEQMREKHKEITQLTYMQMDIRDMGFFGDESFDCVLDKGTLDAMMCADDAPHGAFKMLAEVARLLMPHGIYLLITYGAPKERVPLLDQSGCSWSIALYIMPTAGYQLRMSKGAQHLIMEEVTLTEGGQLPPDYVLKDPDSHFIYVCEKLEEKGTNCRDTDPKESTNAN

SEQ ID NO: 185822 - protein, 1041 aa, Zea Mays
MDRATPRVCGRRGVSQAAVEAAPSSSRARRRDKAPAVVMDLGDDDCGGGGARKTVGGAAGRCEGSTKAPLPLLPPMMVPAGAVALRTRSRRRAMLAAAVVEEAPTKKKKKEGAIPDAAEAPRGHGSKAAATSMATSSHKRRAGTSRSTSRDKRRARSGRASEPARVGRARKRKRNELEAPARRERVKAPCVSESDDNSGRGDDASHDGDAEPRVGVAIGTDLVNGDHPAAKEVVEGAGDEDTGDGGNSGLASTADVFAEEMAPFEDDYDDEMLEEQLVGDVIRAYSNGRNFDSDGVDWEAEDEMEFNDDADNSDFMDDADDSDFMDDAYEGGNSKPIQNHAKLEIQDWVNQKVVLSGGRCEARGEGDLEEELDVGKEADEEDVEPKSEAAPGSDKRVLQLEILGSDEEIKVLENMSSAPSRKASVQSKLPTIPSCVAWRTRSSWGVNQDRLSYDTYFEELSDEPKEDDDDTEVELDEVEDDNNDDDSSDAYDKDDEEKEEEEEEAERRKLNNRICTSDEDMINITVPTSRYDMFKKKNSSRYDIEWVEDEDASVDMLQPVSFKKDSSWKPVAVGNDTFTEQQKRSRFTWELERRKKLKLEMKTNPLHERDLDSDPNSSGSDQIRKYGFKSDGSHKVDRKKKHTSPKSGKKPSSAIILKRQSLLKLLVDKMSGDKSLASFPFDQNPQLQFIFKEMHPLVFSFGDEDLVAADRPEQDVGLDMLWADFDFALESENIGTYYDDECQEGNQLDFSLAPVTPCSRGKHEFVIDDQIGIRCKYCSLVNLEIKFMFPSLVSVFAEKSAWPNDKGVKNTLMFHDLYEQGVNDTEQSQDIHQYGTVWNLIPGVISTMYEHQREAFEFMWTNLVGDIRLDEIKHGAKPDVVGGCVICHAPGTGKTRLAIVFIQTYMKVFPDCRPVIIAPRGMLFAWDEEFKKWNVDVPFHILNTTDYTGKEDREICKLIKKEHRTEKLTRLVKLLSWNKGHGILGISYGLYTKLTSEKPGCTEENKARHAWEDPAGFIFFIIVYRTMNLQFCILGRTKSRS

SEQ ID NO: 185823 - protein, 676 aa, Zea Mays
MQRRRPRAAHRCRFLTAAAASFHIHLLLLSAVSAAGVDDDADTPAILDTVCAATQTVDPEAFDMSFDTTMEMIYQNVKSSGFGAVGSGEGSNTVFGLAQCMSYLSPTDCQLCYGQARVKLPHCLPADGGRIYLDGCFLRYGGDNFTAAATDASDAAVCSNATAPAGFAAAAAALVRNVTAAAPGAKDYYYAAASGRGAYAAAQCWRSLNASACAACVGSARDQLVRECLPAAPEGYGLNAGCVVRYSTRAFYLPVNAGGGSGSGRSSARRIAVIVVASVLSALLVAMGILFIWTRMRSRSRDDLLHDDTDMDGSGGMIRAIAASHLSFKYQELRTATGEFSQTNKLGQGGYGSVYKGVLADGREVAVKRLFFSTRQWAEQFFNEVKLVSQVRHKNLVKLLGCSVDGPESLLVYERAQEGRAGLGAEVRDRAGHRGGPLLPAQRFGGQDHTPGHQGWQRPAGRQVQAKDRRLRPRQEHHGRPEPSQHRPRRNFWIHGSRVHRPRAAHGEGRHLQLRRADPRDRHWQEEQQLGGVVGRRPFTHGTDMESLQHRHPDGAVGPEPPRAVLGGGCPPGVPRRVVVHPSVTEPSAADVEGGGDAQRRQGGASPAHPASVHQHHGAQHQERQLRVAVLAEPALNEWGAGQVKRVYGVVLVTLFSEVEEMFDFNFLIMDILLIW

SEQ ID NO: 185824 - protein, 54 aa, Zea Mays
MLNNSPSKRYTHYNLQVGCPMIVLLDGSSVNPNSYTDTKTKDVIKDNQSVNIGD

SEQ ID NO: 185825 - protein, 262 aa, Zea Mays
MITAAPALPMFLRLCPASPFLLRPSLHVPSSRRPTPSRLSSFRPARPLFPISAVEKTNEAAAAGEGELEGMPPEFYDEEWQARQRERTKEWHAYRQKEEAEEERITNEYREIGMRLKAYPQEEVRKARILVSSFIRAGGDVEEEIEKAAERGELTELVLMVIWNRLDIARRDDERDAIRSLDLLYRRVETEILKSEATPAMRLLNDLLNLHDGGDNEKWLKKCRKRMLEVFPREDPFTVVFPAGFNMENGELSYRLRMMIFF

SEQ ID NO: 185826 - protein, 251 aa, Zea Mays
MITAAPALPMFLRLCPASPFLLRPSLHVPSSRRPTPSRLSSFRPARPLFPISAVEKTNEAAAAGEGELEGMPPEFYDEEWQARQRERTKEWHAYRQKEEAEEERITNEYREIGMRLKAYPQEEVRKARILVSSFIRAGGDVEEEIEKAAERGELTELVLMVIWNRLDIARRDDERDAIRSLDLLYRRVETEILKSEATPAMRLLNDLLNLHDGGDNEKWLKKCRKRMLEVFPREDPFTVVFPAGFNMENGS

SEQ ID NO: 185827 - protein, 281 aa, Zea Mays
MITAAPALPMFLRLCPASPFLLRPSLHVPSSRRPTPSRLSSFRPARPLFPISAVEKTNEAAAAGEGELEGMPPEFYDEEWQARQRERTKEWHAYRQKEEAEEERITNEYREIGMRLKAYPQEEVRKARILVSSFIRAGGDVEEEIEKAAERGELTELVLMVIWNRLDIARRDDERDAIRSLDLLYRRVETEILKSEATPAMRLLNDLLNLHDGGDNEKWLKKCRKRMLEVFPREDPFTVVFPAGFNMENVCYFSLSGLPISSEDSVQDLSKSSITNLQKIH

SEQ ID NO: 185828 - protein, 122 aa, Zea Mays
MVIWNRLDIARRDDERDAIRSLDLLYRRVETEILKSEATPAMRLLNDLLNLHDGGDNEKWLKKCRKRMLEVFPREDPFTVVFPAGFNMENVCYFSLSGLPISSEDSVQDLSKSSITNLQKIH

SEQ ID NO: 185829 - protein, 85 aa, Zea Mays
MIAVASSFPSRAHAAPFGSGTLPPPSTRRSTSLRHPRVSALGGGLEGEPGKILDPRATPFQILGLDAAAGYSAAELKAAFRARCI

SEQ ID NO: 185830 - protein, 225 aa, Zea Mays
MIAVASSFPSRAHAAPFGSGTLPPPSTRRSTSLRHPRVSALGGGLEGEPGKILDPRATPFQILGLDAAAGYSAAELKAAFRARVKEFHPDVCKDPENADLIMRRVIEAYQMLSGNQEMMFERNNVDPFDEPECEARDIFVNELLCIGTGCPYSCVKRAPHVFSFSDDTGTARAISQGNGEDDLVQLAVGQCPRKCIYYVTPCQRTILEDVLASSGFPPFKSEVRE

SEQ ID NO: 185831 - protein, 82 aa, Zea Mays
MATAGCPYSCVKRAPHVFSFSDDTGTARAISQGNGEDDLVQLAVGQCPRKCIYYVTPCQRTILEDVLASSSGFPPFKSEVRE

SEQ ID NO: 185832 - protein, 94 aa, Zea Mays
MYSVHNYVSCSFFLLQFSPTIFFDLGYLSLFTSITLYFAPTTFYFTSHSYFTPPNYCLSWTQTLMAKDEILDMLHHTMMDTTMKLTSESSTRRR

SEQ ID NO: 185833 - protein, 227 aa, Zea Mays
MAPKLPVVLLAACAVLLALATPLLAGDPDMLQDICVADYESLEGPLRVNGFPCKREANVTADDFFFGGLAAAADVYSGNPMGSAATAADVSVLPGLNTLGVSMARTDFAPSGGVSPPHVHPRATEILFVVEGTLEVGFVTSANRLFSRAVGKGEVFVFPRGLVHFQRIVGAAPAVAISAFNAQLPGTQTVAGALFGAAPAVPTDVLARALQIDGGAIEYIKSKFAPN

SEQ ID NO: 185834 - protein, 218 aa, Zea Mays
MPLPPQPVRRSCPILLAVNDTCGVTRMTSTCAARVPSLRWAPQRGWVGSWVSVRPAKCRTSGGHAVVCAAVSFRPCIDIHKGKVKQIVGSTLRDLANDSMELVTNFESDKSPAEFAKFYKADELLGGHVIMLGANPSSQAAALEALRAYPGGLQVGGGINLENAMSYLNEGASHVIVTSYVFSDGKMNTERLRKLVELVGKQRLVLDLSCRKKVAKVQ

SEQ ID NO: 185835 - protein, 153 aa, Zea Mays
MPLPPQPVRRSCPILLAVNDTCGVTRMTSTCAARVPSLRWAPQRGWVGSWVSVRPAKCRTSGGHAVVCAAVSFRPCIDIHKGKVKQIVGSTLRDLANDSMELVTNFESDKSPAEFAKFYKADELLGGHVIMLGANPSSQAAALEALRAYPVCV

SEQ ID NO: 185836 - protein, 377 aa, Zea Mays
MRQCEAGCFMRETNRFFGPAHASSHGRERIGPPPPLCPSVHNLVARVSYSPVRRSCPILLAVNDTCGVTRMTSTCAARVPSLRWAPQRGWVGSWVSVRPAKCRTSGGHAVVCAAVSFRPCIDIHKGKVKQIVGSTLRDLANDSMELVTNFESDKSPAEFAKFYKADELLGGHVIMLGANPSSQAAALEALRAYPGGLQVGGGINLENAMSYLNEGASHVIVTSYVFSDGKMNTERLRKLVELVGKQRLVLDLSCRKKDGRYTIVTDRWQKFSDVFVDEPTLEYLAAFADEFLVHGVDVEGKRLGIDEELVELLGHYSPIPVTYAGGVSTMDDLERIKKAGKSRVDVTIGSALDIFGGDLPYKDVVLWHRKQSMVGQV

SEQ ID NO: 185837 - protein, 192 aa, Zea Mays
MTSTCAARVPSLRWAPQRGWVGSWVSVRPAKCRTSGGHAVVCAAVSFRPCIDIHKGKVKQIVGSTLRDLANDSMELVTNFESDKSPAEFAKFYKADELLGGHVIMLGANPSSQAAALEALRAYPGGLQVGGGINLENAMSYLNEGASHVIVTSYVFSDGKMNTERLRKLVELVGKQRLVLDLSCRKKVAKVQ

SEQ ID NO: 185838 - protein, 216 aa, Zea Mays
MPLPPQPVRRSCPILLAVNDTCGVTRMTSTCAARVPSLRWAPQRGWVGSWVSVRPAKCRTSGGHAVVCAAVSFRPCIDIHKGKVKQIVGSTLRDLANDSMELVTNFESDKSPAEFAKFYKADELLGGHVIMLGANPSSQAAALEALRAYPGGLQVGGGINLENAMSYLNEGASHVIVTSYVFSDGKMNTERLRKLVELVGKQRLVLDLSCRKKVRN

SEQ ID NO: 185839 - protein, 242 aa, Zea Mays
MRFSALLLIVALLCLGGGGGGRVTASTEFNFPAVFNFGDSNSDTGGRVAAGFESIFPPYGSSFFGGPAGRFCDGRLVIDFLMEAMDMPLLNAYLDSLGTPSFRTGVNFAQAGCSITPAKPTSVSPFSFGLQIKQFFAFKNKVTKLLSEGDMHSRYIPQQDYFSEGLYTFDIGQNDLAGEFYSRTEDQVIASIPTILLEFENGLKKLYDQGARKFWIHNTGPLGCLPQNITRKLRISISPRRS

SEQ ID NO: 185840 - protein, 310 aa, Zea Mays
MRFSALLLIVALLCLGGGGGGRVTASTEFNFPAVFNFGDSNSDTGGRVAAGFESIFPPYGSSFFGGPAGRFCDGRLVIDFLMEAMDMPLLNAYLDSLGTPSFRTGVNFAQAGCSITPAKPTSVSPFSFGLQIKQFFAFKNKVTKLLSEGDMHSRYIPQQDYFSEGLYTFDIGQNDLAGEFYSRTEDQVIASIPTILLEFENGLKKLYDQGARKFWIHNTGPLGCLPQNIALFGKDPSQLDELHCVAKHNRAAKLFNLQLHALCTKLRAEFDGASITYVDIHTIKYSLIANYSRYAHYNEAALSIQNKCLQ

SEQ ID NO: 185841 - protein, 367 aa, Zea Mays
MRFSALLLIVALLCLGGGGGGRVTASTEFNFPAVFNFGDSNSDTGGRVAAGFESIFPPYGSSFFGGPAGRFCDGRLVIDFLSTPSFRTGVNFAQAGCSITPAKPTSVSPFSFGLQIKQFFAFKNKVTKLLSEGDMHSRYIPQQDYFSEGLYTFDIGQNDLAGEFYSRTEDQVIASIPTILLEFENGLKKLYDQGARKFWIHNTGPLGCLPQNIALFGKDPSQLDELHCVAKHNRAAKLFNLQLHALCTKLRAEFDGASITYVDIHTIKYSLIANYSRYGFEHATQACCGYGGPPLNYDGNVPCGHTVSLDGKMVTAKGCSDTTEFVNWDGIHYTEAANFHIASQILTGKYSDPPFVDKMPFVIKPRF

SEQ ID NO: 185842 - protein, 65 aa, Zea Mays
MQTSETELELARFRCIEEPSSSDRGNRHSMEYPYGQWPAGRAPESDAFSFHLGRPCKELLRPRTS

SEQ ID NO: 185843 - protein, 82 aa, Zea Mays
MSTMPLLCYINKYSKQLSLDTKPRSVISQSQTNNIKQTKMDGSMYTTDSQELSPLPPYPNSTINFYSLCMNDKEGKIIGIAP

SEQ ID NO: 185844 - protein, 63 aa, Zea Mays
MSKNLLNKTMIATIVWCNCNCWSDVIATYVKRLSRSWRKRGVGGKVKRFCRERAGATKTCGRD

SEQ ID NO: 185845 - protein, 568 aa, Zea Mays
MPSMTGSAGTLFTHKEVLPSMDDSVGNLFANRSTHEVGSSSCAGHEIHIDEIDVSVHPAQHTSSGEAKTGKQENINNECVGRLASVEGVSEQLNLHSDPIPNGSQHDLIPNLDVLSSNTNPEKMLANIYNEVGYSGLSSECFSQQLTGKHGGDIIAPQSHDQDPNKMLPVGDYFSQNSSMEFFSGYEDMHFDGDLLPPGSNDKVSSGILGTEKDSSVPVLDVPGRNKEESPAGTSGFIEQKDTSNVTNMLPDLNLYHLASTASTHSSHSVSIESLEDSVADARSNKNDLLPSLELVTKMIEDVELLEEKAKVAKRESSVAGTGILTKVEELREMLTHAKEANDMHAGEVFGEKAILTTEARELQSRLQRLSDERNKYLVIIEEIRQTLDQRLVAAQQEIAAAEKEKLEKEVAAQTLLNEQENMMNSIVEESRKLQKEAEENLKLKEFLVERSQIVDMLQGEMTGICEDVSLLKRVVDERLSLSKLQPSAMSSLSSSLHSSHHKSWTSSDRTTEANGSLDKHTLAEPASPARKDLNGDECTVQVSDGNDTGKGVLKRVDSKDGDGWELC

SEQ ID NO: 185846 - protein, 572 aa, Zea Mays
MGDLKEVFRSLKELFPEVDHRILKAIAVEHRKDVDSAVVTVLDEVMPSMTGSAGTLFTHKEVLPSMDDSVGNLFANRSTHEVGSSSCAGHEIHIDEIDVSVHPAQHTSSGEAKTGKQENINNECVGRLASVEGVSEQLNLHSDPIPNGSQHDLIPNLDVLSSNTNPEKMLANIYNEVGYSGLSSECFSQQLTGKHGGDIIAPQSHDQDPNKMLPVGDYFSQNSSMEFFSGYEDMHFDGDLLPPGSNDKVSSGILGTEKDSSVPVLDVPGRNKEESPAGTSGFIEQKDTSNVTNMLPDLNLYHLASTASTHSSHSVSIESLEDSVADARSNKNDLLPSLELVTKMIEDVELLEEKAKVAKRESSVAGTGILTKVEELREMLTHAKEANDMHAGEVFGEKAILTTEARELQSRLQRLSDERNKYLVIIEEIRQTLDQRLVAAQQEIAAAEKEKLEKEVAAQTLLNEQENMMNSIVEESRKLQKEAEENLKLKEFLVERSQIVDMLQGEMTGICEDVSLLKRVVDERLSLSKLQPSAMSSLSSSLHSSHHKSWTSSDRTTEANGCQMATTLVKAF

SEQ ID NO: 185847 - protein, 137 aa, Zea Mays
MLALGKILYKKRLACTPLRMMGFPAISHHHLRYDFISFYLLVQRVPLLVSCYLVNRPMITRAKDRLPVIPMTVTMICFYLALVSCIVMVQCMMQTKQCLYSCFYLCHGYCGNWEVSSPDVGPYMLASGRWFLLDGYC

SEQ ID NO: 185848 - protein, 542 aa, Zea Mays
MKRDRMILQLEEDCLNVYKQKVNQTRKQKADLLQELSLGEADIDKILSALGERETFPRSEKLGGTLMEQLAKIEPVLEDLRRRRDERVNEFKAIQSKIVCLQAEISGAIDHGDPAAPVVDENDLSLKRSGELKEHLNDLQTEKNGRLQKIDIQTNSIHEMCNIMSIDLKMALKDVHPSYAELGRSKPMSISNSSLDRLSEKVHALNHEKKQRLRKLQDLGSTLIELWNLMDTPTDEQRFFDHVTSLIKVSPTTAMPQGCLAHEIIEKVETEVKRLTKLKASKMKELVFKKLTDLEEIYRSVHMDIDSDSERQTLNDLIDSGRADLSELLARMDIRIAEAKEHALSRKDILEKVEKWTLASEEETWLDEYERDQNRYNAVRGAHINLKRAEKARILVSKLPSLLENLTAKIKAWEKEMGIPFIFNKVRLLDCLDEYTCTRQQKEEEKRRSRELKKLQEQFATEQGAKFGTKPSPIRPLSSRKPLGQSSNANIIGGTPTSRRVSTPMSRKGRPSSGRVQEAVKTAVAPANYVALPKDCSDISTL

SEQ ID NO: 185849 - protein, 573 aa, Zea Mays
MMVGSWAGNSSFPGSLVAPILELWGEIGQDEMKRDRMILQLEEDCLNVYKQKVNQTRKQKADLLQELSLGEADIDKILSALGERETFPRSEKLGGTLMEQLAKIEPVLEDLRRRRDERVNEFKAIQSKIVCLQAEISGAIDHGDPAAPVVDENDLSLKRSGELKEHLNDLQTEKNGRLQKIDIQTNSIHEMCNIMSIDLKMALKDVHPSYAELGRSKPMSISNSSLDRLSEKVHALNHEKKQRLRKLQDLGSTLIELWNLMDTPTDEQRFFDHVTSLIKVSPTTAMPQGCLAHEIIEKVETEVKRLTKLKASKMKELVFKKLTDLEEIYRSVHMDIDSDSERQTLNDLIDSGRADLSELLARMDIRIAEAKEHALSRKDILEKVEKWTLASEEETWLDEYERDQNRYNAVRGAHINLKRAEKARILVSKLPSLLENLTAKIKAWEKEMGIPFIFNKVRLLDCLDEYTCTRQQKEEEKRRSRELKKLQEQFATEQGAKFGTKPSPIRPLSSRKPLGQSSNANIIGGTPTSRRVSTPMSRKGRPSSGRVQEAVKTAVAPANYVALPKDCSDISTL

SEQ ID NO: 185850 - protein, 276 aa, Zea Mays
MANATVPELQPQVQAAGGRKVVDEVSGWLRVLDDGSVDRTWTGPPEVLPMMQPVAPYDVPRDGHTLHDLPGEPNFRIYLPEVDDDRKGGRLPVIVHFHGGGFCFSHPSWLMYHQFYSRLACAVPAVVVSVELPLAPERRLPAHIDTAVAAVRRLRCIALSEDGALGDKAGRRWRLGAPARRRLRSDPTGIRARNKEPVGAGGGRVGVLHAGHAGQVPGHGAACWRHQGAPVLVPHGSAGAAPGVRAAPADDGGRRREGPRPRHKGAPLQAFRGCLV

SEQ ID NO: 185851 - protein, 341 aa, Zea Mays
MSTSPAAADVSPLPPTAAADEAARATETVVVDERVASHVDPFLVEALDNPRHRLMVLRMELDIQNFMQNPQLQEFEFQNFPTSYLRCAAHRVAQHYGLETIVADSLVEGSVSRIVARKTAESRYPAIFLSEVPSNQARNDHETAEKLKFVIYQRPKAFQNGSADSRNKSGVPKTVDERIEEYNKARARIFNGSISADSDAASIMGTLSTGKDEPVNVDPSVDETKVSTMNSRSRVAVFKDTEKDRSDPDYDRNYKRYVRSSVPGFNLSPGVFNFVVPQFMQYDIGYVQSPGMSTNQHTMYFGQPDLTIGSSGAAVYRHWPTPTMMYPHCYDNVSPMMSQTK

SEQ ID NO: 185852 - protein, 297 aa, Zea Mays
MQRVLRMELDIQNFMQNPQLQEFEFQNFPTSYLRCAAHRVAQHYGLETIVADSLVEGSVSRIVARKTAESRYPAIFLSEVPSNQARNDHETAEKLKFVIYQRPKAFQNGSADSRNKSGVPKTVDERIEEYNKARARIFNGSISADSDAASIMGTLSTGKDEPVNVDPSVDETKVSTMNSRSRVAVFKDTEKDRSDPDYDRNYKRYVRSSVPGFNLSPGVFNFVVPQFMQYDIGYVQSPGMSTNQHTMYFGQPDLTIGSSGAAVYRHWPTPTMMYPHCYDNVSPMMSQVPLYQSFNHD

SEQ ID NO: 185853 - protein, 142 aa, Zea Mays
MSTSPAAADVSPLPPTAAADEAARATETVVVDERVASHVDPFLVEALDNPRHRLMDSDAASIMGTLSTGKDEPVNVDPSVDETKVSTMNSRSRVAVFKDTEKDRSDPDYDRNYKSLCSMTLVMCNLLACPQTSILCTLASLI

SEQ ID NO: 185854 - protein, 318 aa, Zea Mays
MSTSPAAADVSPLPPTAAADEAARATETVVVDERVASHVDPFLVEALDNPRHRLMVLRMELDIQNFMQNPQLQEFEFQNFPTSYLRCAAHRVAQHYGLETIVADSLVEGSVSRIVARKTAESRPKAFQNGSADSRNKSGVPKTVDERIEEYNKARARIFNGSISADSDAASIMGTLSTGKDEPVNVDPSVDETKVSTMNSRSRVAVFKDTEKDRSDPDYDRNYKRYVRSSVPGFNLSPGVFNFVVPQFMQYDIGYVQSPGMSTNQHTMYFGQPDLTIGSSGAAVYRHWPTPTMMYPHCYDNVSPMMSQVPLYQSFNHD

SEQ ID NO: 185855 - protein, 344 aa, Zea Mays
MTSTDHITSNLDKLAVQNKGTNWTSQPAGQVLGVLAGLTCVFRTLASCHLVLRMELDIQNFMQNPQLQEFEFQNFPTSYLRCAAHRVAQHYGLETIVADSLVEGSVSRIVARKTAESRYPAIFLSEVPSNQARNDHETAEKLKFVIYQRPKAFQNGSADSRNKSGVPKTVDERIEEYNKARARIFNGSISADSDAASIMGTLSTGKDEPVNVDPSVDETKVSTMNSRSRVAVFKDTEKDRSDPDYDRNYKRYVRSSVPGFNLSPGVFNFVVPQFMQYDIGYVQSPGMSTNQHTMYFGQPDLTIGSSGAAVYRHWPTPTMMYPHCYDNVSPMMSQVPLYQSFNHD

SEQ ID NO: 185856 - protein, 307 aa, Zea Mays
MLINKMALLSHSRVLRMELDIQNFMQNPQLQEFEFQNFPTSYLRCAAHRVAQHYGLETIVADSLVEGSVSRIVARKTAESRYPAIFLSEVPSNQARNDHETAEKLKFVIYQRPKAFQNGSADSRNKSGVPKTVDERIEEYNKARARIFNGSISADSDAASIMGTLSTGKDEPVNVDPSVDETKVSTMNSRSRVAVFKDTEKDRSDPDYDRNYKRYVRSSVPGFNLSPGVFNFVVPQFMQYDIGYVQSPGMSTNQHTMYFGQPDLTIGSSGAAVYRHWPTPTMMYPHCYDNVSPMMSQVPLYQSFNHD

SEQ ID NO: 185857 - protein, 291 aa, Zea Mays
MELDIQNFMQNPQLQEFEFQNFPTSYLRCAAHRVAQHYGLETIVADSLVEGSVSRIVARKTAESRYPAIFLSEVPSNQARNDHETAEKLKFVIYQRPKAFQNGSADSRNKSGVPKTVDERIEEYNKARARIFNGSISADSDAASIMGTLSTGKDEPVNVDPSVDETKVSTMNSRSRVAVFKDTEKDRSDPDYDRNYKRYVRSSVPGFNLSPGVFNFVVPQFMQYDIGYVQSPGMSTNQHTMYFGQPDLTIGSSGAAVYRHWPTPTMMYPHCYDNVSPMMSQVPLYQSFNHD

SEQ ID NO: 185858 - protein, 104 aa, Zea Mays
MASSAARSLALVASASASLGVGQRSWARLAVSSSSAGSALPKLRGLRSFAASAGGAVMGKPGPGVVDADAGMDAVQRRLMFEDECILVDEQDNVIGHESKYNCT

SEQ ID NO: 185859 - protein, 270 aa, Zea Mays
MVGRTEQHDQTSCPAHQIQAWPCDHPSPHGVIGGAIPRARRVCAGMDAVQRRLMFEDECILVDEQDNVIGHESKYNCHLMEKIEAGNALHRAFSVFLFNSKYELLLQQRSATKVTFPLVWTNTCCSHPLYRESELIEENCAGVRNAAQRKLFDELGIVADELPVDQFIPLGRMLYKAPSDGKWGEHELDYLLFMVRDVKLDPNPEEVADVKYMNRHQLKELLRKADAGEDGVKLSPWFRLVVDNFLMGWWDHVEQGTLQGAADMKTIHKL

SEQ ID NO: 185860 - protein, 272 aa, Zea Mays
MVGRTEQHDQTSCPAHQIQAWPCDHPSPHGVIGGAIPRARRVCLGAGMDAVQRRLMFEDECILVDEQDNVIGHESKYNCHLMEKIEAGNALHRAFSVFLFNSKYELLLQQRSATKVTFPLVWTNTCCSHPLYRESELIEENCAGVRNAAQRKLFDELGIVADELPVDQFIPLGRMLYKAPSDGKWGEHELDYLLFMVRDVKLDPNPEEVADVKYMNRHQLKELLRKADAGEDGVKLSPWFRLVVDNFLMGWWDHVEQGTLQGAADMKTIHKL

SEQ ID NO: 185861 - protein, 601 aa, Zea Mays
MHAFVTGHKQKGARSPSTSLPPLHSPRIPLPLPAPTYLTNDLRSAPCRDCRLPTDTVVCHCQSATARRRPAEMAAALRPRLLVLLAVAAAATGPSCAGAGRVDLWPMPASVARGAQTLLVSKDLRLSTAGSSYPDGKGILTEAFRRMVAVVELDHAINGTYSRGAPVLAGVHVAVRSPNDELNFGVDESYRLSVPATGDPLYAQIEAQTVYGALHALETFSQLCSFDFNANLIELHSAPWTILDAPRFPYRGLLIDTSRHYLPVPVIKGVIDSMTFSKLNVLHWHIVDEQSFPLEISSYPKLWNGAYSYSERYTVDDALDIVQYAEKRGVNVLAEIDVPGHALSWGVGYPSLWPSATCKEPLDVSNEFTFQLINGILSDFSKIFKFKFVHLGGDEVNTSCWSTTPHIKSWLMQHSMNESDAYRYFVLRAQKIAISHGYDIINWEETFNNFGDKLDRKTVVHNWLGSGVAEKVVAAGLRCIVSNQDKWYLDHLDATWEGFYTNEPLTNIYNPEQQKLVLGGEVCMWGEHIDASDIQQTIWPRAAAAAERLWTPIEKLAKDTRSVTARLARFRCLLNQRGVAAAPLAGYGRSAPSEPGSCLRQ

SEQ ID NO: 185862 - protein, 223 aa, Zea Mays
MLPCQRPGHDEAPAAAASMAARFVAADILGGISWARVLSEGEGAAAQAGLCEKEGKVPLLSLEALHQLHIFIFVLAVSHVFFCASTMLPGCAKIRKWKKWEEEIQKIAAENGPKKVLPMHQVSFIRERYKGIGTDSKTLCWLHSFRKQFYGSVAKSDYAAMRLGFIMTHCRGNLKFDFHRYMVRVLESDFKKIVGTSWHLWIFVVIFLLLNVNASTVCTHTFG

SEQ ID NO: 185863 - protein, 400 aa, Zea Mays
MAEADETAALQYTPTWIVAAVCSIIVLISLAAERGLHHLGKTLKKNHQRPLYEALLKVKEELMLLGFISLLLTVLQGTIQRTCIPPSWTDYMLPCQRPGHDEAPAAAASMAARFVAADILGGISWARVLSEGEGAAAQAGLCEKEGKVPLLSLEALHQLHIFIFVLAVSHVFFCASTMLPGCAKIRKWKKWEEEIQKIAAENGPKKVLPMHQVSFIRERYKGIGTDSKTLCWLHSFRKQFYGSVAKSDYAAMRLGFIMTHCRGNLKFDFHRYMVRVLESDFKKIVGTSWHLWIFVVIFLLLNVNASTLLLAVGTKLEHVIAQLAYDVAEKQTAIEGDLVVTPSDQHFWFGRPRIILHLIHFILFQNAFELAFFFWILMTYGLESCFMDHIGFLVPRLVLG

SEQ ID NO: 185864 - protein, 82 aa, Zea Mays
MSQLYPLLCFSLLSLSPLTSLYLTLRFILYLPFKVSSLPSQSESCMFYLFFFGTNHLLCHLRVFNFVLCLLLFVIIITFLIP

SEQ ID NO: 185865 - protein, 218 aa, Zea Mays
MVWSVVTEKENLCLYGYPNETWEVTLPAEEVPPEIPEPALGINFARDGMNEKDWLALVAVHSDAWLLAVAFYFAARFGFDKEARRRLFNMINNLPTIFEVATGVAKKQNKEKEPNNTSKSNKPSSKMTTRPESHLKATKVAPPKDEDDESGEEYEEEEERDNTLCGSCGTNDGKDEFWICCDSCERWYHGKCVKITPARAEHIKHYKCPDCSNKRARA

SEQ ID NO: 185866 - protein, 736 aa, Zea Mays
MTTEVNQNFFAWSQEETSVQDLSQGTSQMFGHGSISFGRFDLESLEWEKWSVFTNDRRHEEFGKFNGLVAKKKAYFEEYFKRIRELKALQQQDQQTELHLEYCGDGSDSSQTGEYEPAAAHGAPTESETLVEDSTKQTAAATTFEHGTECYGYHENGSLVNEISAPTHFSPVGDLQHIGKQMKGSVSGKMDILKQDANSSQDVPMIHEIMITPNKRAIEKDSRVGQASKTISKTVKGPCSGEPSVINQMAKPENILSLRRPREATSDLVGTTARSGITGVRRPSAALQRPSTKERRPVTKDASRKHAEVTTPCRPSTSERRTVTGESALKPENNAIPCRPVTAHRRPITKESATRQCSIATPRRPSTADRRPATKDLTPKLSNIAAPHRPSTAHRRPISKESAPKHFNVASPHRPSTVERHTSGRDMTSKYVGIATSYLPSAVKQRPITGEGAHKHADVVTLSCSTADRRPIRDVAPKYATLALPRRPSTAERHPIARDIAPKNGLSLRPSTAERRTIARNVEPKHAPAQRPSTAERRPVTRETVLKQANVANSCLPLTPDRRLTKKGDISTLECPSTGGRCPITSGTALWSRTMPYYSKGALVTEVTPQKTITPRVVRNSKLENLSYAKERVELQVDRKQKSSLFNLSSKKTLTSNVRDDQGLEMFKKPNKEGGVRAHAYKSNNATTSWTGNVKTKAPVPPPLPPRRPYCTEKKPNVNSSPVGGRKTKASAPHWH

SEQ ID NO: 185867 - protein, 488 aa, Zea Mays
MAKPENILSLRRPREATSDLVGTTARSGITGVRRPSAALQRPSTKERRPVTKDASRKHAEVTTPCRPSTSERRTVTGESALKPENNAIPCRPVTAHRRPITKESATRQCSIATPRRPSTADRRPATKDLTPKLSNIAAPHRPSTAHRRPISKESAPKHFNVASPHRPSTVERHTSGRDMTSKYVGIATSYLPSAVKQRPITGEGAHKHADVVTLSCSTADRRPIRDVAPKYATLALPRRPSTAERHPIARDIAPKNGLSLRPSTAERRTIARNVEPKHAPAQRPSTAERRPVTRETVLKQANVANSCLPLTPDRRLTKKGDISTLECPSTGGRCPITSGTALWSRTMPYYSKGALVTEVTPQKTITPRVVRNSKLENLSYAKERVELQVDRKQKSSLFNLSSKKTLTSNVRDDQGLEMFKKPNKEGGVRAHAYKSNNATTSWTGNVKTKAPVPPPLPPRRPYCTEKKPNVNSSPVGGRKTKASAPHWH

SEQ ID NO: 185868 - protein, 351 aa, Zea Mays
MSSGGGGRVPAAAAAQSQELQLPPGFRFHPTDEELVVHYLCRRCAGLPISVPIIAEVDLYKHDPWQLPRMALYGEKEWYFFSPRDRKYPNGSRPNRAAGAGYWKATGADKPVGTPKPVAIKKALVFYAGKAPKGDKTNWIMHEYRLADVDRTARKKNNSLRIFFLSVFFLLLQLDDWVLCRIYNKKGALEKPTGAGGRAEASSQGALGSMSMGSPPEQKPSVLPSATATATAAAGTGYAPLPFSELAAYYEVRPSDSMPRAHGADSSCSGHALAATSSCGGGGGERPEVQSQPKIAEWERTFAAGAGPGINPAGSMLGLGGHQLGSAAVGVGLPAGDPLLQDILTYWGKPY

SEQ ID NO: 185869 - protein, 285 aa, Zea Mays
MRSWWCTTSAGAAPGCPSPCPSSPRSTYTSTIPGSSQGWRCTARRSGTSSPRGTASTRTGRGRTAPPAPGTGRPPAQTSRWARRSRWPSRRLSSSTPARRPRATRPTGSCMSTASPTSTAPPARRTTASGWMIGCCAESTTRKARWRSRPEPKPSVLPSATATATAAAGTGYAPLPFSELAAYYEVRPSDSMPRAHGADSSCSGHALAATSSCGGGGGERPEVQSQPKIAEWERTFAAGAGPGINPAGSMLGLGGHQLGSAAVGVGLPAGDPLLQDILTYWGKPY

SEQ ID NO: 185870 - protein, 221 aa, Zea Mays
MLRRASSPSTANYLLRFCELRQRSDTVESDASIVPIHFIAKKILDDWVLCRIYNKKGALEKPTGAGGRAEASSQGALGSMSMGSPPEQKPSVLPSATATATAAAGTGYAPLPFSELAAYYEVRPSDSMPRAHGADSSCSGHALAATSSCGGGGGERPEVQSQPKIAEWERTFAAGAGPGINPAGSMLGLGGHQLGSAAVGVGLPAGDPLLQDILTYWGKPY

SEQ ID NO: 185871 - protein, 205 aa, Zea Mays
MVSGRPHGELDSWFKSLMVTSSSERGQAGSGGPAPTLTGWKDLPMELLVRIISTVGDDRMVIVASGVCTGWRDALGWGVTNLSLTWCKLSMNNLMISLAHKFTKLQVLTLRQNKPQLEDSAVEAVANYCHDLRELDLSRSFRLSDRSLYALAHGCPRLTRLNISGCSSFSDTALIYLTCRCKNLKCLNLCGCVKAVTDRALQIRE

SEQ ID NO: 185872 - protein, 239 aa, Zea Mays
MVSGRPHGELDSWFKSLMVTSSSERGQAGSGGPAPTLTGWKDLPMELLVRIISTVGDDRMVIVASGVCTGWRDALGWGVTNLSLTWCKLSMNNLMISLAHKFTKLQVLTLRQNKPQLEDSAVEAVANYCHDLRELDLSRSFRLSDRSLYALAHGCPRLTRLNISGCSSFSDTALIYLTCRCKNLKCLNLCGCVKAVTDRALQMRVWLLLPTDVRTCARWASTSARTSRTAPCTPSQTAA

SEQ ID NO: 185873 - protein, 217 aa, Zea Mays
MVSGRPHGELDSWFKSLMVTSSSERGQAGSGGPAPTLTGWKDLPMELLVRIISTVGDDRMVIVASGVCTGWRDALGWGVTNLSLTWCKLSMNNLMISLAHKFTKLQVLTLRQNKPQLEDSAVEAVANYCHDLRELDLSRSFRLSDRSLYALAHGCPRLTRLNISGCSSFSDTALIYLTCRCKNLKCLNLCGCVKAVTDRALQFWCRLLLRTVGSCSL

SEQ ID NO: 185874 - protein, 278 aa, Zea Mays
MNNLMISLAHKFTKLQVLTLRQNKPQLEDSAVEAVANYCHDLRELDLSRSFRLSDRSLYALAHGCPRLTRLNISGCSSFSDTALIYLTCRCKNLKCLNLCGCVKAVTDRALQAIAQNCGQLQSLNLGWCDDVTDKGVTSLASGCPDLRAVDLCGCVLITDESVVALANGCPHLRSLGLYFCQNITDRAMYSLANSRVKSKRGRWDAVKDGLANLNISQCTALTPPAVQAVCDSFPALHTCPERHSLIISGCLSLTSVHCACALHPHRAGRALMANHAY

SEQ ID NO: 185875 - protein, 448 aa, Zea Mays
MSFVRQADPSASCAETTYIHKFVPPGSVFPAQRFVSGTDLLHHGPQPYNAEGYKQSGFNGTAPHAFQSFYNTDSYAESHFNEAPYSPAIFDISQQNSQSLSDNQASDLVEFDEDEMRVKLQELEHALLDDGDEIFFDLSGSINDEWNDNIKTNNEWVNTMKNIVSPDSPKEASPESSICCLDNNVGEARNPKQLLFDCAEAISENSIDEAQSIIAELRQKVAIQGDPSQRLAAYLVEGLAATLQSSGKGIYRALRCKEAPTLYQLSAMQILFEICPCFRLGFMAANYAILEACKGEDVVHIIDFDINQGSQYITLIQFLKNNSNKPRLLRITGVDDPESVHRAVGGLNVVGQRLEKLAEDCEVRFEFRAVAANIEDLTAGMLGRRPGEALIVNFAFLLHHLPDESVSIMNQRDRLLRMVKGLRPKLVTLVEQDANTNTTPFPSRLVLS

SEQ ID NO: 185876 - protein, 271 aa, Zea Mays
MYADDAIIFVKPEKRELDSFATLLHQFGEATGLRTNIQKSSVVPIKCAGLNLDEILAGFPASRSQFPIKYLGIPLSVERLKKVDFQYLLDKVSSKLTCWQGRNFTFAGRLVLVKSVLSAQPVHTLTTINVPKVVLEKIDKFRKHFLWAGNENLTGGKCKVNWPTVARPLDLGGLGVLDIHRFARALRLRWLWREWEVPEAPWAGLQTPCNDTDKLLFAAATRIAIGDGAKTSFWHCAWVNGRRPKDIAPDIFAASSDCRLSVREALTDSTW

SEQ ID NO: 185877 - protein, 84 aa, Zea Mays
MTKNARGGPQLAANPRRGQRNALLSPESSAMGQPHTYQSNSHNSTSIIVDYPHRIHENSDEEDYHSPLKIFWVPMPFVRSSKIR

SEQ ID NO: 185878 - protein, 87 aa, Zea Mays
MPPPLQPPLLLRLHLLFRSETQIPLLRRRPSCDAPHCRTRRYISVRASAAQLAAADVSTAQQLELGLEAAAVGFVTGKRKATEVAQA

SEQ ID NO: 185879 - protein, 56 aa, Zea Mays
MRPCGNDNDTLALLKMVADKTGRGCVYGMDIQESAIENTSSFLKMAVDDEHHVRDW

SEQ ID NO: 185880 - protein, 103 aa, Zea Mays
MPPPLQPPLLLRLHLLFRSETQIPLLRRRPSCDAPHCRTRRVGGGGSGLRHRFWRNIVQKGDTVVDATCGHAGMTMTRSLCLRWWLTKQAVDVFMGWTFKNLR

SEQ ID NO: 185881 - protein, 61 aa, Zea Mays
MMNIMWTGKTISYMVIVEWKRLFPKTLLSGGDKTVITVPRTTELALQAASRILSSGGLIKS

SEQ ID NO: 185882 - protein, 297 aa, Zea Mays
MDAHAMDCTIVGAAAPLAPTGAAARPATPLPANLSSPSAATAGGLVPSGLGLPGYPASLDALTGLLSLTHFPRKPPPGFSTTRPLVVDATWTSVVPQSYRTVGASTAWLDSVHNSIFLLFRNDSVAIVYQIGDSLILRRRSCDSNSSDSFDRRRRGVVMEVDLSLGEDAAPVEDRDVVGYEDVDFNTQSRTMECVDAGIHATHEGDHTAQDLDASTIKANSLPHDIYGQPSTTTIPSMQGSYANATMLSFNMHMTSSIIDARGIQGGYTNLLFGIDKDVASAIRQLHFDGVLDNENI

SEQ ID NO: 185883 - protein, 277 aa, Zea Mays
MDAHAMDCTIVGAAAPLAPTGAAARPATPLPANLSSPSAATAGGLVPSGLGLPGYPASLDALTGLLSLTHFPRKPPPGFSTTRPLVVDATWTSVVPQSYRTVGASTAWLDSVHNSIFLLFRNDSVAIVYQIGDSLILRRRSCDSNSSDSFDRRRRGVVMEVDLSLGEDAAPVEDRDVVGYEDVDFNTQSRTMECVDAGIHATHEGDHTAQVANKFLHISIAPKVGMAFESGDNAYEMCNNYASKIGFSIRKSSSKLRPDGTIYHKYIVCSAEGHEKT

SEQ ID NO: 185884 - protein, 269 aa, Zea Mays
MLRYSRRFLTRTPRRRQPKTAGKTEPSPTAAPTYTRDVVRRATAILRDQPWSAARPLLLSLPGLAWDSHTVARVLKTHPPLQKAFLFFRLATTASRTFRHDRFTYTSMIHLLGEAGRVPAMLRLLAEMLRAGIAPDAATFTTVMHWLARAGDVDGAMRVWAEMKARSRPTVVSYTACIKILFDARKAEEARGVLREMVAEGLRPTCKTYTVLIEHLADTGKFEATLEIMDKMKEACVQPDKALCNILVQKCSRAGVLFSTLCLQTNGLL

SEQ ID NO: 185885 - protein, 354 aa, Zea Mays
MAAAATTSTATSCSSSSTSPGPHRRRQPNDIERDDDSCCGCGGGADHHFLHACAHDDAECDLHGHAAAATPCSGRALQLARRKRAWAVAGAPPRTAWMRGIVLCLLGLVAVIGFLGSHRGGGRTATSAGGAGTDDGGRLRVEVADADVMEWTEENLTALARRSPEPPIPGIWMKPDSEGYSQCIERPKNHRRKNNASVGYLVVDANGGLNQMRMGISDMVAVAKIMNASLVIPTLDHQSFWTDPSDFKDIFDVDHFKESLKEDIVIVDSLPPHYRRVKPYVRAPTSWSRLRFPGFLLQRLCENPEEVQSGEVYTHGFTDREQRPRSFAAKASVPRELRGAPVQEGDRRARQHAG

SEQ ID NO: 185886 - protein, 599 aa, Zea Mays
MAAAATTSTATSCSSSSTSPGPHRRRQPNDIERDDDSCCGCGGGADHHFLHACAHDDAECDLHGHAAAATPCSGRALQLARRKRAWAVAGAPPRTAWMRGIVLCLLGLVAVIGFLGSHRGGGRTATSAGGAGTDDGGRLRVEVADADVMEWTEENLTALARRSPEPPFPSKHGQIPGIWMKPDSEGYSQCIERPKNHRRKNNASVGYLVVDANGGLNQMRMGISDMVAVAKIMNASLVIPTLDHQSFWTDPSDFKDIFDVDHFKESLKEDIVIVDSLPPHYRRVKPYVRAPTSWSRASFYRDFAKILRKFKVVRFTHTDSRIVNNGLAPSLQKLRCRANYEALQYRKEIEELGNTLVDRLRNESQHYIALHLRYEKDMLAFTGCNHNLTLDEAAELTDMRFKVRHWKEKDINSEERRLQGGCPMTPREAAVFLKAMGYPSATKIYIVAGEIYGAHSLDALRAEYPNIYTHYSLATVDELEPLELYQNRLAAVDYIVALQSDVFVYTYDGNMARAVQGHRRFEGFRKTINPDRLKFVELIDKLDEGSMSWTEFQTVVRKQHENRLGGPYERLRGASPRQEEYFYSNPIPGCLCKRVQRSR

SEQ ID NO: 185887 - protein, 371 aa, Zea Mays
MAKIMNASLVIPTLDHQSFWTDPSDFKDIFDVDHFKESLKEDIVIVDSLPPHYRRVKPYVRAPTSWSRASFYRDFAKILRKFKVVRFTHTDSRIVNNGLAPSLQKLRCRANYEALQYRKEIEELGNTLVDRLRNESQHYIALHLRYEKDMLAFTGCNHNLTLDEAAELTDMRFKVRHWKEKDINSEERRLQGGCPMTPREAAVFLKAMGYPSATKIYIVAGEIYGAHSLDALRAEYPNIYTHYSLATVDELEPLELYQNRLAAVDYIVALQSDVFVYTYDGNMARAVQGHRRFEGFRKTINPDRLKFVELIDKLDEGSMSWTEFQTVVRKQHENRLGGPYERLRGASPRQEEYFYSNPIPGCLCKRVQRSR

SEQ ID NO: 185888 - protein, 557 aa, Zea Mays
MADETKQEAAAGDEAAVIDGTGSFKEESNLVSELPDPERTALAQLKELVATALANGEFNLPPPPAKEEAKKEEPAKEEAPADKEDEPKAEEAAAQEPVKEEAKPEEPKTEAPAEAAPEEVKDETPVPEETKTEAPAPEEPKAEEPAKEELKAEAATEAVAEETKPAEPVPEEEEKTVVVAEEEATKTVEAIEETVAVAVAAAASEEPEAGEPKEELIWGVPLAGDDERTDTVLLKFLRAREFKVKEAMAMLKSAVLWRKRFGIDELLLDADLGLRELEGVVFYRGADREGHPVCYNVYGEFQDKELYERAFGDEEKRERFLKWRIQLLERGIREQLDFSPSGICSMVQVTDLKNSPPMLGKHRAVTRQALALLQDNYPEFVAKKVFINVPWWYLAANKVMSPFLTQRTKSKIVFCSPGKSAETLFRYIAPEQVPVQFGGLYKEDDTEFSTSDAVTELTVKPSSKETVEIPATENSTVVWELRVLGWEVSYGAEFTPDAEGGYTVIVQKTRKVPAHEEPIMKGSFKATEPGKLVLGVNNPASRKKKLLCRFKVRSAAA

SEQ ID NO: 185889 - protein, 74 aa, Zea Mays
MKRLGCVQPNSNSGQVHRTLSGGAPDSVRCARLVRGELAALGIRRRRTAKIHRTVRWCTELSGEPTVASANGRA

SEQ ID NO: 185890 - protein, 185 aa, Zea Mays
MAMKRPARSDPHLPPEEAARVEAEVRSYFDSVAPRRPAKPPRSDPSVDTFAEPAAVDAGDHDLPELRKLRDLEAKPQKLVLDGGGGDVDGGEDYVETRYYDGLIGIDKQHHTHRSVAVQVSSVCLQTGTGFIKVERSNGSTFSVMTNGYPPASSVRCTSNPATNDWIPSSESIIPASNKPSRSDS

SEQ ID NO: 185891 - protein, 123 aa, Zea Mays
MAMKRPARSDPHLPPEEAARVEAEVRSYFDSVAPRRPAKPPRSDPSVDTFAEPAAVDAGDHDLPELRKLRDLEAKPQKLVLDGGGGDVDGGEDYVETRYYDGLIGIDKQHHTLCPLHEQSCDK

SEQ ID NO: 185892 - protein, 137 aa, Zea Mays
MAMKRPARSDPHLPPEEAARVEAEVRSYFDSVAPRRPAKPPRSDPSVDTFAEPAAVDAGDHDLPELRKLRDLEAKPQKLVLDGGGGDVDGGEDYVETRYYDGLIGIDKQHHTFRLFADWDRLYQSGEIQWQHLQCDD

SEQ ID NO: 185893 - protein, 296 aa, Zea Mays
MDMIMIPHRFEKFLDDIVFLVEAGEIPMSRIDDAVERILRVKFISGVFEHPFSDQSLLDIVGCKEHRLLAREAVRKSLVLLKNGKDQKEPFLPLARDAKRILVAGTHADDIGYQCGGWTIAWPGDSGKVTLGTSILEAIQELVGVQTEVVHEKYPTKAMIETGGFSYAVVVVGEVPYAEWIGDRTDLSIPFNGSDLIIRVASKIPILVIVISGRPLIIESQVLEKIDALVAAWLPGSEGMGITDCLFGDHDFVGTLPVTWYKSVDQLPINAGDSNYDPLFPVGYGLKMFRSDDDST

SEQ ID NO: 185894 - protein, 311 aa, Zea Mays
MAPEARGEAAPVYRDALTPVEERVRDLLGRMTLREKAAQMAQIERTVATPRALTELGAGSVLNAGGSMPCEQASPADWAAMVDGFQRLAISSRLGVPILYGTDAVHGHNNVYGATVFPHNVGLGACRDGELARRIGEATALEVRATGIHWTFAPCVAVCRDPRWGRCYESYSEDPEIVRSLTTIVSGLQGQPSADHPHGYPFLASPRENVLACAKHFAGDGGTDKGVTEGNAICSYEDLEAIHMRPYPDCMAQGVATVMTSYSKWNGEPLHSSRYLLTDVLKGKLGFKIGRALTGSVSLEGLIIAIALHNQ

SEQ ID NO: 185895 - protein, 252 aa, Zea Mays
MAVEALAAVLSAEGIAEEAREGLVLALVAEDLGRVVTTLLGAGANGAAVLEAMLTSARVDADAKTAIADRPELFPDLVRILRDAASQAAIRCMVAAVQVRGRPARASMVRAGAVPALALAVAAAPTAAAESALRLLAEAARCGDGKAAIGADAAEVAAAVMGRMIRVGPAGREAAVVALWLCCCAGGGDRRMREAVASAPEAVGKLLVVMQGDCAPTTSRMAGELLRAVRMEHEKKGMAAAYDSRTIHVMPY

SEQ ID NO: 185896 - protein, 815 aa, Zea Mays
MLQHISHQRPGHTPWLVSHNKYSNARDFGLAKTLKEDDLTSSVVGTPNYMCPELLADIPYGFKSDIWSLGCCMYEMAAHRPAFKAFDMAGLISKINRSSMGPLPACYSVSMKTLIKSMLRKSPEHRPTASEILKNPYLQPYVNQYRPLYDSSNPMRMPEKQLHTSRSSQRSMSDSQSSSISSSDIDSAQSSDRSTSGGTTSTDRKTIDTASIRDVDQGKSDENGATPEDVRGNKDNGSVQFKRQDSLKCIHVDHHPRPESKQPKIIEKIMTTLREESRLREINCPVRGGVKPNSGHSNNNQVEQPLQVSRTNSDMPCSLKSGNILSHDEHVNEVEASPPLKKLSPIVEHSPKMKTAGPSTPEPAKQITENGAAASGRTKNKSPLPARRPSPQRQAGAGTSSFPVTMTRRTHTKFITEREKTLEGPSCSPDNTLRDHPQSLMISSNPSEGQHMKLDSSQANPTNLWELFTVSAKEHSSACSSSTVGCTEPMDQPELSEPNSPVCLVSPCTGCSPNTTEEDDKSTIPCSEINTDKNIATKNGGSSLRSDLEPSFLSSEQEFISKEVQSSKHEKSNITFQSGEDKFTVQELLSSAPEVAPPVSSAPEAAHSIPATKGTLLDSPTSLQSWKKHVVSHLNPPVDDALQTIRHSTFCLSDEQPTQGSVQREAQSADMIKLLDVVPEEADARSSSLNTLLPARSPSVTATSQVSEANVATKALAASDNTKSSAASSGTSNGVQEEASPTKEVLDVTSFRQRAEALEGLLELSAELLETQRLEELAIVLKPFGKNKVSPRETAIWLARSFKGMMTDEAGRTSL

SEQ ID NO: 185897 - protein, 254 aa, Zea Mays
MEFKRDVWSLLLVLLLGQLVAFSMAASSFASSLIANLGVDAPLTQSFLAYLLLTLVYVPIVLRRRQKLQIAWYWYLALAFFDVQGNYLVVKAYQYSYITSVTLLDCWTVVWVVMLTWYALGTRYSLWQFVGAGTCVAGLALVLLSDAKSQDEQDPKKIPLLGDALVIAGTVGFAFSNVGEEYCVKKKDRVEVVAMLGLFGLLISTAQMYPQKFIISYITCIANWHDLLVITYIALFRKVKLLPQFSWNKKVVTV

SEQ ID NO: 185898 - protein, 637 aa, Zea Mays
MGMAADATTAMTIDFLRARLLSERSVSRAAKERADHLAKRSIVTEPVAAVQVVELEEQLRTVTAQRRKAERAAAEVLAILDSQGFGRLSDAADDSGSEYEADTGDPNAVERDGGGGNAAEDALSGSELGAPAAAAAASAAQAGGLSWRGRAASPECERRRPQHQQHKGRQLRQRHGHGHGHRRGYFYCRAADSSPKYHPGQSCRKIKRKELRSQTEEEEGNDNAVESTEDGQERSDCTVCTDQPADVDGEVNQDGHGSSSNGRGEDRDDLAMVYEKDGEMERVLEKQAELIGQFEAQENAQREWEEKFSLSRDSVMKLNQAENACGRRETARVVDKEVVCEQARSSDNNFHCINDPSECLPNGPVSELPQNVAKDSVTEHRKFDGFGHDCVVTAAAVISSHGELQVRKDVLTTKSYPEGSGNNLGKSALPPQGSCGSRLNAGHRNGQGDESSDSGSSYHVNARSSEQYINTSSVGSQLSDTPKSEVSEWSSSCFHNHTDNQLDTQLHQSSNKDVGGVLEALRRAKMSLRAKLSWPSLASKNILALEAPDDLPVNGMELSLCRTAHVSQEIFALPTPTDYLNKVLPHDDVKVPIGPAGLFRLPIDSFPRDEMTTRDGYGSWFSLTSFHVAIHAHCWWA

SEQ ID NO: 185899 - protein, 78 aa, Zea Mays
MLLYVLFFLGAHMRRTRLYPLNMGVTQSSADRRTCASAAPSRVVSSFPIANWWVPLAKRVHRHHCMGPRHHTLSSPRS

SEQ ID NO: 185900 - protein, 120 aa, Zea Mays
MGSLLTRTGVLPWLHAKIVDPMLQVIRRGAEPKQLAFSAALGITIGIFPLDRPFLAFGGNHHWQWALPLDSQRTEECSHWSCIKGCAAEHRQCDAGLAYCCTICTCRAVRCFVPLFQGPG

SEQ ID NO: 185901 - protein, 108 aa, Zea Mays
MCCAQSKVHFVALPATFACHDGGQIQLLPLGRPSSFHLPPSLVGARAPKVPRSSSALPLLPSTPPPGDALDLIEWALFSPGLASCHGSTPRLLIPCCRSSEGEQNPSN

SEQ ID NO: 185902 - protein, 101 aa, Zea Mays
MVLNLAATPIELSLIVPFLRLGETITGSGHFPLTANALKNVLTGHASKDVLLSIVNAMLGWLIAAPFVLAVLYAVSFPCFKVLVNRFGGIPSSPRTPLKAV

SEQ ID NO: 185903 - protein, 197 aa, Zea Mays
MEARSSSCLLGVRHPSISRPPSSEHEHQRTGVLPWLHAKIVDPMLQVIRRGAEPKQLAFSAALGITIGIFPVCGTTVILGAVAVAVLGSRCNAVTVMVLNLAATPIELSLIVPFLRLGETITGSGHFPLTANALKNVLTGHASKDVLLSIVNAMLGWLIAAPFVLAVLYAVSFPCFKVLVNRFGGIPSSPRTPLKAV

SEQ ID NO: 185904 - protein, 277 aa, Zea Mays
MCCAQSKVHFVALPATFACHDGGQIQLLPLGRPSSFHLPPSLVGARAPKVPVLPLPLLSFSSPVHPSCHNWATAAPALRQVPRSSSALPLLPSTPPPGDALDLIEWALFSPGLASCHGSTPRLLIPCCRSSEEPKQLAFSAALGITIGIFPVCGTTVILGAVAVAVLGSRCNAVTVMVLNLAATPIELSLIVPFLRLGETITGSGHFPLTANALKNVLTGHASKDVLLSIVNAMLGWLIAAPFVLAVLYAVSFPCFKVLVNRFGGIPSSPRTPLKAV

SEQ ID NO: 185905 - protein, 362 aa, Zea Mays
MIQCFIKRDKSKSTYRLYLCLSTAVLMENGKFLLSAKRSRRTTCTQYIISMDADNISRSSSTYIGKLRSNFLGTKFVVSDTQPPPYRYSGAAPPPPRAAGRRASRRFDSRKVSPKVPAPGGAGGGSYSIAQVTYELNVLGTRGPRRMHCVMRSIPASAVEPGGTVPGQPERILPRALLEEEQEEEEEDSSFRRTGTGTGTTSFSKSSASIMDRSVDFGGGSSSSFRDFSSARFSDIVDGGGGDGGQDRERPLVLRNKAPRWHEQLQCWCLNFRGRVTIASVKNFQLIAAAPSLQAQAPAAGAGAGAPPAPSSQPAPQDQDKVILQFGKVAKDMFTMDYRYPLSAFQAFAICLSSFDTKLACE

SEQ ID NO: 185906 - protein, 76 aa, Zea Mays
MIQCFIKRDKSKSTYRLYLCLSTAVLMENGKFLLSAKRSRRTTCTQYIISMDADNISRSSSTYIGKLRCALNWLQH

SEQ ID NO: 185907 - protein, 266 aa, Zea Mays
MSFRSIVRDVRDSIGSLSRRNFEVTAAAAAGGLSGRTAAQHRRGRSQSTVHELRDTRVVVQQDESRWASLPPELLRDVVRRLEASESAWPNRKHVVSCAAVCRAWREMCREIVLSPEVCGKLTFPVSLKQPGPRDGMIQCFIKRDKSKSTYRLYLCLSTAVLMENGKFLLSAKRSRRTTCTQYIISMDADNISRSSSTYIGKLRRFPARRKHARACCLLCLWRDAVVAGRWNPTPLSLAATGKCDATEPRIGFSSGVAANDGRCCD

SEQ ID NO: 185908 - protein, 130 aa, Zea Mays
MIQCFIKRDKSKSTYRLYLCLSTAVLMENGKFLLSAKRSRRTTCTQYIISMDADNISRSSSTYIGKLRRFPARRKHARACCLLCLWRDAVVAGRWNPTPLSLAATGKCDATEPRIGFSSGVAANDGRCCD

SEQ ID NO: 185909 - protein, 212 aa, Zea Mays
MSFRSIVRDVRDSIGSLSRRNFEVTAAAAAGGLSGRTAAQHRRGRSQSTVHELRDTRVVVQQDESRWASLPPELLRDVVRRLEASESAWPNRKHVVSCAAVCRAWREMCREIVLSPEVCGKLTFPVSLKQPGPRDGMIQCFIKRDKSKSTYRLYLCLSTAVLMENGKFLLSAKRSRRTTCTQYIISMDADNISRSSSTYIGKLRCALNWLQH

SEQ ID NO: 185910 - protein, 147 aa, Zea Mays
MPLSSNRSRTIRATRMAPSSRRQHGSTPHVAHPTPTSTQPPPHLSTSPSEPLQPCSASRSRPRHVACSNRVLPPSCCHTAPSYHAPHNSGSSVLIASKESLYEPAHKSGVRVPCNQPIALVARIHVIGLIKPNTGNHKLFSIVSSNY

SEQ ID NO: 185911 - protein, 112 aa, Zea Mays
MRNESIISEIQAQLKHKNVTVDVKANSDPHISPIQLSTTVTVEELGLPGLKNIMAISYPHQAFGRSPYPVQISDPSSDSLTVNACRHGPVKTSQCACADLRTEESSRVTIEL

SEQ ID NO: 185912 - protein, 242 aa, Zea Mays
MDKYEAVRDIGSGNFGVARLMRNRETRELVAVKLIERGHRIDENVYREIVNHRSLRHPNIIQFIEVILTPTHLAIVMEYAAGGELFDRIVDRGRFSEDETRYFFQQLICGVSYCHHMQICHRDLKLENVLLDGSPAPRLKICDFGYSKSSVLHSRPKSAVGTPAYIAPEVLSRREYDGKLADVWSCGVTLFVMLVGAYPFEDQDDPKNIRKTIQQFNIISQTTFAYLMIADNSFHVSLSAIH

SEQ ID NO: 185913 - protein, 250 aa, Zea Mays
MDKYEAVRDIGSGNFGVARLMRNRETRELVAVKLIERGHRIDENVYREIVNHRSLRHPNIIQFIEVILTPTHLAIVMEYAAGGELFDRIVDRGRFSEDETRYFFQQLICGVSYCHHMQICHRDLKLENVLLDGSPAPRLKICDFGYSKSSVLHSRPKSAVGTPAYIAPEVLSRREYDGKLADVWSCGVTLFVMLVGAYPFEDQDDPKNIRKTIQRIAAIQYNIPDNIRISDDCRQLISRIFVSNPLRESP

SEQ ID NO: 185914 - protein, 111 aa, Zea Mays
MKKTSSPLLIVLFLTAAAMAAEPEKQAAPAAQETAVHIVYVDRPEDADPEEFHIRTLTPVLGSEQKARDAVLYHYKNAASGFSAKLTPQQVKDLKAFLRTWLWGCEENPRR

SEQ ID NO: 185915 - protein, 126 aa, Zea Mays
MKKTSSPLLIVLFLTAAAMAAEPEKQAAPAAQETAVHIVYVDRPEDADPEEFHIRTLTPVLGSEQKARDAVLYHYKNAASGFSAKLTPQQVKDLKGVLQVVPSQTYQLHGPGSGTHQGTTHTLGLM

SEQ ID NO: 185916 - protein, 357 aa, Zea Mays
MKAAVSSAGESAGELLLRAAALVPWTRYFLAALALAAVLLYRFLELHLLGDLLRGLRGGRVSLTFHPESQVYHRVASKCRSLHGRYLTTPWLASPHLQTLFLSISGRPPSFTYRRQLYTVRDGGTIALDWLLASDLEDGDIGTSDGTISKDDSTPLLVVIPGLTSDSSAAYVKHLVFSMAIKGWNVVVSNHRGLGGISITSDCFYNAGWTADMREVVSFLHQEYPKAPLFTVGTSIGANIVVKYLGEEGENTPVAGAASICSPWDLLVTSKFISRKLVQRCYDRALAIGLKGYAKLHQSVLARLANWEAITSSHSIREFDRHATCVVAKYEWTHSTASAAVQIISVMCQFHCFVSVP

SEQ ID NO: 185917 - protein, 395 aa, Zea Mays
MKAAVSSAGESAGELLLRAAALVPWTRYFLAALALAAVLLYRFLELHLLGDLLRGLRGGRVSLTFHPESQVYHRVASKCRSLHGRYLTTPWLASPHLQTLFLSISGRPPSFTYRRQLYTVRDGGTIALDWLLASDLEDGDIGTSDGTISKDDSTPLLVVIPGLTSDSSAAYVKHLVFSMAIKGWNVVVSNHRGLGGISITSDCFYNAGWTADMREVVSFLHQEYPKAPLFTVGTSIGANIVVKYLGEEGENTPVAGAASICSPWDLLVTSKFISRKLVQRCYDRALAIGLKGYAKLHQSVLARLANWEAITSSHSIREFDRHATCVVAKYETVDTFYRKCSSANYIGNVSVPLLCISALDDPLCTREAIPWDECRPNCWKALVGTTCFRVPLCSA

SEQ ID NO: 185918 - protein, 524 aa, Zea Mays
MKAAVSSAGESAGELLLRAAALVPWTRYFLAALALAAVLLYRFLELHLLGDLLRGLRGGRVSLTFHPESQVYHRVASKCRSLHGRYLTTPWLASPHLQTLFLSISGRPPSFTYRRQLYTVRDGGTIALDWLLASDLEDGDIGTSDGTISKDDSTPLLVVIPGLTSDSSAAYVKHLVFSMAIKGWNVVVSNHRGLGGISITVTSKFISRKLVQRCYDRALAIGLKGYAKLHQSVLARLANWEAITSSHSIREFDRHATCVVAKYETVDTFYRKCSSANYIGNVSVPLLCISALDDPLCTREAIPWDECRANKNIVLATTPNGGHLAFFEGLTAGKLWWVRPVSEFLCALHDGPYMHRQKAQGHDLHSSLESSIDKSPYVNFMEDGMVAALTDDGPNNGDSLLNEVLGEIEPNDSVVVQHVKQNQNTRAIQNESDSWLDDKNSSEGNVQAHGGTQEQREVPYANKISDAIGPVKKSINQLSRSQGKSIWLLAYIALVTSWPLLGALGFFFRKRLSNSLLSRKLKKS

SEQ ID NO: 185919 - protein, 453 aa, Zea Mays
MKAAVSSAGESAGELLLRAAALVPWTRYFLAALALAAVLLYRFLELHLLGDLLRGLRGGRVSLTFHPESQVYHRVASKCRSLHGRYLTTPWLASPHLQTLFLSISGRPPSFTYRRQLYTVRDGGTIALDWLLASDLEDGDIGTSDGTISKDDSTPLLVVIPGLTSDSSAAYVKHLVFSMAIKGWNVVVSNHRGLGGISITSDCFYNAGWTADMREVVSFLHQEYPKAPLFTVGTSIGANIVVKYLGEEGENTPVAGAASICSPWDLLVTSKFISRKLVQRCYDRALAIGLKGYAKLHQSVLARLANWEAITSSHSIREFDRHATCVVAKYETVDTFYRKCSSANYIGNVSVPLLCISALDDPLCTREAIPWDECRANKNIVLATTPNGGHLAFFEGLTAGKLCLYLSKCLTGGYDLFPSSSVLCMMAPTCIGRRHKGTICTHRWNHQLTRAHM

SEQ ID NO: 185920 - protein, 350 aa, Zea Mays
MKAAVSSAGESAGELLLRAAALVPWTRYFLAALALAAVLLYRFLELHLLGDLLRGLRGGRVSLTFHPESQVYHRVASKCRSLHGRYLTTPWLASPHLQTLFLSISGRPPSFTYRRQLYTVRDGGTIALDWLLASDLEDGDIGTSDGTISKDDSTPLLVVIPGLTSDSSAAYVKHLVFSMAIKGWNVVVSNHRGLGGISITSDCFYNAGWTADMREVVSFLHQEYPKAPLFTVGTSIGANIVVKYLGEEGENTPVAGAASICSPWDLLVTSKFISRKLVQRCYDRALAIGLKGYAKLHQSVLARLANWEAITSSHSIREFDRHATCVVAKYELLSDSGHILPQVQQCKLYR

SEQ ID NO: 185921 - protein, 405 aa, Zea Mays
MKAAVSSAGESAGELLLRAAALVPWTRYFLAALALAAVLLYRFLELHLLGDLLRGLRGGRVSLTFHPESQVYHRVASKCRSLHGRYLTTPWLASPHLQTLFLSISGRPPSFTYRRQLYTVRDGGTIALDWLLASDLEDGDIGTSDGTISKDDSTPLLVVIPGLTSDSSAAYVKHLVFSMAIKGWNVVVSNHRGLGGISITSDCFYNAGWTADMREVVSFLHQEYPKAPLFTVGTSIGANIVVKYLGEEGENTPVAGAASICSPWDLLVTSKFISRKLVQRCYDRALAIGLKGYAKLHQSVLARLANWEAITSSHSIREFDRHATCVVAKYETVDTFYRKCSSANYIGNVSVPLLCISALDDPLCTREAIPWDECRANKNIVLATTPNGGHLAFFEGLTAGKLCQQ

SEQ ID NO: 185922 - protein, 101 aa, Zea Mays
MSEMTRLVALVPYYIDLVGRYKLSSHARSKTDGARTKAAQEAFRELQSARQEALQRKKAEKKKLIEEADAKLSAESLRKKEEKERARQMKKSGPKVKMLRS

SEQ ID NO: 185923 - protein, 63 aa, Zea Mays
MLACLSSLVVLISAASEFCAEPAVISVAGRQRRAVNCRILIYLIHGICLCSAVPIINAGSRRR

SEQ ID NO: 185924 - protein, 81 aa, Zea Mays
MKPRVCEICSSTASNVVVLGDPEFSDQWSETNSAAAAAAQAPPPPAEPRRFWQGHRFLNFLLACMVFAFVISWLFHFNVPG

SEQ ID NO: 185925 - protein, 94 aa, Zea Mays
MAAARADGERRIGVAIDYSESAKKALDWAIDNLLHHGDTLVVVHVLHHGAEETKHTLWAKSGSPEGGGEAVLGRRQGEALRRRRGSQDRFPRHG

SEQ ID NO: 185926 - protein, 162 aa, Zea Mays
MAAARADGERRIGVAIDYSESAKKALDWAIDNLLHHGDTLVVVHVLHHGAEETKHTLWAKSGSPLIPLSEFREPEVMQGYGVRPDAEVLDAIDTAARQKQVVAKLYWGDAREKLCDAVEDLRIDSLVMGSRGLGPIQRILLGSVTNYVLSNASCPVTVVKGK

SEQ ID NO: 185927 - protein, 228 aa, Zea Mays
MSCAGQAGGWLLDYALVEEEIQGSEFIYMVDDPAVSRKEDGVQDNPGAKKRSRPESSAPPGTKACREKLRRDRLNERFNELCAILEPGKPPKADKVAILSDAARLLNQLQGEAQKLKQSNESLQESIKSLKAEKSELRDEKTRLKAEKERLEQMLKGVVSHAAVAAPGPFVPHPAAVAPSFHHHPAAFAQAGKFVPYPSYPPPAAFWQWIPPTSLDTTKDPAHWPPVA

SEQ ID NO: 185928 - protein, 188 aa, Zea Mays
MDWSAVTAEDLVDALREVDWSTPPRTVSEFFSRFTVPRSYSKWTSRLKCNLYYYRTNYFILIMFILGMGFLWKPVAILAAFMTGLSIAFLNDSFAVTFNEKVTRTVRQFSPHLAAKMRPPITVFVIFFSAVSCILWLTSCSLLTVLWALLIALFATVLHASFRTPNLKARLNTFREEFRAVWRNYSEL

SEQ ID NO: 185929 - protein, 96 aa, Zea Mays
MDWSAVTAEDLVDALREVDWSTPPRTVSEFFSRFTVPRSYSKWTSRLKCNLYYYRTNYFILIMFILGMGFLWKPVAILAAFMTGLSIAFLNDSHFQ

SEQ ID NO: 185930 - protein, 129 aa, Zea Mays
MRASAPPSNPSLLPPIPRAAQIRPPHRPGSAARPRAEAASDGATGGKPRCRHGREIAHIWRPDAGVRPAAPAHKALGLRAAQRTDTLRHLQECHGRAWSAAHIRSIQRLVGKLKSFAWLIIFLLFFFLF

SEQ ID NO: 185931 - protein, 181 aa, Zea Mays
MAELGRLLIYEASRDWLPTITGEIETPVAVASVEFIDPREPVLVIPILRAGLALAELASSVLPATKTYHLGFRRDEETLQPSIYLNNLPDKIPEGTRVLVVDPMLATGGTMVAAIDLLIECGVTSKQIKVISAIASPPALQKLNNKFPGLHVYTGMIDPEVNEKGFIVPGLGDAGDRSFAT

SEQ ID NO: 185932 - protein, 224 aa, Zea Mays
MGGRPGYLTLPIFSVVAAIGYVYYTTVFVAVPRWLGLSTAAGVANAAAFTALAAACLATYAVAVRRDPGRVPPGFVPDVEDAESTVHEIKRKGGDLRYCQKCCHYKPPRAHHCRVCKRCVLKMDHHCIWINNCVGHENYKIFLVFVLYAVVASFYALGAFCIVFLKMSSQAAILLEHPFTMKELERCGWQKKVETSIIIHMTLVSMRILFQFLGLTYFAGSALY

SEQ ID NO: 185933 - protein, 258 aa, Zea Mays
MGGRPGYLTLPIFSVVAAIGYVYYTTVFVAVPRWLGLSTAAGVANAAAFTALAAACLATYAVAVRRDPGRVPPGFVPDVEDAESTVHEIKRKGGDLRYCQKCCHYKPPRAHHCRVCKRCVLKMDHHCIWINNCVGHENYKIFLVFVLYAVVASFYALILIVGSVLHSVPKDEQPGSDSSRTSIYHEGVRAMWLAEKGGDLYHHPYDLGVYENLISVLGPNIFCWLCPVLNTVGNGLRYRTSYDIPVSTPPKKIAAHSQ

SEQ ID NO: 185934 - protein, 271 aa, Zea Mays
MQGHAYSRLGSFGAAAFPPPPPSSPGPAGAGAGGGSWTPAKAGSARRGGGVARRVARAVLATLLRRQAVFLFAPLLYVAAMLLYMGSLPLDAVPRIIARQPLGSVYRSPQLYRRLRADMDADNSTGALATVWRHTYIGGTWRPCINNMTNGLPESNGYIYVEANGGLNQQRTSICNAVAIAGFLNATLIIPNFHFHSIWRDPSKFSDIYDKDHFVQRLQNDVRVVDKIPDFIMEQFGHNLSNVFNFKIKAWARIRYYNDVVLPKLVEERRV

SEQ ID NO: 185935 - protein, 443 aa, Zea Mays
MSHKLATVWRHTYIGGTWRPCINNMTNGLPESNGYIYVEANGGLNQQRTSICNAVAIAGFLNATLIIPNFHFHSIWRDPSKFSDIYDKDHFVQRLQNDVRVVDKIPDFIMEQFGHNLSNVFNFKIKAWARIRYYNDVVLPKLVEERFIRISPFANRLSFDAPFAVQRLRCLANFEALKFSKPIVSLSETLISRMRERSVESDGKYISVHLRFEEDMIAFSCCVYDGGDEEKKEMDAAREIGWRGKFTKRGRVIRPGIIRMNGKCPLTPLEVGLMLRGMGFSNKTAIFLASGKIYKAEKNMASLLEMFPLLQTKETLASEEELAPFKNFSSRMAAVDYSICAQSEVFVTTQGGNFPHFLMGHRRYLYGGHSKTIKPDKRRLAVLLDNPRIGWKALKRHLLNMRAHSDAKGIEMKRPNESIYTFPCPDCMCRLNRTEHSKSKQSR

SEQ ID NO: 185936 - protein, 500 aa, Zea Mays
MQGHAYSRLGSFGAAAFPPPPPSSPGPAGAGAGGGSWTPAKAGSARRGGGVARRVARAVLATLLRRQAVFLFAPLLYVAAMLLYMGSLPLDAVPRIIARQPLGSVYRSPQLYRRLRADMDADNSTGALATVWRHTYIGGTWRPCINNMTNGLPESNGYIYVEANGGLNQQRTSICNAVAIAGFLNATLIIPNFHFHSIWRDPRFIRISPFANRLSFDAPFAVQRLRCLANFEALKFSKPIVSLSETLISRMRERSVESDGKYISVHLRFEEDMIAFSCCVYDGGDEEKKEMDAAREIGWRGKFTKRGRVIRPGIIRMNGKCPLTPLEVGLMLRGMGFSNKTAIFLASGKIYKAEKNMASLLEMFPLLQTKETLASEEELAPFKNFSSRMAAVDYSICAQSEVFVTTQGGNFPHFLMGHRRYLYGGHSKTIKPDKRRLAVLLDNPRIGWKALKRHLLNMRAHSDAKGIEMKRPNESIYTFPCPDCMCRLNRTEHSKSKQSR

SEQ ID NO: 185937 - protein, 266 aa, Zea Mays
MTNGLPESNGYIYVEANGGLNQQRTSICNAVAIAGFLNATLIIPNFHFHSIWRDPSKFSDIYDKDHFVQRLQNDVRVVDKIPDFIMEQFGHNLSNVFNFKIKAWARIRYYNDVVLPKLVEERFIRISPFANRLSFDAPFAVQRLRCLANFEALKFSKPIVSLSETLISRMRERSVESDGKYISVHLRFEEDMIAFSCCVYDGGDEEKKEMDAAREIGWRGKFTKRGRVIRPGIIRMNGKCPLTPLEVCQDLKAEGWVNASWNGFQQ

SEQ ID NO: 185938 - protein, 250 aa, Zea Mays
MRERSVESDGKYISVHLRFEEDMIAFSCCVYDGGDEEKKEMDAAREIGWRGKFTKRGRVIRPGIIRMNGKCPLTPLEVGLMLRGMGFSNKTAIFLASGKIYKAEKNMASLLEMFPLLQTKETLASEEELAPFKNFSSRMAAVDYSICAQSEVFVTTQGGNFPHFLMGHRRYLYGGHSKTIKPDKRRLAVLLDNPRIGWKALKRHLLNMRAHSDAKGIEMKRPNESIYTFPCPDCMCRLNRTEHSKSKQSR

SEQ ID NO: 185939 - protein, 170 aa, Zea Mays
MLRGMGFSNKTAIFLASGKIYKAEKNMASLLEMFPLLQTKETLASEEELAPFKNFSSRMAAVDYSICAQSEVFVTTQGGNFPHFLMGHRRYLYGGHSKTIKPDKRRLAVLLDNPRIGWKALKRHLLNMRAHSDAKGIEMKRPNESIYTFPCPDCMCRLNRTEHSKSKQSR

SEQ ID NO: 185940 - protein, 334 aa, Zea Mays
MEQFGHNLSNVFNFKIKAWARIRYYNDVVLPKLVEERFIRISPFANRLSFDAPFAVQRLRCLANFEALKFSKPIVSLSETLISRMRERSVESDGKYISVHLRFEEDMIAFSCCVYDGGDEEKKEMDAAREIGWRGKFTKRGRVIRPGIIRMNGKCPLTPLEVGLMLRGMGFSNKTAIFLASGKIYKAEKNMASLLEMFPLLQTKETLASEEELAPFKNFSSRMAAVDYSICAQSEVFVTTQGGNFPHFLMGHRRYLYGGHSKTIKPDKRRLAVLLDNPRIGWKALKRHLLNMRAHSDAKGIEMKRPNESIYTFPCPDCMCRLNRTEHSKSKQSR

SEQ ID NO: 185941 - protein, 168 aa, Zea Mays
MASSASQASLLLQKQLKDLAKNPVDGFSAGLVDDSNIFEWQVTIIGPPDTLYDGGYFNAIMTFPQNYPNSPPSVRFTSEMWHPNVYPDGRVCISILHPPGEDPNGYELASERWTPVHTVESIVLSIISMLSSPNDESPANIEAADWREKRDEFKKKVRQCVRKSQEML

SEQ ID NO: 185942 - protein, 69 aa, Zea Mays
MAAAGARRFSFASWSGGGRGRRWRRFMHGRAAGGPGGSTSIDSTAWRRAGEVGAGASGLPWRAREMISA

SEQ ID NO: 185943 - protein, 65 aa, Zea Mays
MAAAGARRFSFASWSGGGRGRRWRRFMHGRAAGGPGGSTSIDSTAWRRAGEGDDFCLTKEPMHRN

SEQ ID NO: 185944 - protein, 53 aa, Zea Mays
MKMKESRKSQQRKNTMNNEKKEHKTTESVNSGFFFSNPPNIIQIFNLQCVGSN

SEQ ID NO: 185945 - protein, 1284 aa, Zea Mays
MSSGTVAASDPGGGETKLVAGDDVTISEAAGDMPAFAADLKVEEKATLTMDVAHERGDMAVSDPLYATESAGMVGTEGHGDEPVEDVDAVNGEDGGEEGTQEAGAGGLLTETERKPVLVVDVPAAAGSAAPEHAEAGEQFPDSGNSPDSNLEAASLGNVDQGARYRLPPLDKGRFQVADLVWGKVKSHPWWPGEIFDPTDASELALKHRKKGSHLVAYFGDSTFAWCDESQLKPFVTNYSQMEKQSSSDGFVGSVNNALEELSRRVLSGLSCSCLAEELADNGMSYTVDNAGLKDGVTCSAVNRPEILNCFSPENLLNYIKELALFPGQGGDLLELVIACSQLTSFYRSKGCPELASFQTSDAWVEDDLDGIDTLSTQNVMVEEPVINEVQPTQDKPKRGRGRPRKQKAGHDQVVMEKRSTSNQVNDTSYNEKKRNLKSFEDSEKSSAPTGGGSFKIGECIRRAASQLTGSSSIMKAQNEPTVYNNAAEGENGEFDVSSDDAGDELTVEKRAKRRRLHINHAADPRELLSQLCLVATEPMNGYSFSAMIIGYFNDYRNYIVSTTTEANIVDKGTSRRGRKRKEVIPSPEVETTDHMQDSYWSGLSLYNHPVHDLKRESPTTRPRRKRRSSRHAYIPLSELGEPVPKKQIQVMERSIIHVDEKMVDELKPTALVLTFGRSASIPSELDLVKMFSLYGPLKERGTKVHRETNTVKVVFKKRVDAERAFSAAGKYSTFGPSLRSYRLVSMPLSPETQSANNPENHGLEIPGLNMSEAPKDSMEVDLVQKTDKVKVTGELSSEEVETVRQTCLVEAADSTFVSEVDRLEKAGNIDAELIVHVNQIGEGAEAASVSEESSQQVGDIEQAYTQKAASVSDLPTEIETLHSDAIIKELPQKAPDNMQTDIATAPKQSHNPGDNAVFEAVTEVPSTAQDHSEDDVGDEVPEEHTVFPVLQSQTPGEKLVGQSETEQKVGPEDPKSQAENLTVEPVVQGAVEQVEIELESKTTVEVSCEQGYSIEQTVNMEAVIEASGGQLEVGRRISEDESMADANIEHSMVMVDETVEAKVVPLEESTENNAATIGVVEETAEGETKEEAPDEKGKIENNEDADKLAGETRAGEITVEAPDEKTEIKADADTPAGETKECEITVEAPDEKIANKGIVEPIIREITEDQTAAGEPDEEATTTEETVEDVKVLDDKSTADGKPVENATVATNEDSTTVENTLKDAMVAPPGTNTTNAEETALGATVKALDEDALAVEKTIEDTSVEASDVQAGRCNAELKVKR

SEQ ID NO: 185946 - protein, 1170 aa, Zea Mays
MEESSEEHEGDGAPVVDQPNNTSEMLPQTGEQFPDSGNSPDSNLEAASLGNVDQGARYRLPPLDKGRFQVADLVWGKVKSHPWWPGEIFDPTDASELALKHRKKGSHLVAYFGDSTFAWCDESQLKPFVTNYSQMEKQSSSDGFVGSVNNALEELSRRVLSGLSCSCLAEELADNGMSYTVDNAGLKDGVTCSAVNRPEILNCFSPENLLNYIKELALFPGQGGDLLELVIACSQLTSFYRSKGCPELASFQTSDAWVEDDLDGIDTLSTQNVMVEEPVINEVQPTQDKPKRGRGRPRKQKAGHDQVVMEKRSTSNQVNDTSYNEKKRNLKSFEDSEKSSAPTGGGSFKIGECIRRAASQLTGSSSIMKAQNEPTVYNNAAEGENGEFDVSSDDAGDELTVEKRAKRRRLHINHAADPRELLSQLCLVATEPMNGYSFSAMIIGYFNDYRNYIVSTTTEANIVDKGTSRRGRKRKEVIPSPEVETTDHMQDSYWSGLSLYNHPVHDLKRESPTTRPRRKRRSSRHAYIPLSELGEPVPKKQIQVMERSIIHVDEKMVDELKPTALVLTFGRSASIPSELDLVKMFSLYGPLKERGTKVHRETNTVKVVFKKRVDAERAFSAAGKYSTFGPSLRSYRLVSMPLSPETQSANNPENHGLEIPGLNMSEAPKDSMEVDLVQKTDKVKVTGELSSEEVETVRQTCLVEAADSTFVSEVDRLEKAGNIDAELIVHVNQIGEGAEAASVSEESSQQVGDIEQAYTQKAASVSDLPTEIETLHSDAIIKELPQKAPDNMQTDIATAPKQSHNPGDNAVFEAVTEVPSTAQDHSEDDVGDEVPEEHTVFPVLQSQTPGEKLVGQSETEQKVGPEDPKSQAENLTVEPVVQGAVEQVEIELESKTTVEVSCEQGYSIEQTVNMEAVIEASGGQLEVGRRISEDESMADANIEHSMVMVDETVEAKVVPLEESTENNAATIGVVEETAEGETKEEAPDEKGKIENNEDADKLAGETRAGEITVEAPDEKTEIKADADTPAGETKECEITVEAPDEKIANKGIVEPIIREITEDQTAAGEPDEEATTTEETVEDVKVLDDKSTADGKPVENATVATNEDSTTVENTLKDAMVAPPGTNTTNAEETALGATVKALDEDALAVEKTIEDTSVEASDVQAGRCK

SEQ ID NO: 185947 - protein, 54 aa, Zea Mays
MIMSCLQFRCWFIHARLFHHNTTVNIKLSRKDSSRFRNVEKTIEIHICKHNMNC

SEQ ID NO: 185948 - protein, 300 aa, Zea Mays
MSAISDQKKRTLEALQQQYTAAKAKKLQDEQVKSQKKSNFNTPKPKCDAPRGSKGPEITPRRTYAQPSHKGVAFSSSNCQQKPSTSSGEEINPVYAELSCAFHDTLSKGVVSDLDGTEVVHNVIYDIIQKGGDAGKITKGAKKLKLEKGILLDNYVQRGSRLVDSQARSLLIHSKRSKRHMSLKQHKKCGSFDLDGTFHKYDLYKPMHEMWKDYIRELMDLSPKKKFTENLLSADLHGALLIETFGIISEDNRFRVVPKAGSVFVLQADRWKFTLIGDKLSPREKLKEDQRQQRAQSLIR

SEQ ID NO: 185949 - protein, 120 aa, Zea Mays
MSLKQHKKCGSFDLDGTFHKYDLYKPMHEMWKDYIRELMDLSPKKKFTENLLSADLHGALLIETFGIISEDNRFRVVPKAGSVFVLQADRWKFTLIGDKLSPREKLKEDQRQQRAQSLIR

SEQ ID NO: 185950 - protein, 343 aa, Zea Mays
MGDVLIPSLRCGNLSVTICVRVSRFWDFSDPQDDARLLHCDMVLLDEEGNSIHATIYPPFIEKFRPLIKEGSVYNMTYFRVRASNNLYKPVPNDIMITFTNWKKLEQVIEIPPAFPTLTYSLTHIDQIHSRIDHKDYYTDAIGIVTSVSNVSPHRSKGQQASSLKRNISICSASRGASVNVVLWGAQATLFPGERIYENGQNSPQIVLFVGTLVKKYADGLCLTGSSPCKWYINPSIPEAETLMSSARGDHKPVKWNATVTSSQLISPVAEEQKVSYIKYLHPFENKGKEFLVTVTIRKIDNKWWYNSCRKCACTAVTHGDSYKCTNRDCANIAMPVQRRRDS

SEQ ID NO: 185951 - protein, 479 aa, Zea Mays
MGDVLIPSLRCGNLSVTICVRVSRFWDFSDPQDDARLLHCDMVLLDEEGNSIHATIYPPFIEKFRPLIKEGSVYNMTYFRVRASNNLYKPVPNDIMITFTNWKKLEQVIEIPPAFPTLTYSLTHIDQIHSRIDHKDYYTDAIGIVTSVSNVSPHRSKGQQASSLKRNISICSARGASVNVVLWGAQATLFPGERIYENGQNSPQIVLFVGTLVKKYADGLCLTGSSPCKWYINPSIPEAETLMSSARGDHKPVKWNATVTSSQLISPVAEEQKVSYIKYLHPFENKGKEFLVTVTIRKIDNKWWYNSCRKCACTAVTHGDSYKCTNRDCANIAMPVQRYKILVIAGDETADTDFILFGRVAQRIVKRPCDMLIANTPSGFIPDAITKLLERTFVWNVSFSGHTINSGNVCFQVNATIKELGNQNVDISTSTAGTQQSSFMFSQGASSSMKDTPHKTDTLSSPLTPLTPQGSIATTKYLV

SEQ ID NO: 185952 - protein, 289 aa, Zea Mays
MSCCGVPKPPYSQESAYTRMGRIPHRLCYLLARSSKNMQWYINPSIPEAETLMSSARGDHKPVKWNATVTSSQLISPVAEEQKVSYIKYLHPFENKGKEFLVTVTIRKIDNKWWYNSCRKCACTAVTHGDSYKCTNRDCANIAMPVQRYKILVIAGDETADTDFILFGRVAQRIVKRPCDMLIANTPSGFIPDAITKLLERTFVWNVSFSGHTINSGNVCFQVNATIKELGNQNVDISTSTAGTQQSSFMFSQGASSSMKDTPHKTDTLSSPLTPLTPQGSIATTKYLV

SEQ ID NO: 185953 - protein, 247 aa, Zea Mays
MEGGINRKDLFVTSKLWCTELAPDRVRPALEKTLKDLQLDYLDLYLIHWPFRLKDGAHMPPEAGEVLEFDMEGVWREMEGLVKDGLVKDIGVCNYTVAKLNRLMRSANVPPAVCQMEMHPGWKNDRIFEACKKHGIHVTAYSPLGSSEKNLAHDPLVEKVANKLDKTPGQVLLRWALQRGTSVIPKSTRDERIKENIQVFGWEIPEEDFRALCGIKDEKRVLTGEELFVNKTHGPYKSATEVWDHED

SEQ ID NO: 185954 - protein, 532 aa, Zea Mays
MMKNCGEYVHFEVVDQHVLQEIVKIVQKRHDMQVRDKALLLLDSWQEAFGGPGGKYPQYYWSYIELKRAGVMFPQRPVDAPPIFTPPATHQAYGSPRYPSGSLNERITSEAGTLSFEGLNNIRNATELLYDMVNALNPADRMAVKDEIIADLVNQCRSNQQKLMQFVSSTGDEDLLKQGLELNDRLQSVLTRHDAIASGSPLPVETPIREPQREDPNPEPSTPITHDNKAQVEEDEDDEFAQIARRKNKSVICGDEASSSAGDQALVPVDPALSEVSSVESNAIVPLGATSVSGTRTKEQDMIDLLSLTLYSPESSEDSSTQNQNGSQPSVTSNGSETLPSYQPAVANGANYPANTQVYPTNQGYVPYNNYVAPWAQTGPVAQPGAYSTQTQQYVSSNPAPPWAMPASANSANPFQPVTYQTPNTPPAASVAPSAAPSAQHVPSPEPTPVQSYNFSIPQTYTGSNVATNARVNGNQRPKETPVAAARPYYMPDNLFGDLIDVKSFGAGSKISRSTSMPSPKGGGQPMIGRNK

SEQ ID NO: 185955 - protein, 66 aa, Zea Mays
MVFSALALSQCEVIWYFQHVGIASSKSTRLKTVDIDAIDPTIGFLLDGIGKLCCLVRKYIAAIKGY

SEQ ID NO: 185956 - protein, 361 aa, Zea Mays
MYPVVTGTPPARLPAASRVDKATSHLLQGPDWAVNLEICDTLNADRWQTKDIVKAVKKRLQHKDPKVKFFTLTLLETMMKNCGEYVHFEVVDQHILQEIVKIVQKRHDMQVRDKALLLLDSWQEAFGGPGGKYPQYYWSYIELKRAGVMFPQRPVDAPPIFTPPATHQAYGSPRYPSGSLNERITSDAGTLSFEGLNNIRNATELLYDMVNALNPADRMTVKDEIIADLVNQCRSNQQKLMQFVSSTGDEDLLKQGLELNDRLQSVLTRHDAIASGSPLPVETPIREPQREDPNPEPSTPITHDNKAQVEEDEDDEFAQIARRKNKSVICGDEASSSAGDQPLVPVFFFLEQRRRTARHFI

SEQ ID NO: 185957 - protein, 372 aa, Zea Mays
MYPVVTGTPPARLPAASRVDKATSHLLQGPDWAVNLEICDTLNADRWQTKDIVKAVKKRLQHKDPKVKFFTLTLLETMMKNCGEYVHFEVVDQHILQEIVKIVQKRHDMQVRDKALLLLDSWQEAFGGPGGKYPQYYWSYIELKFWKNVLQRAGVMFPQRPVDAPPIFTPPATHQAYGSPRYPSGSLNERITSDAGTLSFEGLNNIRNATELLYDMVNALNPADRMTVKDEIIADLVNQCRSNQQKLMQFVSSTGDEDLLKQGLELNDRLQSVLTRHDAIASGSPLPVETPIREPQREDPNPEPSTPITHDNKAQVEEDEDDEFAQIARRKNKSVICGDEASSSAGDQPLRAGIYGASEKKLILVTNEQLLF

SEQ ID NO: 185958 - protein, 365 aa, Zea Mays
MYPVVTGTPPARLPAASRVDKATSHLLQGPDWAVNLEICDTLNADRWQTKDIVKAVKKRLQHKDPKVKFFTLTLLETMMKNCGEYVHFEVVDQHILQEIVKIVQKRHDMQVRDKALLLLDSWQEAFGGPGGKYPQYYWSYIELKRAGVMFPQRPVDAPPIFTPPATHQAYGSPRYPSGSLNERITSDAGTLSFEGLNNIRNATELLYDMVNALNPADRMTVKDEIIADLVNQCRSNQQKLMQFVSSTGDEDLLKQGLELNDRLQSVLTRHDAIASGSPLPVETPIREPQREDPNPEPSTPITHDNKAQVEEDEDDEFAQIARRKNKSVICGDEASSSAGDQPLRAGIYGASEKKLILVTNEQLLF

SEQ ID NO: 185959 - protein, 700 aa, Zea Mays
MQPASDAVSEVARNLDPKFLKEGERVMVGFSGPFGFHRVTPRDLMSSFIGTMVCVEGIVTKCSLVRPKVVKSVHFCPVTGDFLSREYRDITSFVGLPTGSVYPTRDDNGNLLVTEYGMCEYKDHQTLSMQEVPENSAPGQLPRTVDVIVEDDLVDCCKPGDRVSIVGVYKALPGKSKGSVSGVFRTVLIANNVSLLNKEANAPVYTREDLKRMKEISRRNDTFDLLGNSLAPSIYGHLWIKKAVVLLMLGGVEKNLKNGTHLRGDINMMMVGDPSVAKSQLLRAVMNIAPLAISTTGRGSSGVGLTAAVTSDQETGERRLEAGAMVLADRGVVCIDEFDKMNDQDRVAIHEVMEQQTVTIAKAGIHASLNARCSVIAAANPIYGTYDRSLTPTKNIGLPDSLLSRFDLLFIVLDQMDPEIDRQISEHVARMHRYCTDDGGARSLDKEGYAEEDDGDANAAIFVKYDRMLHGQDRRRGKKSKQDRLTVKFLKKYIHYAKNLIQPRLTDEASDHIATSYAELRDGSANAKSGGGTLPITARTLETIIRLSTAHAKMKLRHEVLKSDVEAALQVLNFAIYHKELTEMEEREQREMEMKQQADHDAGATGGTVDGHGSSGNDPMDVDVGSNDQNVSAERIEAFEALLGQHVLANHIDQMSIDDIEQMVNRESTAPYTRSQVEFILERMQDANRVMIRDGVVRII

SEQ ID NO: 185960 - protein, 5067 aa, Zea Mays
MGSPFVLTATLRKSYEVALMAVGQKWPVLLYGPVGAGKSALINKLAHIVGNRVLFIHMDEQMDGRTLLGSYVCTEKPGEFKWAPGSLTQAIVKGFWIVFEDIDKAPSDVRSILVPLLEGSNTFSVGHAEAVEVAESFRFFATVTTSKNDVSHDLPGRLTFSALWRKVMVGEPNQSDMVNIIKGCYPSLEPISSKLIDTFEKVNSLGSYQFGSLNLAGGLSDGVLHRFSLRDLLKWCKRILGTDLNFEDLRFASSGCKLIYHEAVDIFTASLSSPEKRLYVAGEIARILCVPYRGETVQPTEKPVIQARHMELQVGRVTLPCCDKPTLIQKGPFADIRRALEILERVACSIKFNEPILLVGETGTGKTTTVQNLAAWLKQPLTVVNLSQQSDISDLLGGFKPTDARSICFPLYMEFKDLFSRSFSAKDNEAMIRYCDEFVMNKNWKKLLTTLERYVAKAQKLIEGSKSSSGSKRKRPLPAHVVSDWDTFSSRLNMACSQIGSATGMSFQFVEGAFISALRKGHWILLDEVNLAPPETLQRIGAVLDGERGTLCLAERGDVDYVERHPCFRIFACMNPATDAGKRELPYTFRNRFTEYFVDDLMDDDDLRLFVRKYLDGLNAANGVIDSIVRFYKVAKKECEERLQDGANQKPQFSLRSLSRALGYIKNAEKKFGFRKAIYDGFCMFFLTLLDPPSGKIMKNLIVSLLLDGRVPPNISFVDYFTDKPLQLGGCESDDFLQSYVLTQSVTEHIINLARAVYIRRYPVLLQGPTSSGKTSLVRYLAAKTGHEFVRINNHEHTDLQEYLGTYVTDSQGKLQFQEGALVKAVREGHWIVLDELNLAPSDVLEALNRLLDDNRELFIPELQETIPAHPNFMLFATQNPPMLYGGRKMLSRAFRNRFVEVHVDEIPEDELATILEQRCRIAPSYAKRMVEVMKELQTHRQNSRVFAGKHGFITPRDLFRWANRYRTFEGKSYEDLAKDGYLLLAERLRDVNEKVVVKEALERHLRVKLNIADLYNSEVTREDNLFIDVIKLRVQDCVGNITWTKSMWRLYFLIERCYRSREPVLLVGETGGGKTTVCQILSAVLGLKLHILNCHQYTETSDFIGGFCPIRDRSRIAIEFKDLVAKIKQMKMFFYVAGNVPLETDVSGADSVISHLDEILDRYRKKKYLFPEVSAQDLGAMEQIKLDLMHLHKRWQAIFLWQDGPLVQAMKNGDLFLIDEISLADDSVLERLNSVLEPERKLSLAEKGGSVLEKIVAHPNFFILATMNPGGDYGKKELSPALRNRFTEIWVPAVIDVDELRSITFGRFTKTDFSCLGDCIVNFWKWFNQLHIGRTLTIRDLLSWISFINVTEQNLGPEQALIHGLFLILLDGLSLGLNVSKTEATEMRNTCLSFLLEELQKVGGTAVDSYLNDLNNYGWGDNMKKKDIDHGCLEDHFGIAPFYIPKGHFPCKQQDFEIMAPTTSKNVLRVLRGMQLPKPLLLEGSPGVGKTSLIVALAGFSGHDVVRINLSEQTDMMDLLGSDLPAQGGNGMEFSWSDGILLQALKNGSWVLLDELNLAPQSVLEGLNAILDHRAEVFIPELGQTYKCSSSFRVFACQNPSSQGGGRKGLPKSFLNRFTKVYVDELSEEDYLFICKSRYGSLISESFIRNLIHFNSRLYMDTMVYRKYGQQGSPWEFNLRDIIRSCEMIAGSPNPMMDDSFLNTVYLQRMRTLVDRHEVVKLYEDVFKKNAWLLEVPLLEEITSNHIKCKTINSTYFQVSLIVLKQPCTVSSKLSGNTLNELNLSSATDVSELLGCFEQYNFFRHYKTVLSEVEHYVDVYFSLSIDTNQKNFVAERRGLFTKWFEFVAAKGHSSIKTSKLMSGNASLPSLSLLAEIVEQMKCDLEMFDFSIPLTKDDLSETLKSINNLQQNGAAHQPVRFKWVAGDLIRAIERGEWIVLDNANFCNPTVLDRINSLVEQERSIMVNECGLVDGNPVVIKAHPKFRMFLTVNSNYGEVSRAMRNRGVEIFLMDQSWNLKGFSNVPGDSERKDVIRFLISCGIPRMELVSSMCEAHMYAKGEGSRVGVNITLLEITRWVQLFQQLIVKGNQFLWSLHLSWEHTYLPCLGEINGSGIVEEGKNKFLTNFDRSEILARNFSFLTVFDGCSTSLHSGLSLSLPGGWPIEQKLRDLIWYSKETCVMRNCMFLQSLGAQYAAYQISSLNDNSLLLGQISLIHPSILPAASLRELQFPTVNGQPVKICVTGAFNSYLADQMLFFAANWVMEQCTKNDLELYGKWFNWYNSLVQPYCNFFESYWYILEQESEHPIWHNILEYYREIVAYHNIDIVTQHIPLLSKKLLDMAGCDSLKACQNRLHRSFKALGLLRLTLQQWQIETKCPDLSVLECTLLPALKSLRCLEGEVLKTIAKSWKRLKIYSLLLDYHRSIWKMMIASQLEGLPIVWNLLRKEILKLQQKFPVEVDVFLMECVNLNNINDTNFQYGKPTLWDYGGHPHLPSSSEIFDKMQELLSFTTDVWPRKNLLNIELDDRKQLTDAMLSANKDLRHLAMEGVSMACIATMKTEEDVLAVVPQLDEVHKRLVGKVNSVRDNLGLLSKTSVPEFKFCCSVSSEILCNIYGFNGWLASLPLLNLKSLNLDTLLLQQLCKCTQKDSSETHEILVNSEYLLKYAMDYSLGSSSRSPLDYIQHQIIWWICHDWAKVDNAHLKVASCILEMWYNYHSSLWTYCSGSPKCLFSVTHDDSCDLAHLTKMDAINTIIQQDLHVVDYLKSGVMLKVASRNLWEGVSCLGNFVSSLHSAADSLFKQIIFVHKKHFEEENYNQLESLLFQQSRRLIEKEDLDTVCALLSSSSCRVLASLSESDKLVESLLMDLYSSYSRDSLLHTGAAWVRIGELRFRLLLSSYSPDPTFKSRYKHSHILEKITLVKLEEKVRHDCEELAGSNSPEDSHDNELLQLLEIKEKDTRAKVVFRPRQSKHKSLIAACLEFEDRLSECKDLLASLTCEGLGQLEVDRVCNWQIISMNFIKRLTEDYREYVDLIQPIQVAVYEMKLGLAIALSGSLQREYLKKIKEDDINRVLGAIYAFMQFPSGSFTERVVTDVTDDLTNYTITGQLGTLNSCSGDVDMLKKLAAMSSQLNVCKVAGKVKSLSEMLASVHHIFLVRTADCVSCSLVMDKSSYASLKDTFDHFTSMWINMKYRLKAKESDDSQYFKFKSRMISIDDIFKDVPLLSDMESEDSILDNEEKLEHEFFKITESIDDDNGVVEDNWDLIPESALKCIVTIHDQLFGSPDLFEKRRKCQVSDAQKVQSFIESYELGTRILKDLPELTCSMFDEKLMPEHLFRVCLEYQRSCAKTHQDCSGYNAYKDPNPPVLFKMVESLTTLQERVNSYLDEWPDHPGLLKILDLIASLLAMPLSTPISKVLLGLQLLAGKAQTLQENDSKFFVKDHLASIFLLVYSWQRLELDCWPILLEEVQTKYELNAAKLWFPLRALLTQTSGIPVDDDLSIIRSVEEFVQTSSLGEYKRRLHILFAFHGEISAGASLGSYSSNAVKKIQNILYSVFGYYMQFLSLVHGKIEEGKKNIEKELKDHVKLYSWEQAPYSSASIENFKRTRQKIFKLLQRFNDILKSPVIFLLNEEATSRKIPCWLDPQRPESHLPVDSEKFNKRFLWYHKWASETSLSLQTLQQSNGSTVGVPTAKEYADMVYDVKHWQNEIELNDRLQFFWISLERICGAANFGSTVKHGKKNQKKTALSNLFKTLEECGLSKHRPMSHEWGDELAAPSPLFLEQSYDSAHLLQQINSQKMLEDVSINHSTLLNTDNWKHANQQYFKCLAMMQQLRQVSLKFNKDLGLEEVNKAMSFMSHLLTVLSEQRHLAYNLFDQRNQFKHAIFLLGSGGKSKSLSSSQNVLLSSMWQQKKLFDAVITLITDSNLLLRSFKDCHYNSCNNFIEVEGISSLLGKFILNFSESKELLDECLLGSTNIFAGAYKSMPHSATEMEQLFTDNCQHIDSLLDGYLPGSNNIFPDAYKSIPLATTEMEQLFADNCQLIDSLREDMKVLCHRDLSVGSVKKVLISRLEELLEKGKMAMENRRHVEENHKLCLKLEASYIEILKETFMLVVGAVRKLTDHEVCSNGTEKSPVGNVASWKDTLQTCIMNLKLDDICVAGEKIRILVRLLVDYKPDIRTSIELHLMHLHAWLSVILSSAEGILSELLEAHITTSEMTLALGDLFIHLFTDGFGSTEDTAEDADELQQDAVGSGTGMGEGDGQKSVSSDIDDESQLGDSKDLTCKADPAPKNDDKAVEMQDGFNAQLSDVSEDLEGKDSGGEDEDTLDNQMGDTGDASEVVGKKSWDKDEDDDPKTSIEKYESGSSAKGTQQDDREMRAKDDGSIEEEDPMEMDSEEGKNNNLEHDPSTHDETELNTDEVMDKADAYDDRTGPELPEPENDSIDVDMVEQEQTDEINADNEDIGTEEAEQADQRLDASDDMEEGDMAQHSDGVVDNEGEHVEDANTDAGEMDSHQLDKADSLMPLSQGLQPDNMQINSNGESEANLANSSDMHGAVAPSVNFSGNEVPNMEISMPNTGNDSILSSNSKPDMQNDAQQHIKQTNPFRSIGDALEDWKERARVSADTQDHQPETGKDSSENTTEFRYVPEGEESTSQALGAATADQINYDNQINQSFLEDESCIRNLEHSDERTPDNPEVPYLQTSQALPNKSENANELDGREIQTDASVQNLVERTDHTFQDLVSFKQPPADDKIALIDLTTDRELPSQMDLDITDAETKRSNAVWKNLELATMKLSQELAEQLRLVMEPTLASKLQGDYRTGKRINMKKVIPYIASHFRRDKIWLRRTKPNKRNYQVVIAVDDSRSMSEGKCGKFAIEALVTVCRAMSQLEVGQFAVASFGKKGNVSVLHDFDQIFNSEAGVNVISSLSFEQDNKIEDEPVSDLLTHLNVMLDTAVARARTPSGQNPLQQLILIISDGKFHEKENLRRHVRDVLNRKRMVAYVLLDSPEDSIINLKEACFRVGEKVELKKYMDSFPFPYYVMLQNIEALPRTLADLLRQWFELMQSANE

SEQ ID NO: 185961 - protein, 3047 aa, Zea Mays
MGSPFVLTATLRKSYEVALMAVGQKWPVLLYGPVGAGKSALINKLAHIVGNRVLFIHMDEQMDGRTLLGSYVCTEKPGEFKWAPGSLTQAIVKGFWIVFEDIDKAPSDVRSILVPLLEGSNTFSVGHAEAVEVAESFRFFATVTTSKNDVSHDLPGRLTFSALWRKVMVGEPNQSDMVNIIKGCYPSLEPISSKLIDTFEKVNSLGSYQFGSLNLAGGLSDGVLHRFSLRDLLKWCKRILGTDLNFEDLRFASSGCKLIYHEAVDIFTASLSSPEKRLYVAGEIARILCVPYRGETVQPTEKPVIQARHMELQVGRVTLPCCDKPTLIQKGPFADIRRALEILERVACSIKFNEPILLVGETGTGKTTTVQNLAAWLKQPLTVVNLSQQSDISDLLGGFKPTDARSICFPLYMEFKDLFSRSFSAKDNEAMIRYCDEFVMNKNWKKLLTTLERYVAKAQKLIEGSKSSSGSKRKRPLPAHVVSDWDTFSSRLNMACSQIGSATGMSFQFVEGAFISALRKGHWILLDEVNLAPPETLQRIGAVLDGERGTLCLAERGDVDYVERHPCFRIFACMNPATDAGKRELPYTFRNRFTEYFVDDLMDDDDLRLFVRKYLDGLNAANGVIDSIVRFYKVAKKECEERLQDGANQKPQFSLRSLSRALGYIKNAEKKFGFRKAIYDGFCMFFLTLLDPPSGKIMKNLIVSLLLDGRVPPNISFVDYFTDKPLQLGGCESDDFLQSYVLTQSVTEHIINLARAVYIRRYPVLLQGPTSSGKTSLVRYLAAKTGHEFVRINNHEHTDLQEYLGTYVTDSQGKLQFQEGALVKAVREGHWIVLDELNLAPSDVLEALNRLLDDNRELFIPELQETIPAHPNFMLFATQNPPMLYGGRKMLSRAFRNRFVEVHVDEIPEDELATILEQRCRIAPSYAKRMVEVMKELQTHRQNSRVFAGKHGFITPRDLFRWANRYRTFEGKSYEDLAKDGYLLLAERLRDVNEKVVVKEALERHLRVKLNIADLYNSEVTREDNLFIDVIKLRVQDCVGNITWTKSMWRLYFLIERCYRSREPVLLVGETGGGKTTVCQILSAVLGLKLHILNCHQYTETSDFIGGFCPIRDRSRIAIEFKDLVAKIKQMKMFFYVAGNVPLETDVSGADSVISHLDEILDRYRKKKYLFPEVSAQDLGAMEQIKLDLMHLHKRWQAIFLWQDGPLVQAMKNGDLFLIDEISLADDSVLERLNSVLEPERKLSLAEKGGSVLEKIVAHPNFFILATMNPGGDYGKKELSPALRNRFTEIWVPAVIDVDELRSITFGRFTKTDFSCLGDCIVNFWKWFNQLHIGRTLTIRDLLSWISFINVTEQNLGPEQALIHGLFLILLDGLSLGLNVSKTEATEMRNTCLSFLLEELQKVGGTAVDSYLNDLNNYGWGDNMKKKDIDHGCLEDHFGIAPFYIPKGHFPCKQQDFEIMAPTTSKNVLRVLRGMQLPKPLLLEGSPGVGKTSLIVALAGFSGHDVVRINLSEQTDMMDLLGSDLPAQGGNGMEFSWSDGILLQALKNGSWVLLDELNLAPQSVLEGLNAILDHRAEVFIPELGQTYKCSSSFRVFACQNPSSQGGGRKGLPKSFLNRFTKVYVDELSEEDYLFICKSRYGSLISESFIRNLIHFNSRLYMDTMVYRKYGQQGSPWEFNLRDIIRSCEMIAGSPNPMMDDSFLNTVYLQRMRTLVDRHEVVKLYEDVFKKKISIHQPKMLHVNPHCLVVGSASIRRNNIQSYKVQNNQLNIFPGVLNSLEAAMHCIQQGWLCILIGQNSAGKTSLIRLLAQLSGNTLNELNLSSATDVSELLGCFEQYNFFRHYKTVLSEVEHYVDVYFSLSIDTNQKNFVAERRGLFTKWFEFVAAKGHSSIKTSKLMSGNASLPSLSLLAEIVEQMKCDLEMFDFSIPLTKDDLSETLKSINNLQQNGAAHQPVRFKWVAGDLIRAIERGEWIVLDNANFCNPTVLDRINSLVEQERSIMVNECGLVDGNPVVIKAHPKFRMFLTVNSNYGEVSRAMRNRGVEIFLMDQSWNLKGFSNVPGDSERKDVIRFLISCGIPRMELVSSMCEAHMYAKGEGSRVGVNITLLEITRWVQLFQQLIVKGNQFLWSLHLSWEHTYLPCLGEINGSGIVEEGKNKFLTNFDRSEILARNFSFLTVFDGCSTSLHSGLSLSLPGGWPIEQKLRDLIWYSKETCVMRNCMFLQSLGAQYAAYQISSLNDNSLLLGQISLIHPSILPAASLRELQFPTVNGQPVKICVTGAFNSYLADQMLFFAANWVMEQCTKNDLELYGKWFNWYNSLVQPYCNFFESYWYILEQESEHPIWHNILEYYREIVAYHNIDIVTQHIPLLSKKLLDMAGCDSLKACQNRLHRSFKALGLLRLTLQQWQIETKCPDLSVLECTLLPALKSLRCLEGEVLKTIAKSWKRLKIYSLLLDYHRSIWKMMIASQLEGLPIVWNLLRKEILKLQQKFPVEVDVFLMECVNLNNINDTNFQYGKPTLWDYGGHPHLPSSSEIFDKMQELLSFTTDVWPRKNLLNIELDDRKQLTDAMLSANKDLRHLAMEGVSMACIATMKTEEDVLAVVPQLDEVHKRLVGKVNSVRDNLGLLSKTSVPEFKFCCSVSSEILCNIYGFNGWLASLPLLNLKSLNLDTLLLQQLCKCTQKDSSETHEILVNSEYLLKYAMDYSLGSSSRSPLDYIQHQIIWWICHDWAKVDNAHLKVASCILEMWYNYHSSLWTYCSGSPKCLFSVTHDDSCDLAHLTKMDAINTIIQQDLHVVDYLKSGVMLKVASRNLWEGVSCLGNFVSSLHSAADSLFKQIIFVHKKHFEEENYNQLESLLFQQSRRLIEKEDLDTVCALLSSSSCRVLASLSESDKLVESLLMDLYSSYSRDSLLHTGAAWVRIGELRFRLLLSSYSPDPTFKSRYKHSHILEKITLVKLEEKVRHDCEELAGSNSPEDSHDNELLQLLEIKEKDTRAKVVFRPRQSKHKSLIAACLEFEDRLSECKDLLASLTCEGLGQLEVDRVCN

SEQ ID NO: 185962 - protein, 3240 aa, Zea Mays
MHCIQQGWLCILIGQNSAGKTSLIRLLAQLSGNTLNELNLSSATDVSELLGCFEQYNFFRHYKTVLSEVEHYVDVYFSLSIDTNQKNFVAERRGLFTKWFEFVAAKGHSSIKTSKLMSGNASLPSLSLLAEIVEQMKCDLEMFDFSIPLTKDDLSETLKSINNLQQNGAAHQPVRFKWVAGDLIRAIERGEWIVLDNANFCNPTVLDRINSLVEQERSIMVNECGLVDGNPVVIKAHPKFRMFLTVNSNYGEVSRAMRNRGVEIFLMDQSWNLKGFSNVPGDSERKDVIRFLISCGIPRMELVSSMCEAHMYAKGEGSRVASLHSGLSLSLPGGWPIEQKLRDLIWYSKETCVMRNCMFLQSLGAQYAAYQISSLNDNSLLLGQISLIHPSILPAASLRELQFPTVNGQPVKICVTGAFNSYLADQMLFFAANWVMEQCTKNDLELYGKWFNWYNSLVQPYCNFFESYWYILEQESEHPIWHNILEYYREIVAYHNIDIVTQHIPLLSKKLLDMAGCDSLKACQNRLHRSFKALGLLRLTLQQWQIETKCPDLSVLECTLLPALKSLRCLEGEVLKTIAKSWKRLKIYSLLLDYHRSIWKMMIASQLEGLPIVWNLLRKEILKLQQKFPVEVDVFLMECVNLNNINDTNFQYGKPTLWDYGGHPHLPSSSEIFDKMQELLSFTTDVWPRKNLLNIELDDRKQLTDAMLSANKDLRHLAMEGVSMACIATMKTEEDVLAVVPQLDEVHKRLVGKVNSVRDNLGLLSKTSVPEFKFCCSVSSEILCNIYGFNGWLASLPLLNLKSLNLDTLLLQQLCKCTQKDSSETHEILVNSEYLLKYAMDYSLGSSSRSPLDYIQHQIIWWICHDWAKVDNAHLKVASCILEMWYNYHSSLWTYCSGSPKCLFSVTHDDSCDLAHLTKMDAINTIIQQDLHVVDYLKSGVMLKVASRNLWEGVSCLGNFVSSLHSAADSLFKQIIFVHKKHFEEENYNQLESLLFQQSRRLIEKEDLDTVCALLSSSSCRVLASLSESDKLVESLLMDLYSSYSRDSLLHTGAAWVRIGELRFRLLLSSYSPDPTFKSRYKHSHILEKITLVKLEEKVRHDCEELAGSNSPEDSHDNELLQLLEIKEKDTRAKVVFRPRQSKHKSLIAACLEFEDRLSECKDLLASLTCEGLGQLEVDRVCNWQIISMNFIKRLTEDYREYVDLIQPIQVAVYEMKLGLAIALSGSLQREYLKKIKEDDINRVLGAIYAFMQFPSGSFTERVVTDVTDDLTNYTITGQLGTLNSCSGDVDMLKKLAAMSSQLNVCKVAGKVKSLSEMLASVHHIFLVRTADCVSCSLVMDKSSYASLKDTFDHFTSMWINMKYRLKAKESDDSQYFKFKSRMISIDDIFKDVPLLSDMESEDSILDNEEKLEHEFFKITESIDDDNGVVEDNWDLIPESALKCIVTIHDQLFGSPDLFEKRRKCQVSDAQKVQSFIESYELGTRILKDLPELTCSMFDEKLMPEHLFRVCLEYQRSCAKTHQDCSGYNAYKDPNPPVLFKMVESLTTLQERVNSYLDEWPDHPGLLKILDLIASLLAMPLSTPISKVLLGLQLLAGKAQTLQENDSKFFVKDHLASIFLLVYSWQRLELDCWPILLEEVQTKYELNAAKLWFPLRALLTQTSGIPVDDDLSIIRSVEEFVQTSSLGEYKRRLHILFAFHGEISAGASLGSYSSNAVKKIQNILYSVFGYYMQFLSLVHGKIEEGKKNIEKELKDHVKLYSWEQAPYSSASIENFKRTRQKIFKLLQRFNDILKSPVIFLLNEEATSRKIPCWLDPQRPESHLPVDSEKFNKRFLWYHKWASETSLSLQTLQQSNGSTVGVPTAKEYADMVYDVKHWQNEIELNDRLQFFWISLERICGAANFGSTVKHGKKNQKKTALSNLFKTLEECGLSKHRPMSHEWGDELAAPSPLFLEQSYDSAHLLQQINSQKMLEDVSINHSTLLNTDNWKHANQQYFKCLAMMQQLRQVSLKFNKDLGLEEVNKAMSFMSHLLTVLSEQRHLAYNLFDQRNQFKHAIFLLGSGGKSKSLSSSQNVLLSSMWQQKKLFDAVITLITDSNLLLRSFKDCHYNSCNNFIEVEGISSLLGKFILNFSESKELLDECLLGSTNIFAGAYKSMPHSATEMEQLFTDNCQHIDSLLDGYLPGSNNIFPDAYKSIPLATTEMEQLFADNCQLIDSLREDMKVLCHRDLSVGSVKKVLISRLEELLEKGKMAMENRRHVEENHKLCLKLEASYIEILKETFMLVVGAVRKLTDHEVCSNGTEKSPVGNVASWKDTLQTCIMNLKLDDICVAGEKIRILVRLLVDYKPDIRTSIELHLMHLHAWLSVILSSAEGILSELLEAHITTSEMTLALGDLFIHLFTDGFGSTEDTAEDADELQQDAVGSGTGMGEGDGQKSVSSDIDDESQLGDSKDLTCKADPAPKNDDKAVEMQDGFNAQLSDVSEDLEGKDSGGEDEDTLDNQMGDTGDASEVVGKKSWDKDEDDDPKTSIEKYESGSSAKGTQQDDREMRAKDDGSIEEEDPMEMDSEEGKNNNLEHDPSTHDETELNTDEVMDKADAYDDRTGPELPEPENDSIDVDMVEQEQTDEINADNEDIGTEEAEQADQRLDASDDMEEGDMAQHSDGVVDNEGEHVEDANTDAGEMDSHQLDKADSLMPLSQGLQPDNMQINSNGESEANLANSSDMHGAVAPSVNFSGNEVPNMEISMPNTGNDSILSSNSKPDMQNDAQQHIKQTNPFRSIGDALEDWKERARVSADTQDHQPETGKDSSENTTEFRYVPEGEESTSQALGAATADQINYDNQINQSFLEDESCIRNLEHSDERTPDNPEVPYLQTSQALPNKSENANELDGREIQTDASVQNLVERTDHTFQDLVSFKQPPADDKIALIDLTTDRELPSQMDLDITDAETKRSNAVWKNLELATMKLSQELAEQLRLVMEPTLASKLQGDYRTGKRINMKKVIPYIASHFRRDKIWLRRTKPNKRNYQVVIAVDDSRSMSEGKCGKFAIEALVTVCRAMSQLEVGQFAVASFGKKGNVSVLHDFDQIFNSEAGVNVISSLSFEQDNKIEDEPVSDLLTHLNVMLDTAVARARTPSGQNPLQQLILIISDGKFHEKENLRRHVRDVLNRKRMVAYVLLDSPEDSIINLKEACFRVGEKVELKKYMDSFPFPYYVMLQNIEALPRTLADLLRQWFELMQSANE

SEQ ID NO: 185963 - protein, 3320 aa, Zea Mays
MHCIQQGWLCILIGQNSAGKTSLIRLLAQLSGNTLNELNLSSATDVSELLGCFEQYNFFRHYKTVLSEVEHYVDVYFSLSIDTNQKNFVAERRGLFTKWFEFVAAKGHSSIKTSKLMSGNASLPSLSLLAEIVEQMKCDLEMFDFSIPLTKDDLSETLKSINNLQQNGAAHQPVRFKWVAGDLIRAIERGEWIVLDNANFCNPTVLDRINSLVEQERSIMVNECGLVDGNPVVIKAHPKFRMFLTVNSNYGEVSRAMRNRGVEIFLMDQSWNLKGFSNVPGDSERKDVIRFLISCGIPRMELVSSMCEAHMYAKGEGSRVGVNITLLEITRWVQLFQQLIVKGNQFLWSLHLSWEHTYLPCLGEINGSGIVEEGKNKFLTNFDRSEILARNFSFLTVFDGCSTSLHSGLSLSLPGGWPIEQKLRDLIWYSKETCVMRNCMFLQSLGAQYAAYQISSLNDNSLLLGQISLIHPSILPAASLRELQFPTVNGQPVKICVTGAFNSYLADQMLFFAANWVMEQCTKNDLELYGKWFNWYNSLVQPYCNFFESYWYILEQESEHPIWHNILEYYREIVAYHNIDIVTQHIPLLSKKLLDMAGCDSLKACQNRLHRSFKALGLLRLTLQQWQIETKCPDLSVLECTLLPALKSLRCLEGEVLKTIAKSWKRLKIYSLLLDYHRSIWKMMIASQLEGLPIVWNLLRKEILKLQQKFPVEVDVFLMECVNLNNINDTNFQYGKPTLWDYGGHPHLPSSSEIFDKMQELLSFTTDVWPRKNLLNIELDDRKQLTDAMLSANKDLRHLAMEGVSMACIATMKTEEDVLAVVPQLDEVHKRLVGKVNSVRDNLGLLSKTSVPEFKFCCSVSSEILCNIYGFNGWLASLPLLNLKSLNLDTLLLQQLCKCTQKDSSETHEILVNSEYLLKYAMDYSLGSSSRSPLDYIQHQIIWWICHDWAKVDNAHLKVASCILEMWYNYHSSLWTYCSGSPKCLFSVTHDDSCDLAHLTKMDAINTIIQQDLHVVDYLKSGVMLKVASRNLWEGVSCLGNFVSSLHSAADSLFKQIIFVHKKHFEEENYNQLESLLFQQSRRLIEKEDLDTVCALLSSSSCRVLASLSESDKLVESLLMDLYSSYSRDSLLHTGAAWVRIGELRFRLLLSSYSPDPTFKSRYKHSHILEKITLVKLEEKVRHDCEELAGSNSPEDSHDNELLQLLEIKEKDTRAKVVFRPRQSKHKSLIAACLEFEDRLSECKDLLASLTCEGLGQLEVDRVCNWQIISMNFIKRLTEDYREYVDLIQPIQVAVYEMKLGLAIALSGSLQREYLKKIKEDDINRVLGAIYAFMQFPSGSFTERVVTDVTDDLTNYTITGQLGTLNSCSGDVDMLKKLAAMSSQLNVCKVAGKVKSLSEMLASVHHIFLVRTADCVSCSLVMDKSSYASLKDTFDHFTSMWINMKYRLKAKESDDSQYFKFKSRMISIDDIFKDVPLLSDMESEDSILDNEEKLEHEFFKITESIDDDNGVVEDNWDLIPESALKCIVTIHDQLFGSPDLFEKRRKCQVSDAQKVQSFIESYELGTRILKDLPELTCSMFDEKLMPEHLFRVCLEYQRSCAKTHQDCSGYNAYKDPNPPVLFKMVESLTTLQERVNSYLDEWPDHPGLLKILDLIASLLAMPLSTPISKVLLGLQLLAGKAQTLQENDSKFFVKDHLASIFLLVYSWQRLELDCWPILLEEVQTKYELNAAKLWFPLRALLTQTSGIPVDDDLSIIRSVEEFVQTSSLGEYKRRLHILFAFHGEISAGASLGSYSSNAVKKIQNILYSVFGYYMQFLSLVHGKIEEGKKNIEKELKDHVKLYSWEQAPYSSASIENFKRTRQKIFKLLQRFNDILKSPVIFLLNEEATSRKIPCWLDPQRPESHLPVDSEKFNKRFLWYHKWASETSLSLQTLQQSNGSTVGVPTAKDMVYDVKHWQNEIELNDRLQFFWISLERICGAANFGSTVKHGKKNQKKTALSNLFKTLEECGLSKHRPMSHEWGDELAAPSPLFLEQSYDSAHLLQQINSQKMLEDVSINHSTLLNTDNWKHANQQYFKCLAMMQQLRQVSLKFNKDLGLEEVNKAMSFMSHLLTVLSEQRHLAYNLFDQRNQFKHAIFLLGSGGKSKSLSSSQNVLLSSMWQQKKLFDAVITLITDSNLLLRSFKDCHYNSCNNFIEVEGISSLLGKFILNFSESKELLDECLLGSTNIFAGAYKSMPHSATEMEQLFTDNCQHIDSLLDGYLPGSNNIFPDAYKSIPLATTEMEQLFADNCQLIDSLREDMKVLCHRDLSVGSVKKVLISRLEELLEKGKMAMENRRHVEENHKLCLKLEASYIEILKETFMLVVGAVRKLTDHEVCSNGTEKSPVGNVASWKDTLQTCIMNLKLDDICVAGEKIRILVRLLVDYKPDIRTSIELHLMHLHAWLSVILSSAEGILSELLEAHITTSEMTLALGDLFIHLFTDGFGSTEDTAEDADELQQDAVGSGTGMGEGDGQKSVSSDIDDESQLGDSKQDLTCKADPAPKNDDKAVEMQDGFNAQLSDVSEDLEGKDSGGEDEDTLDNQMGDTGDASEVVGKKSWDKDEDDDPKTSIEKYESGSSAKGTQQDDREMRAKDDGSIEEEDPMEMDSEEGKNNNLEHDPSTHDETELNTDEVMDKADAYDDRTGPELPEPENDSIDVDMVEQEQTDEINADNEDIGTEEAEQADQRLDASDDMEEGDMAQHSDGVVDNEGEHVEDANTDAGEMDSHQLDKADSLMPLSQGLQPDNMQINSNGESEANLANSSDMHGAVAPSVNFSGNEVPNMEISMPNTGNDSILSSNSKPDMQNDAQQHIKQTNPFRSIGDALEDWKERARVSADTQDHQPETGKDSSENTTEFRYVPEGEESTSQALGAATADQINYDNQINQSFLEDESCIRNLEHSDERTPDNPEVPYLQTSQALPNKSENANELDGREIQTDASVQNLVERTDHTFQDLVSFKQPPADDKIALIDLTTDRELPSQMDLDITDAETKRSNAVWKNLELATMKLSQELAEQLRLVMEPTLASKLQGDYRTGKRINMKKVIPYIASHFRRDKIWLRRTKPNKRNYQVVIAVDDSRSMSEGKCGKFAIEALVTVCRAMSQLEVGQFAVASFGKKGNVSVLHDFDQIFNSEAGVNVISSLSFEQDNKIEDEPVSDLLTHLNVMLDTAVARARTPSGQNPLQQLILIISDGKFHEKENLRRHVRDVLNRKRMVAYVLLDSPEDSIINLKEACFRVGEKVELKKYMDSFPFPYYVMLQNIEALPRTLADLLRQWFELMQSANE

SEQ ID NO: 185964 - protein, 4966 aa, Zea Mays
MGSPFVLTATLRKSYEVALMAVGQKWPVLLYGPVGAGKSALINKLAHIVGNRVLFIHMDEQMDGRTLLGSYVCTEKPGEFKWAPGSLTQAIVKGFWIVFEDIDKAPSDVRSILVPLLEGSNTFSVGHAEAVEVAESFRFFATVTTSKNDVSHDLPGRLTFSALWRKVMVGEPNQSDMVNIIKGCYPSLEPISSKLIDTFEKVNSLGSYQFGSLNLAGGLSDGVLHRFSLRDLLKWCKRILGTDLNFEDLRFASSGCKLIYHEAVDIFTASLSSPEKRLYVAGEIARILCVPYRGETVQPTEKPVIQARHMELQVGRVTLPCCDKPTLIQKGPFADIRRALEILERVACSIKFNEPILLVGETGTGKTTTVQNLAAWLKQPLTVVNLSQQSDISDLLGGFKPTDARSICFPLYMEFKDLFSRSFSAKDNEAMIRYCDEFVMNKNWKKLLTTLERYVAKAQKLIEGSKSSSGSKRKRPLPAHVVSDWDTFSSRLNMACSQIGSATGMSFQFVEGAFISALRKGHWILLDEVNLAPPETLQRIGAVLDGERGTLCLAERGDVDYVERHPCFRIFACMNPATDAGKRELPYTFRNRFTEYFVDDLMDDDDLRLFVRKYLDGLNAANGVIDSIVRFYKVAKKECEERLQDGANQKPQFSLRSLSRALGYIKNAEKKFGFRKAIYDGFCMFFLTLLDPPSGKIMKNLIVSLLLDGRVPPNISFVDYFTDKPLQLGGCESDDFLQSYVLTQSVTEHIINLARAVYIRRYPVLLQGPTSSGKTSLVRYLAAKTGHEFVRINNHEHTDLQEYLGTYVTDSQGKLQFQEGALVKAVREGHWIVLDELNLAPSDVLEALNRLLDDNRELFIPELQETIPAHPNFMLFATQNPPMLYGGRKMLSRAFRNRFVEVHVDEIPEDELATILEQRCRIAPSYAKRMVEVMKELQTHRQNSRVFAGKHGFITPRDLFRWANRYRTFEGKSYEDLAKDGYLLLAERLRDVNEKVVVKEALERHLRVKLNIADLYNSEVTREDNLFIDVIKLRVQDCVGNITWTKSMWRLYFLIERCYRSREPVLLVGETGGGKTTVCQILSAVLGLKLHILNCHQYTETSDFIGGFCPIRDRSRIAIEFKDLVAKIKQMKMFFYVAGNVPLETDVSGADSVISHLDEILDRYRKKKYLFPEVSAQDLGAMEQIKLDLMHLHKRWQAIFLWQDGPLVQAMKNGDLFLIDEISLADDSVLERLNSVLEPERKLSLAEKGGSVLEKIVAHPNFFILATMNPGGDYGKKELSPALRNRFTEIWVPAVIDVDELRSITFGRFTKTDFSCLGDCIVNFWKWFNQLHIGRTLTIRDLLSWISFINVTEQNLGPEQALIHGLFLILLDGLSLGLNVSKTEATEMRNTCLSFLLEELQKVGGTAVDSYLNDLNNYGWGDNMKKKDIDHGCLEDHFGIAPFYIPKGHFPCKQQDFEIMAPTTSKNVLRVLRGMQLPKPLLLEGSPGVGKTSLIVALAGFSGHDVVRINLSEQTDMMDLLGSDLPAQGGNGMEFSWSDGILLQALKNGSWVLLDELNLAPQSVLEGLNAILDHRAEVFIPELGQTYKCSSSFRVFACQNPSSQGGGRKGLPKSFLNRFTKVYVDELSEEDYLFICKSRYGSLISESFIRNLIHFNSRLYMDTMVYRKYGQQGSPWEFNLRDIIRSCEMIAGSPNPMMDDSFLNTVYLQRMRTLVDRHEVVKLYEDVFKKKISIHQPKMLHVNPHCLVVGSASIRRNNIQSYKVQNNQLNIFPGVLNSLEAAMHCIQQGWLCILIGQNSAGKTSLIRLLAQLSGNTLNELNLSSATDVSELLGCFEQYNFFRHYKTVLSEVEHYVDVYFSLSIDTNQKNFVAERRGLFTKWFEFVAAKGHSSIKTSKLMSGNASLPSLSLLAEIVEQMKCDLEMFDFSIPLTKDDLSETLKSINNLQQNGAAHQPVRFKWVAGDLIRAIERGEWIVLDNANFCNPTVLDRINSLVEQERSIMVNECGLVDGNPVVIKAHPKFRMFLTVNSNYGEVSRAMRNRGVEIFLMDQSWNLKGFSNVPGDSERKDVIRFLISCGIPRMELVSSMCEAHMYAKGEGSRVASLHSGLSLSLPGGWPIEQKLRDLIWYSKETCVMRNCMFLQSLGAQYAAYQISSLNDNSLLLGQISLIHPSILPAASLRELQFPTVNGQPVKICVTGAFNSYLADQMLFFAANWVMEQCTKNDLELYGKWFNWYNSLVQPYCNFFESYWYILEQESEHPIWHNILEYYREIVAYHNIDIVTQHIPLLSKKLLDMAGCDSLKACQNRLHRSFKALGLLRLTLQQWQIETKCPDLSVLECTLLPALKSLRCLEGEVLKTIAKSWKRLKIYSLLLDYHRSIWKMMIASQLEGLPIVWNLLRKEILKLQQKFPVEVDVFLMECVNLNNINDTNFQYGKPTLWDYGGHPHLPSSSEIFDKMQELLSFTTDVWPRKNLLNIELDDRKQLTDAMLSANKDLRHLAMEGVSMACIATMKTEEDVLAVVPQLDEVHKRLVGKVNSVRDNLGLLSKTSVPEILVNSEYLLKYAMDYSLGSSSRSPLDYIQHQIIWWICHDWAKVDNAHLKVASCILEMWYNYHSSLWTYCSGSPKCLFSVTHDDSCDLAHLTKMDAINTIIQQDLHVVDYLKSGVMLKVASRNLWEGVSCLGNFVSSLHSAADSLFKQIIFVHKKHFEEENYNQLESLLFQQSRRLIEKEDLDTVCALLSSSSCRVLASLSESDKLVESLLMDLYSSYSRDSLLHTGAAWVRIGELRFRLLLSSYSPDPTFKSRYKHSHILEKITLVKLEEKVRHDCEELAGSNSPEDSHDNELLQLLEIKEKDTRAKVVFRPRQSKHKSLIAACLEFEDRLSECKDLLASLTCEGLGQLEVDRVCNWQIISMNFIKRLTEDYREYVDLIQPIQVAVYEMKLGLAIALSGSLQREYLKKIKEDDINRVLGAIYAFMQFPSGSFTERVVTDVTDDLTNYTITGQLGTLNSCSGDVDMLKKLAAMSSQLNVCKVAGKVKSLSEMLASVHHIFLVRTADCVSCSLVMDKSSYASLKDTFDHFTSMWINMKYRLKAKESDDSQYFKFKSRMISIDDIFKDVPLLSDMESEDSILDNEEKLEHEFFKITESIDDDNGVVEDNWDLIPESALKCIVTIHDQLFGSPDLFEKRRKCQVSDAQKVQSFIESYELGTRILKDLPELTCSMFDEKLMPEHLFRVCLEYQRSCAKTHQDCSGYNAYKDPNPPVLFKMVESLTTLQERVNSYLDEWPDHPGLLKILDLIASLLAMPLSTPISKVLLGLQLLAGKAQTLQENDSKFFVKDHLASIFLLVYSWQRLELDCWPILLEEVQTKYELNAAKLWFPLRALLTQTSGIPVDDDLSIIRSVEEFVQTSSLGEYKRRLHILFAFHGEISAGASLGSYSSNAVKKIQNILYSVFGYYMQFLSLVHGKIEEGKKNIEKELKDHVKLYSWEQAPYSSASIENFKRTRQKIFKLLQRFNDILKSPVIFLLNEEATSRKIPCWLDPQRPESHLPVDSEKFNKRFLWYHKWASETSLSLQTLQQSNGSTVGVPTAKEYADMVYDVKHWQNEIELNDRLQFFWISLERICGAANFGSTVKHGKKNQKKTALSNLFKTLEECGLSKHRPMSHEWGDELAAPSPLFLEQSYDSAHLLQQINSQKMLEDVSINHSTLLNTDNWKHANQQYFKCLAMMQQLRQVSLKFNKDLGLEEVNKAMSFMSHLLTVLSEQRHLAYNLFDQRNQFKHAIFLLGSGGKSKSLSSSQNVLLSSMWQQKKLFDAVITLITDSNLLLRSFKDCHYNSCNNFIEVEGISSLLGKFILNFSESKELLDECLLGSTNIFAGAYKSMPHSATEMEQLFTDNCQHIDSLLDGYLPGSNNIFPDAYKSIPLATTEMEQLFADNCQLIDSLREDMKVLCHRDLSVGSVKKVLISRLEELLEKGKMAMENRRHVEENHKLCLKLEASYIEILKETFMLVVGAVRKLTDHEVCSNGTEKSPVGNVASWKDTLQTCIMNLKLDDICVAGEKIRILVRLLVDYKPDIRTSIELHLMHLHAWLSVILSSAEGILSELLEAHITTSEMTLALGDLFIHLFTDGFGSTEDTAEDADELQQDAVGSGTGMGEGDGQKSVSSDIDDESQLGDSKDLTCKADPAPKNDDKAVEMQDGFNAQLSDVSEDLEGKDSGGEDEDTLDNQMGDTGDASEVVGKKSWDKDEDDDPKTSIEKYESGSSAKGTQQDDREMRAKDDGSIEEEDPMEMDSEEGKNNNLEHDPSTHDETELNTDEVMDKADAYDDRTGPELPEPENDSIDVDMVEQEQTDEINADNEDIGTEEAEQADQRLDASDDMEEGDMAQHSDGVVDNEGEHVEDANTDAGEMDSHQLDKADSLMPLSQGLQPDNMQINSNGESEANLANSSDMHGAVAPSVNFSGNEVPNMEISMPNTGNDSILSSNSKPDMQNDAQQHIKQTNPFRSIGDALEDWKERARVSADTQDHQPETGKDSSENTTEFRYVPEGEESTSQALGAATADQINYDNQINQSFLEDESCIRNLEHSDERTPDNPEVPYLQTSQALPNKSENANELDGREIQTDASVQNLVERTDHTFQDLVSFKQPPADDKIALIDLTTDRELPSQMDLDITDAETKRSNAVWKNLELATMKLSQELAEQLRLVMEPTLASKLQGDYRTGKRINMKKVIPYIASHFRRDKIWLRRTKPNKRNYQVVIAVDDSRSMSEGKCGKFAIEALVTVCRAMSQLEVGQFAVASFGKKGNVSVLHDFDQIFNSEAGVNVISSLSFEQDNKIEDEPVSDLLTHLNVMLDTAVARARTPSGQNPLQQLILIISDGKFHEKENLRRHVRDVLNRKRMVAYVLLDSPEDSIINLKEACFRVGEKVELKKYMDSFPFPYYVMLQNIEALPRTLADLLRQWFELMQSANE

SEQ ID NO: 185965 - protein, 2988 aa, Zea Mays
MGSPFVLTATLRKSYEVALMAVGQKWPVLLYGPVGAGKSALINKLAHIVGNRVLFIHMDEQMDGRTLLGSYVCTEKPGEFKWAPGSLTQAIVKGFWIVFEDIDKAPSDVRSILVPLLEGSNTFSVGHAEAVEVAESFRFFATVTTSKNDVSHDLPGRLTFSALWRKVMVGEPNQSDMVNIIKGCYPSLEPISSKLIDTFEKVNSLGSYQFGSLNLAGGLSDGVLHRFSLRDLLKWCKRILGTDLNFEDLRFASSGCKLIYHETLIQKGPFADIRRALEILERVACSIKFNEPILLVGETGTGKTTTVQNLAAWLKQPLTVVNLSQQSDISDLLGGFKPTDARSICFPLYMEFKDLFSRSFSAKDNEAMIRYCDEFVMNKNWKKLLTTLERYVAKAQKLIEGSKSSSGSKRKRPLPAHVVSDWDTFSSRLNMACSQIGSATGMSFQFVEGAFISALRKGHWILLDEVNLAPPETLQRIGAVLDGERGTLCLAERGDVDYVERHPCFRIFACMNPATDAGKRELPYTFRNRFTEYFVDDLMDDDDLRLFVRKYLDGLNAANGVIDSIVRFYKVAKKECEERLQDGANQKPQFSLRSLSRALGYIKNAEKKFGFRKAIYDGFCMFFLTLLDPPSGKIMKNLIVSLLLDGRVPPNISFVDYFTDKPLQLGGCESDDFLQSYVLTQSVTEHIINLARAVYIRRYPVLLQGPTSSGKTSLVRYLAAKTGHEFVRINNHEHTDLQEYLGTYVTDSQGKLQFQEGALVKAVREGHWIVLDELNLAPSDVLEALNRLLDDNRELFIPELQETIPAHPNFMLFATQNPPMLYGGRKMLSRAFRNRFVEVHVDEIPEDELATILEQRCRIAPSYAKRMVEVMKELQTHRQNSRVFAGKHGFITPRDLFRWANRYRTFEGKSYEDLAKDGYLLLAERLRDVNEKVVVKEALERHLRVKLNIADLYNSEVTREDNLFIDVIKLRVQDCVGNITWTKSMWRLYFLIERCYRSREPVLLVGETGGGKTTVCQILSAVLGLKLHILNCHQYTETSDFIGGFCPIRDRSRIAIEFKDLVAKIKQMKMFFYVAGNVPLETDVSGADSVISHLDEILDRYRKKKYLFPEVSAQDLGAMEQIKLDLMHLHKRWQAIFLWQDGPLVQAMKNGDLFLIDEISLADDSVLERLNSVLEPERKLSLAEKGGSVLEKIVAHPNFFILATMNPGGDYGKKELSPALRNRFTEIWVPAVIDVDELRSITFGRFTKTDFSCLGDCIVNFWKWFNQLHIGRTLTIRDLLSWISFINVTEQNLGPEQALIHGLFLILLDGLSLGLNVSKTEATEMRNTCLSFLLEELQKVGGTAVDSYLNDLNNYGWGDNMKKKDIDHGCLEDHFGIAPFYIPKGHFPCKQQDFEIMAPTTSKNVLRVLRGMQLPKPLLLEGSPGVGKTSLIVALAGFSGHDVVRINLSEQTDMMDLLGSDLPAQGGNGMEFSWSDGILLQALKNGSWVLLDELNLAPQSVLEGLNAILDHRAEVFIPELGQTYKCSSSFRVFACQNPSSQGGGRKGLPKSFLNRFTKVYVDELSEEDYLFICKSRYGSLISESFIRNLIHFNSRLYMDTMVYRKYGQQGSPWEFNLRDIIRSCEMIAGSPNPMMDDSFLNTVYLQRMRTLVDRHEVVKLYEDVFKKKISIHQPKMLHVNPHCLVVGSASIRRNNIQSYKVQNNQLNIFPGVLNSLEAAMHCIQQGWLCILIGQNSAGKTSLIRLLAQLSGNTLNELNLSSATDVSELLGCFEQYNFFRHYKTVLSEVEHYVDVYFSLSIDTNQKNFVAERRGLFTKWFEFVAAKGHSSIKTSKLMSGNASLPSLSLLAEIVEQMKCDLEMFDFSIPLTKDDLSETLKSINNLQQNGAAHQPVRFKWVAGDLIRAIERGEWIVLDNANFCNPTVLDRINSLVEQERSIMVNECGLVDGNPVVIKAHPKFRMFLTVNSNYGEVSRAMRNRGVEIFLMDQSWNLKGFSNVPGDSERKDVIRFLISCGIPRMELVSSMCEAHMYAKGEGSRVGVNITLLEITRWVQLFQQLIVKGNQFLWSLHLSWEHTYLPCLGEINGSGIVEEGKNKFLTNFDRSEILARNFSFLTVFDGCSTSLHSGLSLSLPGGWPIEQKLRDLIWYSKETCVMRNCMFLQSLGAQYAAYQISSLNDNSLLLGQISLIHPSILPAASLRELQFPTVNGQPVKICVTGAFNSYLADQMLFFAANWVMEQCTKNDLELYGKWFNWYNSLVQPYCNFFESYWYILEQESEHPIWHNILEYYREIVAYHNIDIVTQHIPLLSKKLLDMAGCDSLKACQNRLHRSFKALGLLRLTLQQWQIETKCPDLSVLECTLLPALKSLRCLEGEVLKTIAKSWKRLKIYSLLLDYHRSIWKMMIASQLEGLPIVWNLLRKEILKLQQKFPVEVDVFLMECVNLNNINDTNFQYGKPTLWDYGGHPHLPSSSEIFDKMQELLSFTTDVWPRKNLLNIELDDRKQLTDAMLSANKDLRHLAMEGVSMACIATMKTEEDVLAVVPQLDEVHKRLVGKVNSVRDNLGLLSKTSVPEFKFCCSVSSEILCNIYGFNGWLASLPLLNLKSLNLDTLLLQQLCKCTQKDSSETHEILVNSEYLLKYAMDYSLGSSSRSPLDYIQHQIIWWICHDWAKVDNAHLKVASCILEMWYNYHSSLWTYCSGSPKCLFSVTHDDSCDLAHLTKMDAINTIIQQDLHVVDYLKSGVMLKVASRNLWEGVSCLGNFVSSLHSAADSLFKQIIFVHKKHFEEENYNQLESLLFQQSRRLIEKEDLDTVCALLSSSSCRVLASLSESDKLVESLLMDLYSSYSRDSLLHTGAAWVRIGELRFRLLLSSYSPDPTFKSRYKHSHILEKITLVKLEEKVRHDCEELAGSNSPEDSHDNELLQLLEIKEKDTRAKVVFRPRQSKHKSLIAACLEFEDRLSECKDLLASLTCEGLGQLEVDRVCNWQLY

SEQ ID NO: 185966 - protein, 4633 aa, Zea Mays
MEFKDLFSRSFSAKDNEAMIRYCDEFVMNKNWKKLLTTLERYVAKAQKLIEGSKSSSGSKRKRPLPAHVVSDWDTFSSRLNMACSQIGSATGMSFQFVEGAFISALRKGHWILLDEVNLAPPETLQRIGAVLDGERGTLCLAERGDVDYVERHPCFRIFACMNPATDAGKRELPYTFRNRFTEYFVDDLMDDDDLRLFVRKYLDGLNAANGVIDSIVRFYKVAKKECEERLQDGANQKPQFSLRSLSRALGYIKNAEKKFGFRKAIYDGFCMFFLTLLDPPSGKIMKNLIVSLLLDGRVPPNISFVDYFTDKPLQLGGCESDDFLQSYVLTQSVTEHIINLARAVYIRRYPVLLQGPTSSGKTSLVRYLAAKTGHEFVRINNHEHTDLQEYLGTYVTDSQGKLQFQEGALVKAVREGHWIVLDELNLAPSDVLEALNRLLDDNRELFIPELQETIPAHPNFMLFATQNPPMLYGGRKMLSRAFRNRFVEVHVDEIPEDELATILEQRCRIAPSYAKRMVEVMKELQTHRQNSRVFAGKHGFITPRDLFRWANRYRTFEGKSYEDLAKDGYLLLAERLRDVNEKVVVKEALERHLRVKLNIADLYNSEVTREDNLFIDVIKLRVQDCVGNITWTKSMWRLYFLIERCYRSREPVLLVGETGGGKTTVCQILSAVLGLKLHILNCHQYTETSDFIGGFCPIRDRSRIAIEFKDLVAKIKQMKMFFYVAGNVPLETDVSGADSVISHLDEILDRYRKKKYLFPEVSAQDLGAMEQIKLDLMHLHKRWQAIFLWQDGPLVQAMKNGDLFLIDEISLADDSVLERLNSVLEPERKLSLAEKGGSVLEKIVAHPNFFILATMNPGGDYGKKELSPALRNRFTEIWVPAVIDVDELRSITFGRFTKTDFSCLGDCIVNFWKWFNQLHIGRTLTIRDLLSWISFINVTEQNLGPEQALIHGLFLILLDGLSLGLNVSKTEATEMRNTCLSFLLEELQKVGGTAVDSYLNDLNNYGWGDNMKKKDIDHGCLEDHFGIAPFYIPKGHFPCKQQDFEIMAPTTSKNVLRVLRGMQLPKPLLLEGSPGVGKTSLIVALAGFSGHDVVRINLSEQTDMMDLLGSDLPAQGGNGMEFSWSDGILLQALKNGSWVLLDELNLAPQSVLEGLNAILDHRAEVFIPELGQTYKCSSSFRVFACQNPSSQGGGRKGLPKSFLNRFTKVYVDELSEEDYLFICKSRYGSLISESFIRNLIHFNSRLYMDTMVYRKYGQQGSPWEFNLRDIIRSCEMIAGSPNPMMDDSFLNTVYLQRMRTLVDRHEVVKLYEDVFKKKISIHQPKMLHVNPHCLVVGSASIRRNNIQSYKVQNNQLNIFPGVLNSLEAAMHCIQQGWLCILIGQNSAGKTSLIRLLAQLSGNTLNELNLSSATDVSELLGCFEQYNFFRHYKTVLSEVEHYVDVYFSLSIDTNQKNFVAERRGLFTKWFEFVAAKGHSSIKTSKLMSGNASLPSLSLLAEIVEQMKCDLEMFDFSIPLTKDDLSETLKSINNLQQNGAAHQPVRFKWVAGDLIRAIERGEWIVLDNANFCNPTVLDRINSLVEQERSIMVNECGLVDGNPVVIKAHPKFRMFLTVNSNYGEVSRAMRNRGVEIFLMDQSWNLKGFSNVPGDSERKDVIRFLISCGIPRMELVSSMCEAHMYAKGEGSRVGVNITLLEITRWVQLFQQLIVKGNQFLWSLHLSWEHTYLPCLGEINGSGIVEEGKNKFLTNFDRSEILARNFSFLTVFDGCSTSLHSGLSLSLPGGWPIEQKLRDLIWYSKETCVMRNCMFLQSLGAQYAAYQISSLNDNSLLLGQISLIHPSILPAASLRELQFPTVNGQPVKICVTGAFNSYLADQMLFFAANWVMEQCTKNDLELYGKWFNWYNSLVQPYCNFFESYWYILEQESEHPIWHNILEYYREIVAYHNIDIVTQHIPLLSKKLLDMAGCDSLKACQNRLHRSFKALGLLRLTLQQWQIETKCPDLSVLECTLLPALKSLRCLEGEVLKTIAKSWKRLKIYSLLLDYHRSIWKMMIASQLEGLPIVWNLLRKEILKLQQKFPVEVDVFLMECVNLNNINDTNFQYGKPTLWDYGGHPHLPSSSEIFDKMQELLSFTTDVWPRKNLLNIELDDRKQLTDAMLSANKDLRHLAMEGVSMACIATMKTEEDVLAVVPQLDEVHKRLVGKVNSVRDNLGLLSKTSVPEILVNSEYLLKYAMDYSLGSSSRSPLDYIQHQIIWWICHDWAKVDNAHLKVASCILEMWYNYHSSLWTYCSGSPKCLFSVTHDDSCDLAHLTKMDAINTIIQQDLHVVDYLKSGVMLKVASRNLWEGVSCLGNFVSSLHSAADSLFKQIIFVHKKHFEEENYNQLESLLFQQSRRLIEKEDLDTVCALLSSSSCRVLASLSESDKLVESLLMDLYSSYSRDSLLHTGAAWVRIGELRFRLLLSSYSPDPTFKSRYKHSHILEKITLVKLEEKVRHDCEELAGSNSPEDSHDNELLQLLEIKEKDTRAKVVFRPRQSKHKSLIAACLEFEDRLSECKDLLASLTCEGLGQLEVDRVCNWQIISMNFIKRLTEDYREYVDLIQPIQVAVYEMKLGLAIALSGSLQREYLKKIKEDDINRVLGAIYAFMQFPSGSFTERVVTDVTDDLTNYTITGQLGTLNSCSGDVDMLKKLAAMSSQLNVCKVAGKVKSLSEMLASVHHIFLVRTADCVSCSLVMDKSSYASLKDTFDHFTSMWINMKYRLKAKESDDSQYFKFKSRMISIDDIFKDVPLLSDMESEDSILDNEEKLEHEFFKITESIDDDNGVVEDNWDLIPESALKCIVTIHDQLFGSPDLFEKRRKCQVSDAQKVQSFIESYELGTRILKDLPELTCSMFDEKLMPEHLFRVCLEYQRSCAKTHQDCSGYNAYKDPNPPVLFKMVESLTTLQERVNSYLDEWPDHPGLLKILDLIASLLAMPLSTPISKVLLGLQLLAGKAQTLQENDSKFFVKDHLASIFLLVYSWQRLELDCWPILLEEVQTKYELNAAKLWFPLRALLTQTSGIPVDDDLSIIRSVEEFVQTSSLGEYKRRLHILFAFHGEISAGASLGSYSSNAVKKIQNILYSVFGYYMQFLSLVHGKIEEGKKNIEKELKDHVKLYSWEQAPYSSASIENFKRTRQKIFKLLQRFNDILKSPVIFLLNEEATSRKIPCWLDPQRPESHLPVDSEKFNKRFLWYHKWASETSLSLQTLQQSNGSTVGVPTAKDMVYDVKHWQNEIELNDRLQFFWISLERICGAANFGSTVKHGKKNQKKTALSNLFKTLEECGLSKHRPMSHEWGDELAAPSPLFLEQSYDSAHLLQQINSQKMLEDVSINHSTLLNTDNWKHANQQYFKCLAMMQQLRQVSLKFNKDLGLEEVNKAMSFMSHLLTVLSEQRHLAYNLFDQRNQFKHAIFLLGSGGKSKSLSSSQNVLLSSMWQQKKLFDAVITLITDSNLLLRSFKDCHYNSCNNFIEVEGISSLLGKFILNFSESKELLDECLLGSTNIFAGAYKSMPHSATEMEQLFTDNCQHIDSLLDGYLPGSNNIFPDAYKSIPLATTEMEQLFADNCQLIDSLREDMKVLCHRDLSVGSVKKVLISRLEELLEKGKMAMENRRHVEENHKLCLKLEASYIEILKETFMLVVGAVRKLTDHEVCSNGTEKSPVGNVASWKDTLQTCIMNLKLDDICVAGEKIRILVRLLVDYKPDIRTSIELHLMHLHAWLSVILSSAEGILSELLEAHITTSEMTLALGDLFIHLFTDGFGSTEDTAEDADELQQDAVGSGTGMGEGDGQKSVSSDIDDESQLGDSKDLTCKADPAPKNDDKAVEMQDGFNAQLSDVSEDLEGKDSGGEDEDTLDNQMGDTGDASEVVGKKSWDKDEDDDPKTSIEKYESGSSAKGTQQDDREMRAKDDGSIEEEDPMEMDSEEGKNNNLEHDPSTHDETELNTDEVMDKADAYDDRTGPELPEPENDSIDVDMVEQEQTDEINADNEDIGTEEAEQADQRLDASDDMEEGDMAQHSDGVVDNEGEHVEDANTDAGEMDSHQLDKADSLMPLSQGLQPDNMQINSNGESEANLANSSDMHGAVAPSVNFSGNEVPNMEISMPNTGNDSILSSNSKPDMQNDAQQHIKQTNPFRSIGDALEDWKERARVSADTQDHQPETGKDSSENTTEFRYVPEGEESTSQALGAATADQINYDNQINQSFLEDESCIRNLEHSDERTPDNPEVPYLQTSQALPNKSENANELDGREIQTDASVQNLVERTDHTFQDLVSFKQPPADDKIALIDLTTDRELPSQMDLDITDAETKRSNAVWKNLELATMKLSQELAEQLRLVMEPTLASKLQGDYRTGKRINMKKVIPYIASHFRRDKIWLRRTKPNKRNYQVVIAVDDSRSMSEGKCGKFAIEALVTVCRAMSQLEVGQFAVASFGKKGNVSVLHDFDQIFNSEAGVNVISSLSFEQDNKIEDEPVSDLLTHLNVMLDTAVARARTPSGQNPLQQLILIISDGKFHEKENLRRHVRDVLNRKRMVAYVLLDSPEDSIINLKEACFRVGEKVELKKYMDSFPFPYYVMLQNIEALPRTLADLLRQWFELMQSANE

SEQ ID NO: 185967 - protein, 1506 aa, Zea Mays
MQFLSLVHGKIEEGKKNIEKELKDHVKLYSWEQAPYSSASIENFKRTRQKIFKLLQRFNDILKSPVIFLLNEEATSRKIPCWLDPQRPESHLPVDSEKFNKRFLWYHKWASETSLSLQTLQQSNGSTVGVPTAKDMVYDVKHWQNEIELNDRLQFFWISLERICGAANFGSTVKHGKKNQKKTALSNLFKTLEECGLSKHRPMSHEWGDELAAPSPLFLEQSYDSAHLLQQINSQKMLEDVSINHSTLLNTDNWKHANQQYFKCLAMMQQLRQVSLKFNKDLGLEEVNKAMSFMSHLLTVLSEQRHLAYNLFDQRNQFKHAIFLLGSGGKSKSLSSSQNVLLSSMWQQKKLFDAVITLITDSNLLLRSFKDCHYNSCNNFIEVEGISSLLGKFILNFSESKELLDECLLGSTNIFAGAYKSMPHSATEMEQLFTDNCQHIDSLLDGYLPGSNNIFPDAYKSIPLATTEMEQLFADNCQLIDSLREDMKVLCHRDLSVGSVKKVLISRLEELLEKGKMAMENRRHVEENHKLCLKLEASYIEILKETFMLVVGAVRKLTDHEVCSNGTEKSPVGNVASWKDTLQTCIMNLKLDDICVAGEKIRILVRLLVDYKPDIRTSIELHLMHLHAWLSVILSSAEGILSELLEAHITTSEMTLALGDLFIHLFTDGFGSTEDTAEDADELQQDAVGSGTGMGEGDGQKSVSSDIDDESQLGDSKDLTCKADPAPKNDDKAVEMQDGFNAQLSDVSEDLEGKDSGGEDEDTLDNQMGDTGDASEVVGKKSWDKDEDDDPKTSIEKYESGSSAKGTQQDDREMRAKDDGSIEEEDPMEMDSEEGKNNNLEHDPSTHDETELNTDEVMDKADAYDDRTGPELPEPENDSIDVDMVEQEQTDEINADNEDIGTEEAEQADQRLDASDDMEEGDMAQHSDGVVDNEGEHVEDANTDAGEMDSHQLDKADSLMPLSQGLQPDNMQINSNGESEANLANSSDMHGAVAPSVNFSGNEVPNMEISMPNTGNDSILSSNSKPDMQNDAQQHIKQTNPFRSIGDALEDWKERARVSADTQDHQPETGKDSSENTTEFRYVPEGEESTSQALGAATADQINYDNQINQSFLEDESCIRNLEHSDERTPDNPEVPYLQTSQALPNKSENANELDGREIQTDASVQNLVERTDHTFQDLVSFKQPPADDKIALIDLTTDRELPSQMDLDITDAETKRSNAVWKNLELATMKLSQELAEQLRLVMEPTLASKLQGDYRTGKRINMKKVIPYIASHFRRDKIWLRRTKPNKRNYQVVIAVDDSRSMSEGKCGKFAIEALVTVCRAMSQLEVGQFAVASFGKKGNVSVLHDFDQIFNSEAGVNVISSLSFEQDNKIEDEPVSDLLTHLNVMLDTAVARARTPSGQNPLQQLILIISDGKFHEKENLRRHVRDVLNRKRMVAYVLLDSPEDSIINLKEACFRVGEKVELKKYMDSFPFPYYVMLQNIEALPRTLADLLRQWFELMQSANE

SEQ ID NO: 185968 - protein, 2190 aa, Zea Mays
MSAKPMRACPPWGCRSLEEVPHTGSWHRRPVAGNVARGDWFSGHMWMDLVHRSLYVWLIGGYLQRMYWLLDQFCNAICLCLKCDGELVVFRPRQSKHKSLIAACLEFEDRLSECKDLLASLTCEGLGQLEVDRVCNWQIISMNFIKRLTEDYREYVDLIQPIQVAVYEMKLGLAIALSGSLQREYLKKIKEDDINRVLGAIYAFMQFPSGSFTERVVTDVTDDLTNYTITGQLGTLNSCSGDVDMLKKLAAMSSQLNVCKVAGKVKSLSEMLASVHHIFLVRTADCVSCSLVMDKSSYASLKDTFDHFTSMWINMKYRLKAKESDDSQYFKFKSRMISIDDIFKDVPLLSDMESEDSILDNEEKLEHEFFKITESIDDDNGVVEDNWDLIPESALKCIVTIHDQLFGSPDLFEKRRKCQVSDAQKVQSFIESYELGTRILKDLPELTCSMFDEKLMPEHLFRVCLEYQRSCAKTHQDCSGYNAYKDPNPPVLFKMVESLTTLQERVNSYLDEWPDHPGLLKILDLIASLLAMPLSTPISKVLLGLQLLAGKAQTLQENDSKFFVKDHLASIFLLVYSWQRLELDCWPILLEEVQTKYELNAAKLWFPLRALLTQTSGIPVDDDLSIIRSVEEFVQTSSLGEYKRRLHILFAFHGEISAGASLGSYSSNAVKKIQNILYSVFGYYMQFLSLVHGKIEEGKKNIEKELKDHVKLYSWEQAPYSSASIENFKRTRQKIFKLLQRFNDILKSPVIFLLNEEATSRKIPCWLDPQRPESHLPVDSEKFNKRFLWYHKWASETSLSLQTLQQSNGSTVGVPTAKDMVYDVKHWQNEIELNDRLQFFWISLERICGAANFGSTVKHGKKNQKKTALSNLFKTLEECGLSKHRPMSHEWGDELAAPSPLFLEQSYDSAHLLQQINSQKMLEDVSINHSTLLNTDNWKHANQQYFKCLAMMQQLRQVSLKFNKDLGLEEVNKAMSFMSHLLTVLSEQRHLAYNLFDQRNQFKHAIFLLGSGGKSKSLSSSQNVLLSSMWQQKKLFDAVITLITDSNLLLRSFKDCHYNSCNNFIEVEGISSLLGKFILNFSESKELLDECLLGSTNIFAGAYKSMPHSATEMEQLFTDNCQHIDSLLDGYLPGSNNIFPDAYKSIPLATTEMEQLFADNCQLIDSLREDMKVLCHRDLSVGSVKKVLISRLEELLEKGKMAMENRRHVEENHKLCLKLEASYIEILKETFMLVVGAVRKLTDHEVCSNGTEKSPVGNVASWKDTLQTCIMNLKLDDICVAGEKIRILVRLLVDYKPDIRTSIELHLMHLHAWLSVILSSAEGILSELLEAHITTSEMTLALGDLFIHLFTDGFGSTEDTAEDADELQQDAVGSGTGMGEGDGQKSVSSDIDDESQLGDSKDLTCKADPAPKNDDKAVEMQDGFNAQLSDVSEDLEGKDSGGEDEDTLDNQMGDTGDASEVVGKKSWDKDEDDDPKTSIEKYESGSSAKGTQQDDREMRAKDDGSIEEEDPMEMDSEEGKNNNLEHDPSTHDETELNTDEVMDKADAYDDRTGPELPEPENDSIDVDMVEQEQTDEINADNEDIGTEEAEQADQRLDASDDMEEGDMAQHSDGVVDNEGEHVEDANTDAGEMDSHQLDKADSLMPLSQGLQPDNMQINSNGESEANLANSSDMHGAVAPSVNFSGNEVPNMEISMPNTGNDSILSSNSKPDMQNDAQQHIKQTNPFRSIGDALEDWKERARVSADTQDHQPETGKDSSENTTEFRYVPEGEESTSQALGAATADQINYDNQINQSFLEDESCIRNLEHSDERTPDNPEVPYLQTSQALPNKSENANELDGREIQTDASVQNLVERTDHTFQDLVSFKQPPADDKIALIDLTTDRELPSQMDLDITDAETKRSNAVWKNLELATMKLSQELAEQLRLVMEPTLASKLQGDYRTGKRINMKKVIPYIASHFRRDKIWLRRTKPNKRNYQVVIAVDDSRSMSEGKCGKFAIEALVTVCRAMSQLEVGQFAVASFGKKGNVSVLHDFDQIFNSEAGVNVISSLSFEQDNKIEDEPVSDLLTHLNVMLDTAVARARTPSGQNPLQQLILIISDGKFHEKENLRRHVRDVLNRKRMVAYVLLDSPEDSIINLKEACFRVGEKVELKKYMDSFPFPYYVMLQNIEALPRTLADLLRQWFELMQSANE

SEQ ID NO: 185969 - protein, 2193 aa, Zea Mays
MSAKPMRACPPWGCRSLEEVPHTGSWHRRPVAGNVARGDWFSGHMWMDLVHRSLYVWLIGGYLQRMYWLLDQFCNAICLCLKCDGELVVFRPRQSKHKSLIAACLEFEDRLSECKDLLASLTCEGLGQLEVDRVCNWQIISMNFIKRLTEDYREYVDLIQPIQVAVYEMKLGLAIALSGSLQREYLKKIKEDDINRVLGAIYAFMQFPSGSFTERVVTDVTDDLTNYTITGQLGTLNSCSGDVDMLKKLAAMSSQLNVCKVAGKVKSLSEMLASVHHIFLVRTADCVSCSLVMDKSSYASLKDTFDHFTSMWINMKYRLKAKESDDSQYFKFKSRMISIDDIFKDVPLLSDMESEDSILDNEEKLEHEFFKITESIDDDNGVVEDNWDLIPESALKCIVTIHDQLFGSPDLFEKRRKCQVSDAQKVQSFIESYELGTRILKDLPELTCSMFDEKLMPEHLFRVCLEYQRSCAKTHQDCSGYNAYKDPNPPVLFKMVESLTTLQERVNSYLDEWPDHPGLLKILDLIASLLAMPLSTPISKVLLGLQLLAGKAQTLQENDSKFFVKDHLASIFLLVYSWQRLELDCWPILLEEVQTKYELNAAKLWFPLRALLTQTSGIPVDDDLSIIRSVEEFVQTSSLGEYKRRLHILFAFHGEISAGASLGSYSSNAVKKIQNILYSVFGYYMQFLSLVHGKIEEGKKNIEKELKDHVKLYSWEQAPYSSASIENFKRTRQKIFKLLQRFNDILKSPVIFLLNEEATSRKIPCWLDPQRPESHLPVDSEKFNKRFLWYHKWASETSLSLQTLQQSNGSTVGVPTAKEYADMVYDVKHWQNEIELNDRLQFFWISLERICGAANFGSTVKHGKKNQKKTALSNLFKTLEECGLSKHRPMSHEWGDELAAPSPLFLEQSYDSAHLLQQINSQKMLEDVSINHSTLLNTDNWKHANQQYFKCLAMMQQLRQVSLKFNKDLGLEEVNKAMSFMSHLLTVLSEQRHLAYNLFDQRNQFKHAIFLLGSGGKSKSLSSSQNVLLSSMWQQKKLFDAVITLITDSNLLLRSFKDCHYNSCNNFIEVEGISSLLGKFILNFSESKELLDECLLGSTNIFAGAYKSMPHSATEMEQLFTDNCQHIDSLLDGYLPGSNNIFPDAYKSIPLATTEMEQLFADNCQLIDSLREDMKVLCHRDLSVGSVKKVLISRLEELLEKGKMAMENRRHVEENHKLCLKLEASYIEILKETFMLVVGAVRKLTDHEVCSNGTEKSPVGNVASWKDTLQTCIMNLKLDDICVAGEKIRILVRLLVDYKPDIRTSIELHLMHLHAWLSVILSSAEGILSELLEAHITTSEMTLALGDLFIHLFTDGFGSTEDTAEDADELQQDAVGSGTGMGEGDGQKSVSSDIDDESQLGDSKDLTCKADPAPKNDDKAVEMQDGFNAQLSDVSEDLEGKDSGGEDEDTLDNQMGDTGDASEVVGKKSWDKDEDDDPKTSIEKYESGSSAKGTQQDDREMRAKDDGSIEEEDPMEMDSEEGKNNNLEHDPSTHDETELNTDEVMDKADAYDDRTGPELPEPENDSIDVDMVEQEQTDEINADNEDIGTEEAEQADQRLDASDDMEEGDMAQHSDGVVDNEGEHVEDANTDAGEMDSHQLDKADSLMPLSQGLQPDNMQINSNGESEANLANSSDMHGAVAPSVNFSGNEVPNMEISMPNTGNDSILSSNSKPDMQNDAQQHIKQTNPFRSIGDALEDWKERARVSADTQDHQPETGKDSSENTTEFRYVPEGEESTSQALGAATADQINYDNQINQSFLEDESCIRNLEHSDERTPDNPEVPYLQTSQALPNKSENANELDGREIQTDASVQNLVERTDHTFQDLVSFKQPPADDKIALIDLTTDRELPSQMDLDITDAETKRSNAVWKNLELATMKLSQELAEQLRLVMEPTLASKLQGDYRTGKRINMKKVIPYIASHFRRDKIWLRRTKPNKRNYQVVIAVDDSRSMSEGKCGKFAIEALVTVCRAMSQLEVGQFAVASFGKKGNVSVLHDFDQIFNSEAGVNVISSLSFEQDNKIEDEPVSDLLTHLNVMLDTAVARARTPSGQNPLQQLILIISDGKFHEKENLRRHVRDVLNRKRMVAYVLLDSPEDSIINLKEACFRVGEKVELKKYMDSFPFPYYVMLQNIEALPRTLADLLRQWFELMQSANE

SEQ ID NO: 185970 - protein, 139 aa, Zea Mays
MHSIITRKKKKKNKQIDSTVTNYPIASRARASCSSSELAALEGLAELPASGDGAVAGDGAAVAGGDLERERLPVQVRVALPVLAPVPGHGLPPRAGAPDGDGAHVAGARHVGHQHQVEVGVPVDGEPDAALLHARHSAP

SEQ ID NO: 185971 - protein, 201 aa, Zea Mays
MGTCGLAAVVALLLASALLPGPDSASARSLLEGENPSSGEDAPAPAVSGQSSAAGQQTENKRHQESLPPVTSPPPPPPTQETNSQKAASPPPGPNVGTGQEDTGSQGRREETDKLKEAMEKCDASHKCSSGNEFSACLQVPDNALVGPYIIVHNEGQHDMDIDVKEPSSNTNNDKKPLHLVKGAFGQVCNLLSYNICFRCS

SEQ ID NO: 185972 - protein, 216 aa, Zea Mays
MGTCGLAAVVALLLASALLPGPDSASARSLLEGENPSSGEDAPAPAVSGQSSAAGQQTENKRHQESLPPVTSPPPPPPTQETNSQKAASPPPGPNVGTGQEDTGSQGRREETDKLKEAMEKCDASHKCSSGNEFSACLQVPDNALVGPYIIVHNEGQHDMDIDVKEPSSNTNNDKKPLHLVKGAFGQRLFHEEAKLQALRFSDGNRPSLFCLDSLS

SEQ ID NO: 185973 - protein, 209 aa, Zea Mays
MGTCGLAAVVALLLASALLPGPDSASARSLLEGENPSSGERRLFGSPQDAPAPAVSGQSSAAGQQTENKRHQESLPPVTSPPPPPPTQETNSQKAASPPPGPNVGTGQEDTGSQGRREETDKLKEAMEKCDASHKCSSGNEFSACLQVPDNALVGPYIIVHNEGQHDMDIDVKEPSSNTNNDKKPLHLVKGAFGQVCNLLSYNICFRCS

SEQ ID NO: 185974 - protein, 83 aa, Zea Mays
MEKCDASHKCSSGNEFSACLQVPDNALVGPYIIVHNEGQHDMDIDVKEPSSNTNNDKKPLHLVKGAFGQVCNLLSYNICFRCS

SEQ ID NO: 185975 - protein, 188 aa, Zea Mays
MGTCGLAAVVALLLASALLPGPDSASARSLLEGENPSSGEDAPAPAVSGQSSAAGQQTENKRHQESLPPVTSPPPPPPTQETNSQKAASPPPGPNVGTGQEDTGSQGRREETDKLKEAMEKCDASHKCSSGNEFSACLQVPDNALVGPYIIVHNEGQHDMDIDVKEPSSNTNNDKKPLHLVKGAFGQF

SEQ ID NO: 185976 - protein, 910 aa, Zea Mays
MISSPTSSSAAAAAAMPTPSRLLFPVLVLLAASAGAATAATVSDDVLALVVLKSGLFDPAGRLAPWSEDADRACAWPGVSCDSRTDRVAALDLPAASLAGRLPRAALLRLDALVSLALPGNRLSGTLPDALPPRLRSLDLSGNAISGGIPASLASCESLVSLNLSRNRLTGPVPDGIWSLPSLRSVDLSGNLLSGSVPGGFPRSSSLREVDLSRNLLQGEIPADIGEAGLLKSLDLGHNSFTGGLPESLRGLSGLSFLGAGGNDLSEELQPWIGEMAALERLDLSANRFTGTIPDAISGCKNLVEVDLSRNALTGELPWWVFGVPLQRVSVSGNALSGWVKVPRDAAATLEALDLSANAFTGVIPPEISTLARLQYLNLSSNSMSGQLPASIGLMLMLEVLDVSANKLDGVVPLEIGGAVALRQLLMGRNSLTGWIPVQIGTCKSLIALDLSHNKLAGSIPISMGNLTSLQTVDLSDNLLNGSLPMELSKLDSLRFFNVSHNSLSGSLPNSRFFDSIPYSFLSDNAGLCSSQKNSSCNGVMPKPIVFNPNSSSDPWMDVAPSSPSNRHQRKMILSISTLIAIVGGAVIVIGVVTITVLNLRAHATASRSALPTSLSDDYHSQSAESPENEAKSGKLVMFGRGSSDFSADGHALLNKDCELGRGGFGTVYKAVLRDGQPVAIKKLTVSSMVKSEHDFKQHVKLLGKVRHHNIVTLKGFYWTSSLQLLIYEFIPAGSLHQHLHECSYESSLSWVERFDIIVGVARALVHLHRYGIIHYNLKSSNVLLDTNGEPRVGDYGLVNLLPMLDRYVLSSKIQSVLGYMAPEFTCTTVKVTEKCDIYSFGVLVLEILSGRRPVEYLEDSVVVLSDLVSDALDDDRLEDCMDPRLSGMCIRFRSHFRQCPGTSHLFISC

SEQ ID NO: 185977 - protein, 1412 aa, Zea Mays
MYGNYDGLNRPPVFDLYIGVNLWKTVNLSSSDPAAPVIAEAIVVVPDDFVQVCLVNTGTGTPFISGLELRPLKNSIYPQVNATQGLVLQSRRNFGPTDMTDIIRYPDDQYDRLWTPMIIDAIDWLVLSTTEKVRNIYDDLFEVPSKVMQTAITPRDATSSINFYWNSKGSSLGYIPVFHFSEVLQAGAGVVRQFNININGKRFTSHDYYTPRHLESGYVYGTRPYTNQIRYNVSIVKTDTSTLPPIINADEIFIVISTTNVGTDSEDVSAMKAIKAKYQVKKNWMGDPCVAGTFRWDGLTCSYAISDPPKITALNMSFSGLTGDISSAFANLKAVQSLDLSHNNLTGSIPSSLSQLPSLTTLDLTGNQLSGPIPSSLLKRIQDGSLNLIYADNPDLCTNAGDSCQTAPQGKSKLVIYYVAVPMALIVVALAVLLCCLLRRRKTRGLADVSVKPRDKTPTSLASMAADEHRLSSLRLENRRFTYEDLEMITDSFKRVIGRGGFGYVYEGFLEDGTQVAVKMRSQSSNQGAKEFLTEAQILTRIHHKNLVSMVGYCKDGVYMALVYEYMSEGSLQEHIAGKRLTWGQRLRIALESAQGLEYLHRGCNPPLIHRDVKTSNILLNAKLEAKVADFGMSKALDRDTYASTNTLVGTPGYVDPEYLETMQPSTKSDVYSFGVVLLELVTGRPPILHSPQPTSVIQWARQHLARGDIEVVVDASMGGNHDVNSVWKAAEVALQCTEQASAQRPTMGDVVAQLLECLDLEKGRSANESFCDGDDSGSATASLSHSSAFVTGRIFGTVPMVETGPATRRALVCVSLSPLSPLPRARLPSAPPWDESAFLAMAASHLPPAATLVKKYPTLLHPFGAKPHAQRLIFRCRATSSEGADDGWASFVDELKRSLQVDPSDAVISNAGAGLTSNNDLVTALPLEPSAGPAAGDATTAAAGAVSELLGVDASGAVATPDRLLSSLLHLDASNPVASVAGGALSRLDALTSGLSDAQRWALFGFLAATWLYLTARPGVLSGAVDMYVLAPLQLALDSVLGRRSLKMSDFVVGERIGEGSFGVVYAGAVVPKNGAVVEERSGKAKTSLQNDDRYKEKVILKKIKVMTVGAKECGDYEEWFNYRVSRAAPESCADFLGSFVADKNKAEFVKGGKWLVWKFEGDRTLANYLSERGFPSNLERLMFGRVLQGLGPLEREALVVKQVMRQLITSLKRIHATGIVHRDIKPSNLVVTRRGQVKLIDFGAATDLRIGKNYVPDRALLDPDYCPPELYVLPEETPEPPPEPIAAILSPILWQLNSPDLFDMYSAGIVLMQMAIPTLRTQSGLKNFNAELRSAGYDLNRWRQSARRRPDLQILDLDSGRGWDLATKLISERGANGGGRLSAAAALRHPYFLLGGDQAAAVLSKFSLSK

SEQ ID NO: 185978 - protein, 1046 aa, Zea Mays
MKAIKAKYQVKKNWMGDPCVAGTFRWDGLTCSYAISDPPKITALNMSFSGLTGDISSAFANLKAVQSLDLSHNNLTGSIPSSLSQLPSLTTLDLTGNQLSGPIPSSLLKRIQDGSLNLIYADNPDLCTNAGDSCQTAPQGKSKLVIYYVAVPMALIVVALAVLLCCLLRRRKTRGLADVSVKPRDKTPTSLASMAADEHRLSSLRLENRRFTYEDLEMITDSFKRVIGRGGFGYVYEGFLEDGTQVAVKMRSQSSNQGAKEFLTEAQILTRIHHKNLVSMVGYCKDGVYMALVYEYMSEGSLQEHIAGKRLTWGQRLRIALESAQGLEYLHRGCNPPLIHRDVKTSNILLNAKLEAKVADFGMSKALDRDTYASTNTLVGTPGYVDPEYLETMQPSTKSDVYSFGVVLLELVTGRPPILHSPQPTSVIQWARQHLARGDIEVVVDASMGGNHDVNSVWKAAEVALQCTEQASAQRPTMGDVVAQLLECLDLEKGRSANESFCDGDDSGSATASLSHSSAFVTGRIFGTVPMVETGPATRRALVCVSLSPLSPLPRARLPSAPPWDESAFLAMAASHLPPAATLVKKYPTLLHPFGAKPHAQRLIFRCRATSSEGADDGWASFVDELKRSLQVDPSDAVISNAGAGLTSNNDLVTALPLEPSAGPAAGDATTAAAGAVSELLGVDASGAVATPDRLLSSLLHLDASNPVASVAGGALSRLDALTSGLSDAQRWALFGFLAATWLYLTARPGVLSGAVDMYVLAPLQLALDSVLGRRSLKMSDFVVGERIGEGSFGVVYAGAVVPKNGAVVEERSGKAKTSLQNDDRYKEKVILKKIKVMTVGAKECGDYEEWFNYRVSRAAPESCADFLGSFVADKNKAEFVKGGKWLVWKFEGDRTLANYLSERGFPSNLERLMFGRVLQGLGPLEREALVVKQVMRQLITSLKRIHATGIVHRDIKPSNLVVTRRGQVKLIDFGAATDLRIGKNYVPDRALLDPDYCPPELYVLPEETPEPPPEPIAAILSPILWQVVALLLAQSAWRCCSVTGH

SEQ ID NO: 185979 - protein, 750 aa, Zea Mays
MQPSTKSDVYSFGVVLLELVTGRPPILHSPQPTSVIQWARQHLARGDIEVVVDASMGGNHDVNSVWKAAEVALQCTEQASAQRPTMGDVVAQLLECLDLEKGRSANESFCDGDDSGSATASLSHSSAFVTGRIFGTVPMVETGPATRRALVCVSLSPLSPLPRARLPSAPPWDESAFLAMAASHLPPAATLVKKYPTLLHPFGAKPHAQRLIFRCRATSSEGADDGWASFVDELKRSLQVDPSDAVISNAGAGLTSNNDLVTALPLEPSAGPAAGDATTAAAGAVSELLGVDASGAVATPDRLLSSLLHLDASNPVASVAGGALSRLDALTSGLSDAQRWALFGFLAATWLYLTARPGVLSGAVDMYVLAPLQLALDSVLGRRSLKMSDFVVGERIGEGSFGVVYAGAVVPKNGAVVEERSGKAKTSLQNDDRYKEKVILKKIKVMTVGAKECGDYEEWFNYRVSRAAPESCADFLGSFVADKNKAEFVKGGKWLVWKFEGDRTLANYLSERGFPSNLERLMFGRVLQGLGPLEREALVVKQVMRQLITSLKRIHATGIVHRDIKPSNLVVTRRGQVKLIDFGAATDLRIGKNYVPDRALLDPDYCPPELYVLPEETPEPPPEPIAAILSPILWQLNSPDLFDMYSAGIVLMQMAIPTLRTQSGLKNFNAELRSAGYDLNRWRQSARRRPDLQILDLDSGRGWDLATKLISERGANGGGRLSAAAALRHPYFLLGGDQAAAVLSKFSLSK

SEQ ID NO: 185980 - protein, 1146 aa, Zea Mays
MVSAMKAIKAKYQVKKNWMGDPCVAGTFRWDGLTCSYAISDPPKITALNMSFSGLTGDISSAFANLKAVQSLDLSHNNLTGSIPSSLSQLPSLTTLDLTGNQLSGPIPSSLLKRIQDGSLNLIYADNPDLCTNAGDSCQTAPQGKSKLVIYYVAVPMALIVVALAVLLCCLLRRRKTRGLADVSVKPRDKTPTSLASMAADEHRLSSLRLENRRFTYEDLEMITDSFKRVIGRGGFGYVYEGFLEDGTQVAVKMRSQSSNQGAKEFLTEAQILTRIHHKNLVSMVGYCKDGVYMALVYEYMSEGSLQEHIAGKRLTWGQRLRIALESAQGLEYLHRGCNPPLIHRDVKTSNILLNAKLEAKVADFGMSKALDRDTYASTNTLVGTPGYVDPEYLETMQPSTKSDVYSFGVVLLELVTGRPPILHSPQPTSVIQWARQHLARGDIEVVVDASMGGNHDVNSVWKAAEVALQCTEQASAQRPTMGDVVAQLLECLDLEKGRSANESFCDGDDSGSATASLSHSSAFVTGRIFGTVPMVETGPATRRALVCVSLSPLSPLPRARLPSAPPWDESAFLAMAASHLPPAATLVKKYPTLLHPFGAKPHAQRLIFRCRATSSEGADDGWASFVDELKRSLQVDPSDAVISNAGAGLTSNNDLVTALPLEPSAGPAAGDATTAAAGAVSELLGVDASGAVATPDRLLSSLLHLDASNPVASVAGGALSRLDALTSGLSDAQRWALFGFLAATWLYLTARPGVLSGAVDMYVLAPLQLALDSVLGRRSLKMSDFVVGERIGEGSFGVVYAGAVVPKNGAVVEERSGKAKTSLQNDDRYKEKVILKKIKVMTVGAKECGDYEEWFNYRVSRAAPESCADFLGSFVADKNKAEFVKGGKWLVWKFEGDRTLANYLSERGFPSNLERLMFGRVLQGLGPLEREALVVKQVMRQLITSLKRIHATGIVHRDIKPSNLVVTRRGQVKLIDFGAATDLRIGKNYVPDRALLDPDYCPPELYVLPEETPEPPPEPIAAILSPILWQLNSPDLFDMYSAGIVLMQMAIPTLRTQSGLKNFNAELRSAGYDLNRWRQSARRRPDLQILDLDSGRGWDLATKLISERGANGGGRLSAAAALRHPYFLLGGDQAAAVLSKFSLSK

SEQ ID NO: 185981 - protein, 170 aa, Zea Mays
MRNRVAAKTRSTSAWSLKAGLWDSLRSGLLKNNSSTETVEPPPAPLEVEEPLPVEIVLLERTLPDGSTEQILFSSAGDVDVYDLQALCNKVGWPRRPLSKIAASLRNSYLVATLYSIIRSSETGQREKRRNSSLGWHEQPQTMPSMQRFGMSLLILHTRVRVLVKHSWRK

SEQ ID NO: 185982 - protein, 92 aa, Zea Mays
MPPAFAAAPSSSICGVRIPTVRRFEAQSTVSTPRFMRNRVAAGDVDVYDLQALCNKVGWPRRPLSKIAASLRNSYLVATLYSIIRSSETEVI

SEQ ID NO: 185983 - protein, 108 aa, Zea Mays
MLMYMISKPYAIRSYLTEGEEKKQLIGMARATSDHAFNATIWDVLVDPSYQGQGLGKALMEKVIRTLLQRDINNITLFADNKVIDFYKNLGFEVDPQGIKGMFWYPRF

SEQ ID NO: 185984 - protein, 180 aa, Zea Mays
MPPAFAAAPSSSICGVRIPTVRRFEAQSTVSTPRFMRNRVAAGDVDVYDLQALCNKVGWPRRPLSKIAASLRNSYLVATLYSIIRSSETEGEEKKQLIGMARATSDHAFNATIWDVLVDPSYQGQGLGKALMEKVIRTLLQRDINNITLFADNKVIDFYKNLGFEVDPQGIKGMFWYPRF

SEQ ID NO: 185985 - protein, 388 aa, Zea Mays
MAKFADVLCAVTLLVLLPCSDVALGQTTDPSEVNGLRAIKGRLVDPMQNLMNWNRGDPCRSNWTGVFCHKVNDDTFLHVTELQLFKRNLSGTLAPEVSLLSHLKTLDFMWNNLTGSIPKEIGNITTLKLILLNGNQLSGILPYEIGNLQSLNRLQVDQNQLSGPIPKSFSNLRSVKHLHMNNNSLSGAIPSELSTLPLLLHLLVDNNNLSGPLPPEFAEAPAMKIFQADNNNFSGSSIPTTYNNISTLLKLSLRNCSLQGDIPDLSSIPQLGYLDISWNQLTGSIPTNKLASNITTIDLSHNMLNGTIPQNFSGLPKLQILSLEDNYLNGSVPSTIWNGIELTGNRSLILDFQNNSLKTIPDTFDPPPNTTVIRTSSEESRNHRFSSL

SEQ ID NO: 185986 - protein, 177 aa, Zea Mays
MEWDAFRGVPQGAMGWQGPPQSPSSYIVKKILRLEVPTEAYPNFNFIGRLLGPRGNSLKRIEASTGCRVFIRGKGSIKDSGKEEQLKGRPGYEHLSEPLHILIEAELPANVIDARLAKAQEILEELLKPVDESQDYYKRQQLRELAMLNSPLREESPHPGGAPPSPFSNGGMKRVKQ

SEQ ID NO: 185987 - protein, 164 aa, Zea Mays
MGWQGPPQSPSSYIVKKILRLEVPTEAYPNFNFIGRLLGPRGNSLKRIEASTGCRVFIRGKGSIKDSGKEEQLKGRPGYEHLSEPLHILIEAELPANVIDARLAKAQEILEELLKPVDESQDYYKRQQLRELAMLNSPLREESPHPGGAPPSPFSNGGMKRVKQ

SEQ ID NO: 185988 - protein, 106 aa, Zea Mays
MTNVFSSVFHQVIGILKGNWSLRRRQRLPLHFTTHPSPALRFTLRLWYNLHSYVFLAKREIVVREGPIFHSKYPFLAIHAKGGENMSPKQKDRTTTLILKLMIFNL

SEQ ID NO: 185989 - protein, 259 aa, Zea Mays
MLCQCNCFFITSSFLNFPNHSRYVRRGQPDAGFPLFESESLKWPGFVEFDDVNGRVLTYSAQDSTYKVFDLKNYTLLYLVSDKNVQEIKISPGIMLLIYARTSSSVPLKILSIDDGTVLKSFSHLLHRNKKVDFIEQFNEKLLVKQEGENLQILDVRNFQLTEVSRTEFMTPSAFIFLHELQLFLTFRNRAVSVWNFRGELVTSFEDHLLWHPDCNTNNIYITSDQDLIISYCKADSTDSTSEENGLLVIFFWFFFTAS

SEQ ID NO: 185990 - protein, 431 aa, Zea Mays
MEPRRISASPRPCSGRRVVARKRPRQEAVVSSVRKLQRREISSRRDRTFTMSAAQERFRNIQLQEEFDTHDPKENASLLPYLRKRSKIIEIVAARDIVFALSQSGVCAAFSRETNRRICFLNGSPDEVIRSLFYNKNNDSLITVSVYGSENFSALRCRTTRIEYVRRGQPDAGFPLFESESLKWPGFVEFDDVNGRVLTYSAQDSPGIMLLIYARTSSSVPLKILSIDDGTVLKSFSHLLHRNKKVDFIEQFNEKLLVKQEGENLQILDVRNFQLTEVSRTEFMTPSAFIFLHELQLFLTFRNRAVSVWNFRGELVTSFEDHLLWHPDCNTNNIYITSDQDLIISYCKADSTDSTSEENAGSINISSILSGKCLAKINTGNSNACKERKKAWKFRNTVSEALEDITALYYDEDRDEIYTGNRHGLVHVWSS

SEQ ID NO: 185991 - protein, 52 aa, Zea Mays
MPSHLVKLALPLLPSLFWLGNTLRVFRASTTFVGSGIYGVKESENRGHLPSQ

SEQ ID NO: 185992 - protein, 308 aa, Zea Mays
MSGPLNSNISGGPSNLRDSTGRPFTSSFSGQSGSLPGFHHSGVQQPSGGISSGRFPPNNLQASLSQIPHGHSGISNRGGMNVGGNPGFGSSMNAIGGSIQGLSSNLANVGNRNSAPGLAASPVLGNLGPRIASSGNILGGSNIGRSISSGGLSMPGIASRMNLSGNSGSGAINIQGSNRIGMLQQASPQFMNLLGSSYPTPGGSLSQNQVQSGSGSLGSSGMLYEGSSGDNAPFDINDFPQLTGRPNSAGGGQGQYGSLRKHGVSVNAIVQQNQEFSIQNEDFPALPGNKVPQIILWIFITRTTFKRI

SEQ ID NO: 185993 - protein, 598 aa, Zea Mays
MSGPLNSNISGGPSNLRDSTGRPFTSSFSGQSGSLPGFHHSGIPSAGVQQPSGGISSGRFPPNNLQASLSQIPHGHSGISNRGGMNVGGNPGFGSSMNAIGGSIQGLSSNLANVGNRNSAPGLAASPVLGNLGPRIASSGNILGGSNIGRSISSGGLSMPGIASRMNLSGNSGSGAINIQGSNRIGMLQQASPQFMNLLGSSYPTPGGSLSQNQVQSGSGSLGSSGMLYEGSSGDNAPFDINDFPQLTGRPNSAGGGQGQYGSLRKHGVSVNAIVQQNQEFSIQNEDFPALPGNKGSSSDYPMDIHHKDHLQENINIMQAQHYPMARPSGFSLGSSYPPRQHQQSANSVQNAGLETIGLRPANSPSLSTNSGVYEQFMQKYHQPQTQNSLRLQAASGPQQYKDQSQKSVQGTQAVPDPYSLLGLLSLIRMKEPGPTTLALGIDLTSLGLNLNSQDNLYKTFGSPWSSEPAVGEPDYQIPACFSAEPPPALQPFHFQKFHPLTLFYIFYSMPKDAAQLYAANELYNKGWFYHKDYRVWLTRAPNSAPLVKTPLHERGSYICFDPSIWDTVHKDNFVLHYEAVEKRPVLPSAGQNIRREL

SEQ ID NO: 185994 - protein, 313 aa, Zea Mays
MSGPLNSNISGGPSNLRDSTGRPFTSSFSGQSGSLPGFHHSGIPSAGVQQPSGGISSGRFPPNNLQASLSQIPHGHSGISNRGGMNVGGNPGFGSSMNAIGGSIQGLSSNLANVGNRNSAPGLAASPVLGNLGPRIASSGNILGGSNIGRSISSGGLSMPGIASRMNLSGNSGSGAINIQGSNRIGMLQQASPQFMNLLGSSYPTPGGSLSQNQVQSGSGSLGSSGMLYEGSSGDNAPFDINDFPQLTGRPNSAGGGQGQYGSLRKHGVSVNAIVQQNQEFSIQNEDFPALPGNKVPQIILWIFITRTTFKRI

SEQ ID NO: 185995 - protein, 695 aa, Zea Mays
MTISRSISEPSQPAPAPNARTVRNPSGATDTLAYILGRQLATIASRSAAPPPGRWITFDVLLVCSFPGIIKMSGPLNSNISGGPSNLRDSTGRPFTSSFSGQSGSLPGFHHSGSHNIHGNLNLANISGSLAPRNNSMAGIPSAGVQQPSGGISSGRFPPNNLQASLSQIPHGHSGISNRGGMNVGGNPGFGSSMNAIGGSIQGLSSNLANVGNRNSAPGLAASPVLGNLGPRIASSGNILGGSNIGRSISSGGLSMPGIASRMNLSGNSGSGAINIQGSNRIGMLQQASPQFMNLLGSSYPTPGGSLSQNQVQSGSGSLGSSGMLYEGSSGDNAPFDINDFPQLTGRPNSAGGGQGQYGSLRKHGVSVNAIVQQNQEFSIQNEDFPALPGNKGSSSDYPMDIHHKDHLQENINIMQAQHYPMARPSGFSLGSSYPPRQHQQSANSVQNAGLETIGLRPANSPSLSTNSGVYEQFMQKYHQPQTQNSLRLQAASGPQQYKDQSQKSVQGTQAVPDPYSLLGLLSLIRMKEPGPTTLALGIDLTSLGLNLNSQDNLYKTFGSPWSSEPAVGEPDYQIPACFSAEPPPALQPFHFQKFHPLTLFYIFYSMPKDAAQLYAANELYNKGWFYHKDYRVWLTRAPNSAPLVKTPLHERGSYICFDPSIWDTVHKDNFVLHYEAVEKRPVLPSAGQNIRREL

SEQ ID NO: 185996 - protein, 414 aa, Zea Mays
MSGPLNSNISGGPSNLRDSTGRPFTSSFSGQSGSLPGFHHSGSHNIHGNLNLANISGSLAPRNNSMAGIPSAGVQQPSGGISSGRFPPNNLQASLSQIPHGHSGISNRGGMNVGGNPGFGSSMNAIGGSIQGLSSNLANVGNRNSAPGLAASPVLGNLGPRIASSGNILGGSNIGRSISSGGLSMPGIASRMNLSGNSGSSSDYPMDIHHKDHLQENINIMQAQHYPMARPSGFSLGSSYPPRQHQQSANSVQNAGLETIGLRPANSPSLSTNSGVYEQFMQKYHQPQTQNSLRLQAASGPQQYKDQSQKSVQGTQAVPDPYSLLGLLSLIRMKEPGPTTLALGIDLTSLGLNLNSQDNLYKTFGSPWSSEPAVGEPDYQIPACFSAEPPPALQKFHPLTLFYIFYRCRSVICC

SEQ ID NO: 185997 - protein, 620 aa, Zea Mays
MSGPLNSNISGGPSNLRDSTGRPFTSSFSGQSGSLPGFHHSGSHNIHGNLNLANISGSLAPRNNSMAGIPSAGVQQPSGGISSGRFPPNNLQASLSQIPHGHSGISNRGGMNVGGNPGFGSSMNAIGGSIQGLSSNLANVGNRNSAPGLAASPVLGNLGPRIASSGNILGGSNIGRSISSGGLSMPGIASRMNLSGNSGSGAINIQGSNRIGMLQQASPQFMNLLGSSYPTPGGSLSQNQVQSGSGSLGSSGMLYEGSSGDNAPFDINDFPQLTGRPNSAGGGQGQYGSLRKHGVSVNAIVQQNQEFSIQNEDFPALPGNKDYPMDIHHKDHLQENINIMQAQHYPMARPSGFSLGSSYPPRQHQQSANSVQNAGLETIGLRPANSPSLSTNSGVYEQFMQKYHQPQTQNSLRLQAASGPQQYKDQSQKSVQGTQAVPDPYSLLGLLSLIRMKEPGPTTLALGIDLTSLGLNLNSQDNLYKTFGSPWSSEPAVGEPDYQIPACFSAEPPPALQPFHFQKFHPLTLFYIFYSMPKDAAQLYAANELYNKGWFYHKDYRVWLTRAPNSAPLVKTPLHERGSYICFDPSIWDTVHKDNFVLHYEAVEKRPVLPSAGQNIRREL

SEQ ID NO: 185998 - protein, 317 aa, Zea Mays
MSGPLNSNISGGPSNLRDSTGRPFTSSFSGQSGSLPGFHHSGSHNIHGNLNLANISGSLAPRNNSMAGIPSAGVQQPSGGISSGRFPPNNLQASLSQIPHGHSGISNRGGMNVGGNPGFGSSMNAIGGSIQGLSSNLANVGNRNSAPGLAASPVLGNLGPRIASSGNILGGSNIGRSISSGGLSMPGIASRMNLSGNSGSGAINIQGSNRIGMLQQASPQFMNLLGSSYPTPGGSLSQNQVQSGSGSLGSSGMLYEGSSGDNAPFVLIQASGILFIRTTLFSITKQWRRDLSFLLLAKILGENYKVLLHLKLIWFDQ

SEQ ID NO: 185999 - protein, 578 aa, Zea Mays
MSGPLNSNISGGPSNLRDSTGRPFTSSFSGQSGSLPGFHHSGSHNIHGNLNLANISGSLAPRNNSMAGIPSAGVQQPSGGISSGRFPPNNLQASLSQIPHGHSGISNRGASPVLGNLGPRIASSGNILGGSNIGRSISSGGLSMPGIASRMNLSGNSGSGAINIQGSNRIGMLQQASPQFMNLLGSSYPTPGGSLSQNQVQSGSGSLGSSGMLYEGSSGDNAPFDINDFPQLTGRPNSAGGGQGQYGSLRKHGVSVNAIVQQNQEFSIQNEDFPALPGNKGSSSDYPMDIHHKDHLQENINIMQAQHYPMARPSGFSLGSSYPPRQHQQSANSVQNAGLETIGLRPANSPSLSTNSGVYEQFMQKYHQPQTQNSLRLQAASGPQQYKDQSQKSVQGTQAVPDPYSLLGLLSLIRMKEPGPTTLALGIDLTSLGLNLNSQDNLYKTFGSPWSSEPAVGEPDYQIPACFSAEPPPALQKFHPLTLFYIFYSMPKDAAQLYAANELYNKGWFYHKDYRVWLTRAPNSAPLVKTPLHERGSYICFDPSIWDTVHKDNFVLHYEAVEKRPVLPSAGQNIRREL

SEQ ID NO: 186000 - protein, 286 aa, Zea Mays
MSGPLNSNISGGPSNLRDSTGRPFTSSFSGQSGSLPGFHHSGVQQPSGGISSGRFPPNNLQASLSQIPHGHSGISNRGGMNVGGNPGFGSSMNAIGGSIQGLSSNLANVGNRNSAPGLAASPVLGNLGPRIASSGNILGGSNIGRSISSGGLSMPGIASRMNLSGNSGSGAINIQGSNRIGMLQQASPQFMNLLGSSYPTPGGSLSQNQVQSGSGSLGSSGMLYEGSSGDNAPFVLIQASGILFIRTTLFSITKQWRRDLSFLLLAKILGENYKVLLHLKLIWFDQ

SEQ ID NO: 186001 - protein, 291 aa, Zea Mays
MDIHHKDHLQENINIMQAQHYPMARPSGFSLGSSYPPRQHQQSANSVQNAGLETIGLRPANSPSLSTNSGVYEQFMQKYHQPQTQNSLRLQAASGPQQYKDQSQKSVQGTQAVPDPYSLLGLLSLIRMKEPGPTTLALGIDLTSLGLNLNSQDNLYKTFGSPWSSEPAVGEPDYQIPACFSAEPPPALQKFHPLTLFYIFYSMPKDAAQLYAANELYNKGWFYHKDYRVWLTRAPNSAPLVKTPLHERGSYICFDPSIWDTVHKDNFVLHYEAVEKRPVLPSAGQNIRREL

SEQ ID NO: 186002 - protein, 298 aa, Zea Mays
MSGPLNSNISGGPSNLRDSTGRPFTSSFSGQSGSLPGFHHSGSHNIHGNLNLANISGSLAPRNNSMAGIPSAGVQQPSGGISSGRFPPNNLQASLSQIPHGHSGISNRGASPVLGNLGPRIASSGNILGGSNIGRSISSGGLSMPGIASRMNLSGNSGSGAINIQGSNRIGMLQQASPQFMNLLGSSYPTPGGSLSQNQVQSGSGSLGSSGMLYEGSSGDNAPFDINDFPQLTGRPNSAGGGQGQYGSLRKHGVSVNAIVQQNQEFSIQNEDFPALPGNKVPQIILWIFITRTTFKRI

SEQ ID NO: 186003 - protein, 134 aa, Zea Mays
MRRQRLAVALARNRSGGDEARVCAGPWREEKVKTGPSLLPVQAQTNGNSDTYQIPIRNPTETNGPLIEVLFTRPARIEAGCQYAVAVPAGPPLHRPRIAPVVSPSEPAGSQPGSSVEALSSSIRHCGPVADRPS

SEQ ID NO: 186004 - protein, 164 aa, Zea Mays
MYPQGRMSHHFREMKVGDYMSVKGPKGRFKYLPGQVRALGMVAGGSGITPMFQVTRAILENPKDNTKVHLIYANVTYEDILLKEELDGMAKNYPDRFKIYYVLNQPPEVWDGGVGFVSKEMIQTHCPAPAADIQVLRCGPPPMNKAMAAHLDDLGYTKEMQFQF

SEQ ID NO: 186005 - protein, 107 aa, Zea Mays
MYPQGRMSHHFREMKVGDYMSVKGPKEELDGMAKNYPDRFKIYYVLNQPPEVWDGGVGFVSKEMIQTHCPAPAADIQVLRCGPPPMNKAMAAHLDDLGYTKEMQFQF

SEQ ID NO: 186006 - protein, 141 aa, Zea Mays
MSVKGPKYLPGQVRALGMVAGGSGITPMFQVTRAILENPKDNTKVHLIYANVTYEDILLKEELDGMAKNYPDRFKIYYVLNQPPEVWDGGVGFVSKEMIQTHCPAPAADIQVLRCGPPPMNKAMAAHLDDLGYTKEMQFQF

SEQ ID NO: 186007 - protein, 88 aa, Zea Mays
MSVKGPKEELDGMAKNYPDRFKIYYVLNQPPEVWDGGVGFVSKEMIQTHCPAPAADIQVLRCGPPPMNKAMAAHLDDLGYTKEMQFQF

SEQ ID NO: 186008 - protein, 76 aa, Zea Mays
MAKNYPDRFKIYYVLNQPPEVWDGGVGFVSKEMIQTHCPAPAADIQVLRCGPPPMNKAMAAHLDDLGYTKEMQFQF

SEQ ID NO: 186009 - protein, 471 aa, Zea Mays
MAFSHDGKMKGCQTNLFRTKDKKVVKMTDSASCSTAKYGSSNSKSPSSSPFRKLSEVRSIRLNHFLSHSSNATKYEHVRIFVSTWNVGGKAPTAELKLDDFLPVDDHSDIYVLGFQEIVPLNAGNVLVIEDNEPAARWLALINRALNQPVDTVDDIFQHKPYPSLDSTSSRSTPCLDGSFSNRSRTASGSIIFQKSLKSIKKSYMPSQRKQLKFCNCPVEMAKKSYKDACFWCPQAYANDMDSSEEDELDDNLNDIFGLNDDGVTSSVSASRDQLKYNLISCKQMVGIFVTVWAKKELMQHIGHLRTSCVGRGIMGYLGNKGCISVSMTLYQTSFCFICSHLASGEKEGDELRRNLDVLEILRLTQFRRICRRAGRRIPEKILDHERVIWLGDLNYRISLSYEDTKKLLTENNWDALFEKDQLNIQRASGSVFKGWSEEKIYFAPTYKYSCNSDSYAGETATSKKKRRTPA

SEQ ID NO: 186010 - protein, 69 aa, Zea Mays
MLMFKKSTGGQYLIQFRESTCLKRYMIMTCFRRNVGLGDLNYRINLPYEKTHELISKQDWNELFGKDQM

SEQ ID NO: 186011 - protein, 57 aa, Zea Mays
MYKVIRNHPSVFEIYQRKLLEPGKISKKYIDKLNKKVSTVLNEYFENSKDYVPNKRD

SEQ ID NO: 186012 - protein, 104 aa, Zea Mays
MPKTIYDHDLACFRRNVGLGDLNYRINLPYEKTHELISKQDWNELFGKDQVIRNHPSVFEIYQRKLLEPGKISKKYIDKLNKKVSTVLNEYFENSKDYVPNKRD

SEQ ID NO: 186013 - protein, 97 aa, Zea Mays
MIMTCFRRNVGLGDLNYRINLPYEKTHELISKQDWNELFGKDQVIRNHPSVFEIYQRKLLEPGKISKKYIDKLNKKVSTVLNEYFENSKDYVPNKRD

SEQ ID NO: 186014 - protein, 91 aa, Zea Mays
MKSGKYTLGYKTVLKTLRNSKGKLIIIANNCPPLRKSEIEYYAMLAKVSVHHFHGNNVDLGTACGKYYRVCCLSIIDPGDSDIISTTPGTQ

SEQ ID NO: 186015 - protein, 267 aa, Zea Mays
MHMVMLLKQEKLALVEQRSRDHCKNMEEGSTKVNNIVSDEQCCNSCEEVREAYKKKGWALTNPDLIDQCAREDFVERVKTQQDEGCNVHGFLDVSKVAGNFHFAPGKGFYESNIDVPELSLLEGGFNITHKINKLSFGTEFPGVVNPLDGAQWTQPASDGTYQYFIKVVPTIYTDIRGHNIHSNQFSVTEHFRDGNVRPKPQPGVFFFYDFSPIKVIFTEESRSLLHYLTNLCAIVGGVFTVSGIIDSFIYHGQKALKKKMELGKYR

SEQ ID NO: 186016 - protein, 132 aa, Zea Mays
MDAFLQRLKRLDAYPKVNEDFYKRTLSGGIVTLVAAVVMLLLFISETRSYFYSATETKLVVDTSRGERLRVNFDITFLSIPCTLLSVDTMDISGEQHQDIRHDIEKIRLDAHGNVIEARKVSIGGAKKKYLY

SEQ ID NO: 186017 - protein, 285 aa, Zea Mays
MDAFLQRLKRLDAYPKVNEDFYKRTLSGGIVTLVAAVVMLLLFISETRSYFYSATETKLVVDTSRGERLRVNFDITFLSIPCTLLSVDTMDISGEQHQDIRHDIEKIRLDAHGNVIEARKVSIGGAKIERPLQKHGGRLDKGEQYCGTCYGAEESDEQCCNSCEEVREAYKKKGWALTNPDLIDQVVPTIYTDIRGHNIHSNQFSVTEHFRDGNVRPKPQPGVFFFYDFSPIKVIFTEESRSLLHYLTNLCAIVGGVFTVSGIIDSFIYHGQKALKKKMELGKYR

SEQ ID NO: 186018 - protein, 368 aa, Zea Mays
MNSGTDRQEIKERPKTSSLIDDSSVFGREKDKETIVKMLLAPNNNSGHANLSIIPIVGMGGLGKTTLTQLIYNDERVKEHFQLRVWLCVSENFDEMKLTKETIESVASGFSSATTNMNLLQEDLSKKLQGKRFLLVLDDVWNEDPEKWDRYRCALLSGGKGSRIIITTRNKNVGILMGGMTPYHLKQLSNDDCWQLFKKHAFVDGDSSSHPELEIIGKDIVKKLKGLPLAAKAVSSLLCTRDAEEDWKNILKSEIWELPSDKNNILPALRLSYSHLPATLKRCFAFCSVFPKDYVFEKTRLVQIWMALGFIQPQGRRKMEEIGSGYFDELQSRSFFQHHKSGYVMHDAMHDLAQSVSINECLRLDEGL

SEQ ID NO: 186019 - protein, 50 aa, Zea Mays
MVSSHAAASYAKLKTVYQKYAKKQFRRVLCRLHPLAALPDLVYNFLLAHR

SEQ ID NO: 186020 - protein, 341 aa, Zea Mays
MVVRKHLSMVAFNNITRLAFGKRFMNANGDVDEQGREFKTIVNNGIKIGASLSVAEFIWYLRWLCPLNEELYKTHNERRDRLTMKIIDEHAKSLKESGAKQHFVDALFTLKQQYDLSEDTVIGLLWDMITAGMDTTVISVEWAMAELVRNPRVQKKLQEELDRVVGRDRVMLETDFQNLPYLQAVVKESLRLHPPTPLMLPHKASSNVKIGGYNIPKGANVMVNVWAVARDPKVWSNPLEYRPERFLEENIDIKGSDFRVLPFGAGRRVCPGAQLGINLVASMIGHLLHHFEWSLPEGTRPEDVNMMESPGLVTFMGTPLQAVVKPRLEKEELYNRVPVEM

SEQ ID NO: 186021 - protein, 265 aa, Zea Mays
MQTDEDVGKIAQAVPVLVSKALELFLQDLCDRTYDITIRKGVKTVGSSHLKQCIQTYNVYDFLREVVSKVPDIGPSDVIADDKLGKRRKAEEDGSEEELKRTRNETESHTSNGRGRGRGRGRGRRSVRGPWREVVTSPEQFKEENQSSKVADEVSNVTEAKQDTTPMSNARPSLRNIDLNLDPTDEEDEVTVPPEPQLSAPATSCAAATAAPGPSVPRLREGAKLKDFFGAWELADMNKMEMDPVQFALSTNHRLEEDEDYDNED

SEQ ID NO: 186022 - protein, 99 aa, Zea Mays
MSNARPSLRNIDLNLDPTDEEDEVTVPPEPQLSAPATSCAAATAAPGPSVPRLREGAKLKDFFGAWELADMNKMEMDPVQFALSTNHRLEEDEDYDNED

SEQ ID NO: 186023 - protein, 1529 aa, Zea Mays
MGRTVLSDEEEDEFEADEEDPRPSRRNRDDMDERDDDDDDDEDGQDEFEKDDFIVDDEEEEVEGEEEEQKSDDERRRKKKKKKRESDDFMLDEDDYMLLQDNNITGISRPKPGNKFKRLKKAGRESEMDEHSGFSDGDGTGKKRSGKERVEYSLFGDHQDAAPFEEDFEDDQQAGEGEEEVGDDEDEMADFIVEEDEIDGNGQVVRRKKFKKKVPRQAAGVSSSALQEAQDIFGDVDELLALRKQELEREALNSGELRGARLEDEFEPFILAEKYMTSKDEQIKENDVPERMQLSEELTGYPPTDKTTIEEESSWIHSHLTGDGFLSFFGNEHINKDIDQKDIVNVVTMLHANKFEIPFIAMYRKESCPTLLSFDSDEDNEDIESDARKLRWHKLLWAVQALDRKWLLLQKRKVALQLYYEKRFDDEKRRIDDVTRQELNSQLYNSIIEALKDAKSEKEVEDVDAKFNLHFPPGEVEEEGQFKRPKRKSLYSICHKAGLWEVANQFGRSAEQLGHHLTLTKIPEAGELESGRHSPEEVAANFTCAMFETSQDVLRGARHMAAVEIGCEPIVRKHVRGIFMNKAVVSTSPTSEGNTIIDPYHQLSGVKWLREKPLSKFVDAQWLLIQKAEEEKLLKVTVKLPEDAKKKLMSEARENYLSDCVSKSAQLWDEQRKMILDDAFFNFLLPSMEKEARSLLMTKAKHWLHMEYGKQLWNKVTVAPWKKKDADKKDADIDLDDESELRVMACCWGPGKPATTFVMLDSSGELVDVLYAGSISNRSQGVAEQQRKKNDQQRVLKFMTDHQPHVVCVGASNYNCRQLKDDLYEVIFKIVEDHPRDVNAQMENFSIVYGDESVPRLYENSRISSDQLPGQSGIVKRAVALGRYLQNPLAMIATLCGPGKEILSWKLHALEQFLTPDEKYEIVEQVMVDATNQIGFDVNLAASHEWHFSTLQFIAGLGPRKASALQKDLVREGSIFSRKELVKPLGRKVFMNASGFLRVRRSGAAAASAQLIDLLEDTRIHPESYVLAKNLAKDVYVEDAQHEINEMDDEEQEMAIEHVRERPSMLRSLKIVEYIKSITEEYRKLETLRDIKFELLCGFSDWRIPYTEPSPDEEFWLLSGETDDTISEGRIVQVTVRNIQDNKIICTFDSGLKAIVMADNYSDEGFDPESSQLREGDVLTGKIRNVNKNRFMVYLTCKASEMRRRPFSRGEQDPYYHEQDMTSQTVEDKARKQKELAKKHFKPRMIVHPHFQNLTAEEAMQFLSDKEHGEKLIRPSSRGPSFLTLTLKIFDGVYAHKEIAESGKDHKDITSLLRLGKTLTIDNETFEDLDEVIDRYVDPLVGHLKSMLSYRKFRKGLKNEVDEMLRAEKAENPMRIVYSFGISHEHPGTFILSYIRSTNPHHEYIGLYPKGFRFRKRDFDNIDRLVSYFQKNIDKPPPDAGPSMRNVAAMVPMKNSAWGSGGGGDANGGWRGDGSNDRDRPFSGRSGGRFDSRNSSGGRPSTGWWNRLGVRRWRRRWWRRLVTGLCPAL

SEQ ID NO: 186024 - protein, 1279 aa, Zea Mays
MGRTVLSDEEEDEFEADEEDPRPSRRNRDDMDERDDDDDDDEDGQDEFEKDDFIVDDEEEEVEGEEEEQKSDDERRRKKKKKKRESDDFMLDEDDYMLLQDNNITGISRPKPGNKFKRLKKAGRESEMDEHSGFSDGDGTGKKRSGKERVEYSLFGDHQDAAPFEEDFEDDQQAGEGEEEVGDDEDEMADFIVEEDEIDGNGQVVRRKKFKKKVPRQAAGVSSSALQEAQDIFGDVDELLALRKQELEREALNSGELRGARLEDEFEPFILAEKYMTSKDEQIKENDVPERMQLSEELTGYPPTDKTTIEEESSWIHSHLTGDGFLSFFGNEHINKDIDQKDIVNVVTMLHANKFEIPFIAMYRKESCPTLLSFDSDEDNEDIESDARKLRWHKLLWAVQALDRKWLLLQKRKVALQLYYEKRFDDEKRRIDDVTRQELNSQLYNSIIEALKDAKSEKEVEDVDAKFNLHFPPGEVEEEGQFKRPKRKSLYSICHKAGLWEVANQFGRSAEQLGHHLTLTKIPEAGELESGRHSPEEVAANFTCAMFETSQDVLRGARHMAAVEIGCEPIVRKHVRGIFMNKAVVSTSPTSEGNTIIDPYHQLSGVKWLREKPLSKFVDAQWLLIQKAEEEKLLKVTVKLPEDAKKKLMSEARENYLSDCVSKSAQLWDEQRKMILDDAFFNFLLPSMEKEARSLLMTKAKHWLHMEYGKQLWNKVTVAPWKKKDADKKDADIDLDDESELRVMACCWGPGKPATTFVMLDSSGELVDVLYAGSISNRSQGVAEQQRKKNDQQRVLKFMTDHQPHVVCVGASNYNCRQLKDDLYEVIFKIVEDHPRDVNAQMENFSIVYGDESVPRLYENSRISSDQLPGQSGIVKRAVALGRYLQNPLAMIATLCGPGKEILSWKLHALEQFLTPDEKYEIVEQVMVDATNQIGFDVNLAASHEWHFSTLQFIAGLGPRKASALQKDLVREGSIFSRKELVKPLGRKVFMNASGFLRVRRSGAAAASAQLIDLLEDTRIHPESYVLAKNLAKDVYVEDAQHEINEMDDEEQEMAIEHVRERPSMLRSLKIVEYIKSITEEYRKLETLRDIKFELLCGFSDWRIPYTEPSPDEEFWLLSGETDDTISEGRIVQVTVRNIQDNKIICTFDSGLKAIVMADNYSDEGFDPESSQLREGDVLTGKIRNVNKNRFMVYLTCKASEMRRRPFSRGEQDPYYHEQDMTSQTVEDKARKQKELAKKHFKPRMIVHPHFQNLTAEEAMQVCCLVKLSLCALHLLLWR

SEQ ID NO: 186025 - protein, 953 aa, Zea Mays
MNKAVVSTSPTSEGNTIIDPYHQLSGVKWLREKPLSKFVDAQWLLIQKAEEEKLLKVTVKLPEDAKKKLMSEARENYLSDCVSKSAQLWDEQRKMILDDAFFNFLLPSMEKEARSLLMTKAKHWLHMEYGKQLWNKVTVAPWKKKDADKKDADIDLDDESELRVMACCWGPGKPATTFVMLDSSGELVDVLYAGSISNRSQGVAEQQRKKNDQQRVLKFMTDHQPHVVCVGASNYNCRQLKDDLYEVIFKIVEDHPRDVNAQMENFSIVYGDESVPRLYENSRISSDQLPGQSGIVKRAVALGRYLQNPLAMIATLCGPGKEILSWKLHALEQFLTPDEKYEIVEQVMVDATNQIGFDVNLAASHEWHFSTLQFIAGLGPRKASALQKDLVREGSIFSRKELVKPLGRKVFMNASGFLRVRRSGAAAASAQLIDLLEDTRIHPESYVLAKNLAKDVYVEDAQHEINEMDDEEQEMAIEHVRERPSMLRSLKIVEYIKSITEEYRKLETLRDIKFELLCGFSDWRIPYTEPSPDEEFWLLSGETDDTISEGRIVQVTVRNIQDNKIICTFDSGLKAIVMADNYSDEGFDPESSQLREGDVLTGKIRNVNKNRFMVYLTCKASEMRRRPFSRGEQDPYYHEQDMTSQTVEDKARKQKELAKKHFKPRMIVHPHFQNLTAEEAMQFLSDKEHGEKLIRPSSRGPSFLTLTLKIFDGVYAHKEIAESGKDHKDITSLLRLGKTLTIDNETFEDLDEVIDRYVDPLVGHLKSMLSYRKFRKGLKNEVDEMLRAEKAENPMRIVYSFGISHEHPGTFILSYIRSTNPHHEYIGLYPKGFRFRKRDFDNIDRLVSYFQKNIDKPPPDAGPSMRNVAAMVPMKNSAWGSGGGGDANGGWRGDGSNDRDRPFSGRSGGRFDSRNSSGGRGRGRGRGRGNFGDDDNAGNWAVPCVVVQTTATR

SEQ ID NO: 186026 - protein, 102 aa, Zea Mays
MLINCQRPAPIKIMERSDSTKTSSPIKLGVLHLDWPRLKMLNCHKTSSNKNHGMTGLKPKHATDSISFGLGRRCSIATTTSSNKIIVQDPVLHINMNMNCTT

SEQ ID NO: 186027 - protein, 53 aa, Zea Mays
MGNNFSWKSYLCSNASQNCTSSTRTSKAYEGSKFLRPLTAKVSNNLDSKPRES

SEQ ID NO: 186028 - protein, 860 aa, Zea Mays
MDSGSKSWSIDSYLNEHFDIPAKNPPSEARLRWRRAVGLVVRNRRRRFRMFSGLHALDDAQRRNILMSSAVQRIRVYAEDGAGGGEFGVGAVVVDEMTGRLGALMITTYMNVLLGKLPYLVFLLPSAAYSVNANVGRVVCLAIYSAEYRGIRRYHLSPELIEEGFCISPDELAAITGIREDSTILKSHGGISGISRKIKASLDDGIKETEIATRQKLYGSNKHTEKPPRSFWTFVWDALHDLTLIILIVCAVVSLMVGLATEGWPKGIYDGLGIITSILLVVLVTASSDYKQSRKFMELDYEKKKIYALVTRDRKTKRVLIHDLVVGDILHLSVGDVVPADGLFISGYCLVIDESSLSGESEPVDVSEEKPFVHAGSKVVDGTAKMLVTAVGMRTEWGKVMDTLSADGVDETPLQVKLNGVATIIGQIGLAFAILTFLVLLVRFLVDKGMHVGLSNWSANDALTIVNYFAIAVTIIVVAVPEGLPLAVTLSLAFAMQKLMNDKALVRHLAACETMGSASCICTDKTGTLTTNHMIVDKVWMGDVSKSVNSDTNMNELKDATAESAVDLLVQGIFVNTAAEIVKGDDGRRSILGTPTEAALLEFGLGLQGDLYGEYNKMARVKIEPFNSVKKKMSVVIQLPNGGLRSFCKGASELILGQCDSFLNSEGNLAPLSEMQKQNVLDIINSFGSEALRTLCIAFKDLGEIPDDQTIPEDGYTLIALFGIKDPVRPGVRDAVMTCMAAGIKVTMVTGDNINTAKAIAKECGILTEDGIAIEGRELHDKSMDELKEILPKIQVMARSLPMDKYKLVTSLKSMYQEVVAVTGDGTNDAPALSESDIGLAMGIAGTEVLHHLLPSSCYG

SEQ ID NO: 186029 - protein, 959 aa, Zea Mays
MDGIRRYHLSPELIEEGFCISPDELAAITGIREDSTILKSHGGISGISRKIKASLDDGIKETEIATRQKLYGSNKHTEKPPRSFWTFVWDALHDLTLIILIVCAVVSLMVGLATEGWPKGIYDGLGIITSILLVVLVTASSDYKQSRKFMELDYEKKKIYALVTRDRKTKRVLIHDLVVGDILHLSVGDVVPADGLFISGYCLVIDESSLSGESEPVDVSEEKPFVHAGSKVVDGTAKMLVTAVGMRTEWGKVMDTLSADGVDETPLQVKLNGVATIIGQIGLAFAILTFLVLLVRFLVDKGMHVGLSNWSANDALTIVNYFAIAVTIIVVAVPEGLPLAVTLSLAFAMQKLMNDKALVRHLAACETMGSASCICTDKTGTLTTNHMIVDKVWMGDVSKSVNSDTNMNELKDATAESAVDLLVQGIFVNTAAEIVKGDDGRRSILGTPTEAALLEFGLGLQGDLYGEYNKMARVKIEPFNSVKKKMSVVIQLPNGGLRSFCKGASELILGQCDSFLNSEGNLAPLSEMQKQNVLDIINSFGSEALRTLCIAFKDLGEIPDDQTIPEDGYTLIALFGIKDPVRPGVRDAVMTCMAAGIKVTMVTGDNINTAKAIAKECGILTEDGIAIEGRELHDKSMDELKEILPKIQVMARSLPMDKYKLVTSLKSMYQEVVAVTGDGTNDAPALSESDIGLAMGIAGTEVAKENADVIIMDDNFSTIVNVARWGRAVYLNIQKFVQFQLTVNIVALIVNFISACIIGTAPLTAVQLLWVNMIMDTLGALALATEPPNDEMMNRPPVRRGHGFITQVMWRNILGQALYQLLVLGTLMFNGKRILNIEGPNADRTINTLIFNSFVFCQVFNEINSREMEKINVFRGILKNWVFIGILTTTIIFQVIIVEFLGTFANTVPLSWELWLLSAILGSVSLVISVILKCIPVESRKTDIKPHGYELIPEAPETV

SEQ ID NO: 186030 - protein, 121 aa, Zea Mays
MPTLNLPFKAFSFLSLFEGNASPTSPLIAPPSLTPCKFCLKYTPSCVFVCYHLNPCYSSIFTLMPIMYPYFKAPSPVLVQECCLTPPHSCSFPIPLSCCKSCFNSIFWCAFPCYLLYLCNL

SEQ ID NO: 186031 - protein, 67 aa, Zea Mays
MFVSYLPFKITSLPSYSESYTPIFTLVASSSLACEFETSFFAMLLFVTASTYPISQSYLGDYIIFVI

SEQ ID NO: 186032 - protein, 311 aa, Zea Mays
MVANNLPAPEQVVSMYKAKNISYVRLFHPDTDALNALRGSGVGVVLGTLNEDLPRLASDPSFAASWVATNVQPFAGAVQFRYINAGNEVIPGDAAARVLPAMQNLESALRSAGVTGVPVTTAVATSVLGASYPPSQGAFSEAAASVMAPIVSYLSSKGAPLLVNVYPYFAYSSSGGQVALGYALLSADAGAASSVTDAGVVYTNMFDAIVDATHAAVEKAGVQGLELVVSETGWPSAGGEGATVENAAAYNNNVVRHVGGGTPRRPGKAVETYLFAMFNENGKAEGVEQHFGLFQPDMSEVYHVDFTAGSP

SEQ ID NO: 186033 - protein, 166 aa, Zea Mays
MLHTVTVAASFNATTPGSSFPSNNSRLAPPPVEMWLITSATPTFSTAATESPPPMIVVTPLPLSSASFFCFTSVPTANLSNSKTPMGPFQMTVLVVSRAALNEATESGPISRPIQPSGIADAGTICRKKKIIWSSFSLRSRTERCFSSTTKDLLIRKKRRCNKPGC

SEQ ID NO: 186034 - protein, 1348 aa, Zea Mays
MRPLPIARGRFLPDRCGVEAAAAASSSSASAAATVASISVACSTAFTWRNTSYTYQQHKYRKTMEQRLHGGPQSAARRERGGEVFAYGPETRAYLETAQHLREDETLAPFQFSLPNLPQISKSILLRRRSNFPLPGNHPVPSSLPRFRFCARLGRAAEYQAGDLYLAGAGRGGDARNPSLAAAFSNTEMAMEMSPRQSPPRTPRRAAKPRLFIKEMVLRNFKSYAGEQRIGPFHKSFSAVVGPNGSGKSNVIDAMLFVFGKRAKQMRLNKVSELIHNSSNHQNLDSAGVSVHFQEIIDMDDGNYSAVEGSDFVISRVAFRDNTSKYYINERGSNFTEVTKLLKGKGVDLDNNRFLILQGEVEQISLMKPKAQGPHDEGFLEYLEDIIGTNQYVEKIEEAYKQLELLNEKRTASVQMLKLAEKERDSLESAKNEAETYMLKELLLLKWQEKATKLASDDAISRVNQCQENVADLEKNLAAEREKIHQNSQTLKEMEAIYSKHVKRQEDLENNMKSCKDQFKEFERKDVKYREDLKHLKQNIKKLDDKAEKDTSKRDEKTKEMEESSNLIPQLEAEIPKLQKRLNEEEKVLEQIKASSREETERFRAELTQVRTELEPWENQIIEHKGRLDVASAEKKLMKQKHDGAQAELTDAQNQMESIKEKVKTKDSYIVGLQEKIEKHLNEASEARKIEQECQKQEDSLIPLEQAARQKVAEMKTTRDSEKNQSTALKAILQAKESNEIQGIYGRLGDLGAIDAKYDVAISTSASSGLNYIVVETINSAQACIELLRRRNREETVTCLILEKQTHLLHKIKEKVKTPEGVPRLFDLVKVKDEKLKLAFFHVLGNTVVANDLDQASRIAYTAAKEFRRVVTLGGELFEKSGTMSGGGKRVQRGMMGTAIRESFSEEAIKNAENELTKLVDELNKLREKMNNAKKQYRSMEDAKSRLEMELAKAKKEVESMNAQYIYNEKRLDSLKTASQPKADELRRMQELDGIISSEQAELERLTKCSSKLKDQASAYRQSRFHFQASELQQKVENAGGKKLKDQKTKVGNIQSELDKTSSEINRHKVNVTSGEKLVKRLTKGIEESKKDREKLSAETEKMMSMFKEIEKKAFVVQEEYKKTPEMIDNHKVELDKTKEEYTKLKKAMDELRATEVDAEYKLQDTKKLAKEWEMKVKTFKKRLDEIQINVVKHMDQIQKDAVDPDKLKATLGDEQLNDTYDMKRAMEMVALLEAQIKDLNPNLDSIAEYRTKACLYGERVDELNATTQERDDLKKLYDGLRKRRLDEFMAGFNIISLKLKEMYQMITLGGDAELELVDSLDPFSEGVVFSVRPPKEKLEKYCQFIWW

SEQ ID NO: 186035 - protein, 230 aa, Zea Mays
MTYKKTKMPLNIVQKGPQTKRDLRLNRKRDYHSHKEIDKIVQNMPFDKAPVLNGFNGKFLRHIIKIDFYKLCHDFYDGNINLDGINTSFIALIPKVNNPVRVNDFRPISLLSIAIKLITKLLVNRLKPVIQRIVHKNQYDFIKNRTIQDCVLLGAMNTYISAIFLERKWLFSNFDKAFNTVEHSVIIAILNQLGFPVRWIRWVSSTLNSESSTVLLNGVSGKKNSLQKRC

SEQ ID NO: 186036 - protein, 149 aa, Zea Mays
MRRGGERGRDEGDRHLRAVAGAGGGRPGLALRPVVGARLRPAGGAAGGRGVEESGGALRRLRGGPGDKGPQDRRRRRCPPRHGLSLTPRIGTSPPHLRTALLFFERTAETENDGIILIRMFDGRNGKRRHNLDKNLQDTEETQEEERAN

SEQ ID NO: 186037 - protein, 329 aa, Zea Mays
MADEWWSCTRAADDDDDAGGSPCSTAPATTDQLDAADEPAATSTASIDFRRPTSLLHVVRHAAVPPSSPLILADPPHHIDDWTQAYLCGRAPLAAAAAAEASTSLSALLQLHGGDAAGRHFLLAQHLHGDAADSAAAHVAAASQSSALYAAAGNQPYSSSYGGGAPAAGALMAQQPPFPHQDEFEFSSASLFVGSSSSTRDSAGVPAAAARRPAVTTTKPLLLQALEQKAFAFHSHHKERTRQHDASSATTASAPGSPAPAKKPRVVATPSPLPTFKVRKEKLGDRITALQQLVSPFGKVVHLFLILPHSNLSASSVSLLPSSKLNSCI

SEQ ID NO: 186038 - protein, 574 aa, Zea Mays
MRIVQPGASTDDTAHGVFISPPRHQSGGGVGCGAGDDPRGADDAGDDGAAGVVPAGVPAQDLPRGAPAPADAEAVWLHLRHHLVGHRAQPHGLLRRRPCCGRVLVPARRPAGQQVPERAVPPGGRVRARQRGGLRGAAVLRRLPVSRSRRRRQARLGRERAGPGHVPRQRRQLPVRRVHVDGDAGGEPEPGGADAAPHLLGPHDAQHVRQPGEHDGVAGDRVQHHHHHGRARPRHHAHRQHQGVPERDHVQEAGHAHAAARRGVVDEAQETAAELPRPGAPVRAPAVGRHARRRRVPDRARPPRGPPPGHQVPPLPRPRPPGPILPAHGRPRAREHLRQGEIPHLSQGRNHREGGRRGAADAVHRAGPPAVQPGAAERRDEQLHAGAWQLQRRRAAVVVPAPPVPGTPPDVVGDAGDAGEHRGVRPGRRRRQVRHAALPLHLHQRQGAPQRSLLLARLAYLGGRRRSAGLEEVQAPQDALVALLHPPAAPAVPLLLARGGEAPPVHGHPHLAQAQPGRRLLASLARPFQAGFSSPQRGVYISNNMHLFVVFITRMSHERQSHDRTPSAFLLVVV

SEQ ID NO: 186039 - protein, 585 aa, Zea Mays
MRIVQPGASTDDTAHGVFISPPRHQSGHQTALEFFFTRGGVGCGAGDDPRGADDAGDDGAAGVVPAGVPAQDLPRGAPAPADAEAVWLHLRHHLVGHRAQPHGLLRRRPCCGRVLVPARRPAGQQVPERAVPPGGRVRARQRGGLRGAAVLRRLPVSRSRRRRQARLGRERAGPGHVPRQRRQLPVRRVHVDGDAGGEPEPGGADAAPHLLGPHDAQHVRQPGEHDGVAGDRVQHHHHHGRARPRHHAHRQHQGVPERDHVQEAGHAHAAARRGVVDEAQETAAELPRPGAPVRAPAVGRHARRRRVPDRARPPRGPPPGHQVPPLPRPRPPGPILPAHGRPRAREHLRQGEIPHLSQGRNHREGGRRGAADAVHRAGPPAVQPGAAERRDEQLHAGAWQLQRRRAAVVVPAPPVPGTPPDVVGDAGDAGEHRGVRPGRRRRQVRHAALPLHLHQRQGAPQRSLLLARLAYLGGRRRSAGLEEVQAPQDALVALLHPPAAPAVPLLLARGGEAPPVHGHPHLAQAQPGRRLLASLARPFQAGFSSPQRGVYISNNMHLFVVFITRMSHERQSHDRTPSAFLLVVV

SEQ ID NO: 186040 - protein, 248 aa, Zea Mays
MKLPVFNWAFHIIEFIPVERKWEIDEAIIRSRLSEFKNPKDPLWLAVFPEGTDYTEKKCIKSQEYAAEHGLPVLKNVLLPKTKGFNCCLQVLRSTIDAVYDITIAYKHRPPTFLDNVYGVGPSEVHIHISSIQVSDIPASEDGVAGWLVERFRLKDELLSGFSALGHFPDEGTAEGDLSTAECLANFAAVVAVTGLLAYLTLFSSVWFKLFVAFSCSSLTLATCYSVHLPQMVGFGSGTPASIHAKEA

SEQ ID NO: 186041 - protein, 88 aa, Zea Mays
MCHETMAIGRVRLDLDESTTTEGPSWDVAVGLGRRRRPSFAGRPVRPQHIPPPRPESRACMHASLARGEPRLPRLNCRSRRCRRRRDQ

SEQ ID NO: 186042 - protein, 229 aa, Zea Mays
MAMVMKQQDRSEEAIEAIRSFRHLCSKQAQESLDNLLIDLYKKCGKVEEQIELLKQKLKSIYLGEAFNGKATKKARSHGKKFQVSIQQETSRILGNLGWAYMQQNNFEAAELVYRKAQAIEPDANRACNLGLCLIKQGRHDEARQALEDVRLRRIYGSEDGKVVARAEQLLRELNPLQCVSSPFQVGLSVHEGIMGKPDLVVMNEWTPFRSRRLPVFEEIATFRDQMAC

SEQ ID NO: 186043 - protein, 1525 aa, Zea Mays
MEMIGSGSRSCLCHSSFLPGFFTGGEHAEKLSHKRTERSHPLPFLVKEEELSGDELEEFIKNRYSNRVKYAADRSYSREDDDIFPMDCALKEPTIWRVKCMVGRERQMAFCFMQKFVDLRKIGTKVPIITAFALDHIRGFVFVEAEKAGYVTEACKGFCSVYTSRITSVPATEVPSLLSSRTKPFEISRGTWIRMKNGNYKGDLAQVVNMDSGRKKVMIKIIPRVDLHAISKKFGGAVSLKEAAVPAPRFFRPHIEIKRDRQTGEVFEVLDGLMFKDGFLYKKVALSSLIYWGIQPTETELLKFSSSPSNRASADDLDWLSGMYGSKKRNLPAERDMKSSSSKIKSSKAPDLKGSTSTENYDDNDEFNLHDLVLYGRKDFGVIIAVEKDGFRILKGGPEGSAVTVRKQDIKKGCVDKMFTAVDHHKKTISINDTVNVVEGPFQGKQGLVKHLYLGILFIFNESESENCGFFCAQSGSCEKIRKGLGSSTTENSDFPTPMFSEPAYEQNEHRNTEGPYRSTREQLFSIGQMLRIRKGPLKGYLCRVVRIFRNDVTVKLDSLLKIVTVQADLLSVPANRGDNLSGAPASKFGSQDTPFFEAGKTSWDRGLPSFGSDSWQPFSSSTLPVQNAGAESEADPWCKKTSAEDDSDPWGKKTDGDSDPWGKEAVSAADGDCNPWGKETVPSAAGDSDPWGKKVFSADGDSDPWGKKAISSAVEVWNTSATQKEGSSGNAWDKQAGVGGSDAAGSSWDRAVVNKESEKSDNWGEACRVMDMGTGADTDPWGSKVKAVDMEGPNSWEKATMPPDNKLEDVSQGWNQHKGNSTEDQAKDNVSKDEDNNRAWSSSLPVTEDGTWGKSKDDNCDGAGGAGGWDASVANWNKSSVLADAQDEGWGKGNWSSAKSEETNNEIGNWNKAGASDQAGPKSFGGDGWNKGGDQNSSWNSPGNFGGGRGFGRGRGRVRGRESGDFNGRNDQGNWKNSWGGDNAEKSSWRSDNQVDNEAGDSGGYRGRGRGGRGQYGGRGRGRDNGWRNGDGPKWGGGDNWNATNPPSNQPWSSSGGTKSYGQNQPSTWNNPEDNKPSVGEQGDPWASKVSSTEGKGQQNDSWSSKMTSRGAEDTSGGWDSKEKGSSCNGGGEGLQNDPWANKIGSNEGKEQEADPWASKMSSAVGADDKNGTWDTTTKGTLSNEKADDPWNSKRGNDDDSKKTDAWGAGSSGGNQESSWSKPIFSLGDQEPTWNNPRFGDDDNVNNRGGFGRGNQGRGRGRSFGGGGGGSSWNESNKNGESGGGRSGEPWNRRGFDGGRGRGRFGRGDRNQGNNLGSGDGGSWGSGRGNGGGRGGYRNWNDNNERRPFGQGGGWSQSSDWNANKGSGEGNQAFSKSKPSWDAQNASGGDDQAGKKSDTDNSWSQNRSSPSILGQPSGDANNKSSAWDGAPNGGAGRGGSGSWGKSDEDGWNSSSGGSAREKPSWGGGAEAPPRKEDDGAWGKGGEGSRSLGGGGEGGSSSSWDKPADGAWSGNNKGGSGSGGW

SEQ ID NO: 186044 - protein, 943 aa, Zea Mays
MSYFLLMEKLNLGGSEAGKTSWDRGLPSFGSDSWQPFSSSTLPVQNAGAESEADPWCKKTSAEDDSDPWGKKTDGDSDPWGKEAVSAADGDCNPWGKETVPSAAGDSDPWGKKVFSADGDSDPWGKKAISSAVEVWNTSATQKEGSSGNAWDKQAGVGGSDAAGSSWDRAVVNKESEKSDNWGEACRVMDMGTGADTDPWGSKVKAVDMEGPNSWEKATMPPDNKLEDVSQGWNQHKGNSTEDQAKDNVSKDEDNNRAWSSSLPVTEDGTWGKSKDDNCDGAGGAGGWDASVANWNKSSVLADAQDEGWGKGNWSSAKSEETNNEIGNWNKAGASDQAGPKSFGGDGWNKGGDQNSSWNSPGNFGGGRGFGRGRGRVRGRESGDFNGRNDQGNWKNSWGGDNAEKSSWRSDNQVDNEAGDSGGYRGRGRGGRGQYGGRGRGRDNGWRNGDGPKWGGGDNWNATNPPSNQPWSSSGGTKSYGQNQPSTWNNPEDNKPSVGEQGDPWASKVSSTEGKGQQNDSWSSKMTSRGAEDTSGGWDSKEKGSSCNGGGEGLQNDPWANKIGSNEGKEQEADPWASKMSSAVGADDKNGTWDTTTKGTLSNEKADDPWNSKRGNDDDSKKTDAWGAGSSGGNQESSWSKPIFSLGDQEPTWNNPRFGDDDNVNNRGGFGRGNQGRGRGRSFGGGGGGSSWNESNKNGESGGGRSGEPWNRRGFDGGRGRGRFGRGDRNQGNNLGSGDGGSWGSGRGNGGGRGGYRNWNDNNERRPFGQGGGWSQSSDWNANKGSGEGNQAFSKSKPSWDAQNASGGDDQAGKKSDTDNSWSQNRSSPSILGQPSGDANNKSSAWDGAPNGGAGRGGSGSWGKSDEDGWNSSSGGSAREKPSWGGGAEAPPRKEDDGAWGKGGEGSRSLGGGGEGGSSSSWDKPADGAWSGNNKGGSGSGGW

SEQ ID NO: 186045 - protein, 318 aa, Zea Mays
MALTPVLLLLLAYCLSGVSSSAGPPPRSFTSLFALGDSYIDAGNFVTMATPVAPVWVDKPPYGMTFFERPTGRFSDGRVIVDFVAAALGVPFLPASLANSSDDDVARRGGVNFAVGGATAVDVAFFERRRLVPFKLLNNSLDVQLGWFEELEPSLCNATAETAGSYGGGRCFSRSLFLVGEFGVNDYTFLWTANKTESEVMAFVPRVVRTIASAVERLIVRDGAAHVVVTGNPPIGCSPTLLTLLRRTSRPTSAADDDDYDHIGCLRGVNDVARHHNALLGAAVVGLRARHPRATIVFADFYTPIRRILENPNQGGGQ

SEQ ID NO: 186046 - protein, 416 aa, Zea Mays
MPSVHHHLLLLTLAALAVAAATASAGGDPPAIEAQFDAWCAEHGKAYATPEERAARLAVFADNAAFVAAHNARAGANAAGGGGGGAAPPSYTLALNAFADLTHEEFRAARLGRIAPGAALRSRAAPVYWGLGGGAAVPDALDWRKSGAVTKVKDQGSCGACWSFSATGAMEGINKIKTGSLVSLSEQELIDCDRSYNSGCGGGLMDYAYKFVIKNGGIDTEEDYPYREADGTCNKNKLKKRVVTIDGYTDVPSNKEDLLLQAVAQQPVSVGICGSARAFQLYYQGIFDGPCPTSLDHAVLIVGYGSEGGKDYWIVKNSWGESWGMKGYMHMHRNTGDSKGVCGINMMASFPTKTSPNPPPSPGPGPTKCSLLTYCPEGSTCCCSWRVLGFCLSWSCCELDNAVCCKDNRPAATSLL

SEQ ID NO: 186047 - protein, 291 aa, Zea Mays
MEGINKIKTGSLVSLSEQELIDCDRSYNSGCGGGLMDYAYKFVIKNGGIDTEEDYPYREADGTCNKNKLKKRVVTIDGYTDVPSNKEDLLLQAVAQQPVSVGICGSARAFQLYYQGIFDGPCPTSLDHAVLIVGYGSEGGKDYWIVKNSWGESWGMKGYMHMHRNTGDSKGVCGINMMASFPTKTSPNPPPSPGPGPTKCSLLTYCPEGSTCCCSWRVLGFCLSWSCCELDNAVCCKDNRYCCPHDYPVCDTGRGQCLKASGNFSAIEGIRRKQSFSKAPSWTGWLELMDQ

SEQ ID NO: 186048 - protein, 420 aa, Zea Mays
MASPVATLDLTWFSPCETEETAMLSTRAITPNSSTQTRHRTEQSGTRCDKMVSVPSYYGDTTGAAAVGGSPQTYGPWGGSGGTIFDDGVYTGVWQINLTRAVGISSIKVLYDRNGQAVWGNKHGFSSGVIPDKIIFDFPSEVLTHITGFYDSAIIMGPTVVRSLTFHTNKRTYGPYGDEYGTYFSTSFTNGRIVGFHGREGWYIDGIGVHVQEGKVAQQRFVSRPKTPTSPLVHYNMLAQAPSATYTDGEVAYGMVKEPVPMGPGPWGGEGGRAWDDGVYTGVKQIYVMRGAFIGSIQIEYDRSGHSIWSSRHGNSGHITHRVKLDFPHEVLTCVYGYYNTSKEDGPRVLRSLTFLTNRGKYGPFGDEFGAYFSSATTEGKVVGFHGRSGQHLDAIGVHMQHWLGDRRPAPKYVLSKYLF

SEQ ID NO: 186049 - protein, 341 aa, Zea Mays
MAPTAESSSPPPQRRPRTGPPPGLKNLSNTCYLNCVLQCLASTPPLATFCLASGHSDICKKVSPNRDKECAFCVLERQIARLLRADAGALDSPAKVIRCMPLFAEHFRWGRQEDAHEFLRYVVDACHTAGLRTRKLLLAKGANGNCGEDGRGQGACLVMRETFGGALLSQVKCLVCNRESNKTDEIMDISLDLPGSSSVADALARFFKPEILEGANKYSCERCKTLTSAQKQMFMLRAPKVLVIQLKRFEGINGGKINRNIEFKETLGISDCMYNKSQRAWLRRLILPQVIRTCCFISLADLICCSFSHGAIGQSYVGSSRMVHFCGRFNAHHNCTSHSCK

SEQ ID NO: 186050 - protein, 383 aa, Zea Mays
MKKLKKSEMLRRGQVEHVKAERNLLAEVDSAYIVKLYYSFQDEEFLYLIMEYLPGGDMMTLLMRKDTLTEDEARFYIAETVLAIESIHKHNYVHRNFPNLNEPDYMSGKVTTPLPDTTRLSNPSAPRRTQQEQLSHWQKNRRMLAYSTVGTPDYIAPEVLLKKGYGTECDWWSLGAIMYEMLVGYPPFYSEDPMSTCRKIVNWRSHLKFPEEAKLPPEAKALISKLLCNVEHRLGTKGAHEIKAHPWFGGVQWEKLYQMKAAFIPEVNGELDTQNFENFEEIGTQIQSSSKSGPWRKMLPSKDANFVGYTYKNFEIVNDDEVAGIAELKKKSSKPKRPTIKTMFERMDEEEPVQGSFLSMLPPEGQPSSHSSVPQEKYQPRRK

SEQ ID NO: 186051 - protein, 411 aa, Zea Mays
MKKLKKSEMLRRGQVEHVKAERNLLAEVDSAYIVKLYYSFQDEEFLYLIMEYLPGGDMMTLLMRKDTLTEDEARFYIAETVLAIESIHKHNYVHRDIKPDNLLLDHSGHLKLSDFGLCKPLDSSNFPNLNEPDYMSGKVTTPLPDTTRLSNPSAPRRTQQEQLSHWQKNRRMLAYSTVGTPDYIAPEVLLKKGYGTECDWWSLGAIMYEMLVGYPPFYSEDPMSTCRKIVNWRSHLKFPEEAKLPPEAKALISKLLCNVEHRLGTKGAHEIKAHPWFGGVQWEKLYQMKAAFIPEVNGELDTQNFENFEEIGTQIQSSSKSGPWRKMLPSKDANFVGYTYKNFEIVNDDEVAGIELKKKSSKPKRPTIKTMFERMDEEEPVQGSFLSMLPPEGQPSSHSSVPQEKYQPRRK

SEQ ID NO: 186052 - protein, 384 aa, Zea Mays
MKKLKKSEMLRRGQVEHVKAERNLLAEVDSAYIVKLYYSFQDEEFLYLIMEYLPGGDMMTLLMRKDTLTEDEARFYIAETVLAIESIHKHNYVHRSNFPNLNEPDYMSGKVTTPLPDTTRLSNPSAPRRTQQEQLSHWQKNRRMLAYSTVGTPDYIAPEVLLKKGYGTECDWWSLGAIMYEMLVGYPPFYSEDPMSTCRKIVNWRSHLKFPEEAKLPPEAKALISKLLCNVEHRLGTKGAHEIKAHPWFGGVQWEKLYQMKAAFIPEVNGELDTQNFENFEEIGTQIQSSSKSGPWRKMLPSKDANFVGYTYKNFEIVNDDEVAGIAELKKKSSKPKRPTIKTMFERMDEEEPVQGSFLSMLPPEGQPSSHSSVPQEKYQPRRK

SEQ ID NO: 186053 - protein, 450 aa, Zea Mays
MLPTAHKKLLFHLGLKYQSLRWCISMNASFIMKMLEAFEPPFDMSQYVDDDVHAHPSILHDHSHMDCTHSSERGDCSIIAISRSNLSLDEQHDSPKEYTKRHEPSRETDNNKGGEDHMAGCSQPVGNMGMSQGAGIACNGDKNTGAAAYFQDKDVSASSAIENVALRHCTASSLKLNVPPIDVDKVRCIVRNIVRDWGDEGQKERDECYKPILEELNRLFPNRSDQRPPSCLVPGAGLGRLALDISSLGFVSQGNEFSYYMLICSNFILNHTQEANEWSIYPWIHSNCNSLSDNDQLRPVSFPDIHPSSAGITEGFSMCAGDFVEVYSEESQESAWDAVVTCFFLDTAHNIVEYIEIISKVLKDGGVWINLGPLLYHFADSYGPDDDMSIELSLEDVKKVAYHYGFTMEVEKMIETTYTANMKAMMQNRYRAAFWTMRKDASRSKACKPR

SEQ ID NO: 186054 - protein, 749 aa, Zea Mays
MTAAAVRFESHRLTHPSTSPPPESMVERRYTEEEEALEIKSLRRIIAAYANYQDAAERDVERYERSFKMLPTAHKKLLFHLGLKYQSLRWCISMNASFIMKMLEAFEPPFDMSQYVDDDVHAHPSILHDHSHMDCTHSSERGDCSIIAISRSNLSLDEQHDSPKEYTKRHEPSRETDNNKGGEDHMAGCSQPVGNMGMSQGAGIACNGDKNTGAAAYFQDKDVSASSAIENVALRHCTASSLKLNVPPIDVDKVRCIVRNIVRDWGDEGQKERDECYKPILEELNRLFPNRSDQRPPSCLVPGAGLGRLALDISSLGFVSQGNEFSYYMLICSNFILNHTQEANEWSIYPWIHSNCNSLSDNDQLRPVSFPDIHPSSAGITEGFSMCAGDFVEVYSEESQESAWDAVVTCFFLDTAHNIVEYIEIISKVLKDGGVWINLGPLLYHFADSYGPDDDMSIELSLEDVKKVAYHYGFTMEVEKMIETTYTANMKAMMQLLDIRPDWLYMGWVSATFESSVQKKLRREAEKTSCGRWPAEAQSFAGDLVAGLPPNVLATIAAVEEDAGLFFVSFSFSTCRAPAPAVKVKFFSLCIVMNKVMWSLLVGQELWLSFQDHAECTELGQSLADFGKAIKLLGSCEGDLMEKVFSEVGSKSEMLSIKLQREAIRADGQTQLSHEIALELSQRSAAAGLRPIGAVVFMQRGVLKVCLRTTDSTVNTSEIAKAYGGGGKRSSSSFTLRMDEFNIWTSVNS

SEQ ID NO: 186055 - protein, 702 aa, Zea Mays
MTAAAVRFESHRLTHPSTSPPPESMVERRYTEEEEALEIKSLRRIIAAYANYQDAAERDVERYERSFKMLPTAHKKLLFHLGLKYQSLRWCISMNASFIMKMLEAFEPPFDMSQYVDDDVHAHPSILHDHSHMDCTHSSERGDCSIIAISRSNLSLDEQHDSPKEYTKRHEPSRETDNNKGGEDHMAGCSQPVGNMGMSQGAGIACNGDKNTGAAAYFQDKDVSASSAIENVALRHCTASSLKLNVPPIDVDKVRCIVRNIVRDWGDEGQKERDECYKPILEELNRLFPNRSDQRPPSCLVPGAGLGRLALDISSLGFVSQGNEFSYYMLICSNFILNHTQEANEWSIYPWIHSNCNSLSDNDQLRPVSFPDIHPSSAGITEGFSMCAGDFVEVYSEESQESAWDAVVTCFFLDTAHNIVEYIEIISKVLKDGGVWINLGPLLYHFADSYGPDDDMSIELSLEDVKKVAYHYGFTMEVEKMIETTYTANMKAMMQLLDIRPDWLYMGWVSATFESSVQKKLRREAEKTSCGRWPAEAQSFAGDLVAGLPPNVLATIAAVEEDAGLFFVSFSFSTCRAPAPAVKVKFFSLCIVMNKVMWSLLVGQGEVLLFMYLYQLSCDMRVSRKFRYMKVCSCIRSGIVNISFFICLSFVKLGICLSSRFTSVRLLRWRLLLFMLMHLDVMNYKPKIWELFNYGSHEFYPH

SEQ ID NO: 186056 - protein, 457 aa, Zea Mays
MTAAAVRFESHRLTHPSTSPPPESMVERRYTEEEEALEIKSLRRIIAAYANYQDAAERDVERYERSFKMLPTAHKKLLFHLGLKYQSLRWCISMNASFIMKMLEAFEPPFDMSQSNLSLDEQHDSPKEYTKRHEPSRETDNNKGGEDHMAGCSQPVGNMGMSQGAGIACNGDKNTGAAAYFQDKDVSASSAIENVALRHCTASSLKLNVPPIDVDKVRCIVRNIVRDWGDEGQKERDECYKPILEELNRLFPNRSDQRPPSCLVPGAGLGRLALDISSLALKKLMSGPYILGYIATAILFLTTINFVLFHFLTFIPQGITEGFSMCAGDFVEVYSEESQESAWDAVVTCFFLDTAHNIVEYIEIISKVLKDGGVWINLGPLLYHFADSYGPDDDMSIELSLEDVKKVAYHYGFTMEVEKMIETTYTANMKAMMQNRYRAAFWTMRKDASRSKACKPR

SEQ ID NO: 186057 - protein, 236 aa, Zea Mays
MTVIKLKSGGLWVHAPIAPTKECIQMLKELDAPVEHIVLPTFAYEHKIFVGPFSRKFPKAQIWVAPRQWSWPINLPLEFFGIFRAKPLKDEDDATPWVAEIEQKVLSSPEVGIGPYVEVAFYHKPSRTLLVTDAVIFVPQQPPECISKESLLASAKNGLAVKLLSKGKEVPDEPVVDNKLNRQKGWERMVLQILFLGPSNLLEPNASFAQMSQKLIVSPIVKTLVFSKVPEKQQQQ

SEQ ID NO: 186058 - protein, 134 aa, Zea Mays
MAVPLLLLLLLSVFTASDAAFCVCKPGMSDQMMQSAIDYACSKGADCASTTKGAPCYGNGNKVAVCSYICNSYYQSRSGMGATCDFNGVATLTGTDPSSGTCKFASGPRLVDLWGARPRPPRGSGNVSGGTGRH

SEQ ID NO: 186059 - protein, 193 aa, Zea Mays
MCIAGSVVIVIHAPQEQEITSVKEIWNMATQPAFLLYVASVIVIVFVLVFYFSPLYGQSNVLIYTAICSLMGSLSVMSVKALGTSLKLTFEGTNQLIYPETWFFMLVVATCVLTQMNYLNKALDTFNTAIVSPIYYVMFTTLTILASVIMFKDWSGQSPGSVISEICGLVVVLSGTILLHVTKDYERIPQSRN

SEQ ID NO: 186060 - protein, 63 aa, Zea Mays
MDSPAGACTWRSDNLPIAIVDSSITVCWFVYITAAICGYRVIANLPRWWKAAEFHQKESKSGA

SEQ ID NO: 186061 - protein, 286 aa, Zea Mays
MINTYKSLLLRLGLLNIDLMDSYIVSFAQPGPRDAPMHCFIRRDKKNSTFSLYLSLTQALTDKGKFLLAARRFRQGAHTEYIISYDYDDLHPRSSSYVGKLRSDFLGTKFIIYDSQAPYDGAKPSRTRSTRRFASKQISPQVSGGNFEVGQVTYRFNFMKSRGPRRMQCNIQCPVGQGSASDPSKEKTPSPSSLDLKNKAPRWHDHLQCWCLNFHGRVTVASVKNFQLVATAGSGGPWGVGDEETVILQFGKIEDDAFTMDYRQPLSAFQAFAICLTSFGTKLACE

SEQ ID NO: 186062 - protein, 258 aa, Zea Mays
MPGPRDAPMHCFIRRDKKNSTFSLYLSLTQALTDKGKFLLAARRFRQGAHTEYIISYDYDDLHPRSSSYVGKLRSDFLGTKFIIYDSQAPYDGAKPSRTRSTRRFASKQISPQVSGGNFEVGQVTYRFNFMKSRGPRRMQCNIQCPVGQGSASDPSKEKTPSPSSLDLKNKAPRWHDHLQCWCLNFHGRVTVASVKNFQLVATAGSGGPWGVGDEETVILQFGKIEDDAFTMDYRQPLSAFQAFAICLTSFGTKLACE

SEQ ID NO: 186063 - protein, 128 aa, Zea Mays
MKSRGPRRMQCNIQCPVGQGSASDPSKEKTPSPSSLDLKNKAPRWHDHLQCWCLNFHGRVTVASVKNFQLVATAGSGGPWGVGDEETVILQFGKIEDDAFTMDYRQPLSAFQAFAICLTSFGTKLACE

SEQ ID NO: 186064 - protein, 582 aa, Zea Mays
MFGRNINDGETEEKNGEEEDGDGEKKHASHMFCKTLTASDTSTHGGFSVPRRAAEDCFPPLDYEQLRPSQELIAKDLHGMKWRFRHIYRGQPRRHLLTTGWSSFINKKKLVSGDAVLFLRGNDGELRLGVRRAVQLKNEALLEAVNCTDSKLLMLSAVANSLDNRSIFHICFNPRVGASEFIVPYCKFLKSLNYHFSVGTRFKVGCENEDANERSFGLIIGISEVDPIHWPGSKWKSLLIKWDGATKYSHQNRVSPWDIEGVGSSVSVTHRLSSSVSKRTKLCFPPSDLDTPILDGNGRPDSVETERFHRVLQGQELVHSSIHGTACSHSSDSPRCQGSYGRRFSADAWNCKMNDVMSGPRHLNATGFAYQPLGFSESVKFSEVLQGQEMSQAVPSFMRSAFNSGTQNGRVRPFDYVQRSDATQGYALQQFNLPATEVHSPSSVLMFNQTMVPHAELDGATNREEVHGSRYLSSNAIGREAEPWPSMQQQRASVNGSEPLDTTEASAPARNAESGSVGRGAGRSNCKLFGFSLTEKILGTDGGGVKEGNYEVDRQTPRVLDLFGHGSTPGALHALCAAPLGI

SEQ ID NO: 186065 - protein, 312 aa, Zea Mays
MGIDLNAVGEDDPAGAVCAELWHACAGAGVALPRRGSAVVYLPQAHLAAGGCDGGGVSAPAPPRVPPHVVCRVVDVELRADAATDEVYARLALVAMDTMFGRNINDGETEEKNGEEEDGDGEKKHASHMFCKTLTASDTSTHGGFSVPRRAAEDCFPPLDYEQLRPSQELIAKDLHGMKWRFRHIYRGQPRRHLLTTGWSSFINKKKLVSGDAVLFLRGNDGELRLGVRRAVQLKNEALLEAVNCTDSKLLMLSAVANSLDNRSIFHICFNPRVGASEFIVPYCKFLKSLNYHFSVGTRFKVGCENEDANER

SEQ ID NO: 186066 - protein, 87 aa, Zea Mays
MDLENADLRMMRVMEAYQVKEFHPDVCKDPEIADLRMSERWRSIRDYSVVLCWFTVPQTILKRTDEERKVYSIVEDFELQFKEKEDC

SEQ ID NO: 186067 - protein, 77 aa, Zea Mays
MDLENADLRMMRVMEAYQVKEFHPDVCKDPEIADLRMSERWRSIRECSSLLSIVKHVLQLQCCVVLVHCTTNNIEED

SEQ ID NO: 186068 - protein, 71 aa, Zea Mays
MEVYQGVFFVAIHCETCPTVSLANQLLYLDYSVVLCWFTVPQTILKRTDEERKVYSIVEDFELQFKEKEDC

SEQ ID NO: 186069 - protein, 125 aa, Zea Mays
MTVYVEVKEFHPCVCMDLENADLRMMRVMEAYQVKEFHPDVCKDPEIADLRMSERWRSIRECSSLLSIVKHVLQYPLPTSSCICCLLDSLKHRDDLQNKKKLIKEHGHYESTIGSKEVGPFLSLI

SEQ ID NO: 186070 - protein, 92 aa, Zea Mays
MTVYVEVKEFHPCVCMDLENADLRMMRVMEAYQVKEFHPDVCKDPEIADLRMSERWRSIRECSSLLSIVKHVLQLQCCVVLVHCTTNNIEED

SEQ ID NO: 186071 - protein, 112 aa, Zea Mays
MTVYVEVKEFHPCVCMDLENADLRMMRVMEAYQVKEFHPDVCKDPEIADLRMSERWRSIRECSSLLSIVKHVLQYPLPTSSCICCLLDSLKHRRLQCCVVLVHCTTNNIEED

SEQ ID NO: 186072 - protein, 133 aa, Zea Mays
MDPTDQSPEEVYSVWALPPEPVRDRFRRIMEGLRAAYGGPAFEPHVTVVGDFRGRRSEAVKVLRAAAASVQPYTARVTGVARGSFFYQCVYILLDPTAEHTCRMSASYMETLQMRRRRRQGRRQRSWTRISMY

SEQ ID NO: 186073 - protein, 1101 aa, Zea Mays
MFKRSQRGHGHNSKPIRPWAEAAYSCNAKTLRVPPIKSPNPSIPPAYHSCARKQASEFEAWRPVLHVAFACRSSSAADVPPLPNPSPPPRLVIRITAPLPLRTSQPPQLLPGSSGRARVPRRAGRSIGERRRLGIGPGARRQLHTRGEAAAMPTSSPFVGDSGTAGSPIRAERAVGEHGRRYDVFASDAMDTDAAEAASASAGAFALDGVHSPGRASPANMEDAGGAAAGHAARPPLAGSRSGFRRLGLRGMKQRLLVVANRLPVSANRRGEDHWSLEISAGGLVSALLGVKDVDAKWIGWAGVNVPDEIGQRALTKALAEKRCIPVFLDEEIVHQYYNGYCNNILWPLFHYLGLPQEDRLATTRNFESQFDAYKRANQMFADVVYQHYQEGDVIWCHDYHLMFLPKCLKDHDINMKVGWFLHTPFPSSEIYRTLPSRLELLRSVLCADLVGFHTYDYARHFVSACTRILGLEGTPEGVEDQGRLTRVAAFPIGIDSDRFKRALELPAVKRHINELTQRFAGRKVMLGVDRLDMIKGIPQKILAFEKFLEENPDWNDKVVLLQIAVPTRTDVPEYQKLTSQVHEIVGRINGRFGTLTAVPIHHLDRSLDFHALCALYAVTDVALVTSLRDGMNLVSYEYVACQGSKKGVLILSEFAGAAQSLGAGAILVNPWNITEVADSIHHALTMPSDEREKRHRHNYAHVTTHTAQDWAETFVFELNDTVAEALLRTRQVPPGLPGQTAIQQYLRSKNRLLILGFNSTLTEPVESSGRRGGDQIKEMELKLHPDLKGPLGALCEDERTTVIVLSGSDRSVLDENFGEFKMWLAAEHGMFLRPTYGEWMTTMPEHLNMDWVDSVKHVFEYFTERTPRSHFEHRETSFVWNYKYADVEFGRLQARDMLQHLWTGPISNAAVDVVQGSRSVEVRSVGVTKGAAIDRILGEIVHSENMITPIDYVLCIGHFLGKDEDIYVFFDPEYPSESKVKPEGGSASLDRRPNGRPASNGRSNSRNPQSRPQKAQQAASERSSSSSHSSTSSNHDWREGSSVLDLKAENYFSCAVGRKRSNARYLLSSSEEVVSFLKELATETAGFQSSCADYMFLDRQ

SEQ ID NO: 186074 - protein, 441 aa, Zea Mays
MPTSSPFVGDSGTAGSPIRAERAVGEHGRRYDVFASDAMDTDAAEAASASAGAFALDGVHSPGRASPANMEDAGGAAAGHAARPPLAGSRSGFRRLGLRGMKQRLLVVANRLPVSANRRGEDHWSLEISAGGLVSALLGVKDVDAKWIGWAGVNVPDEIGQRALTKALAEKHYQEGDVIWCHDYHLMFLPKCLKDHDINMKVGWFLHTPFPSSEIYRTLPSRLELLRSVLCADLVGFHTYDYARHFVSACTRILGLEGTPEGVEDQGRLTRVAAFPIGIDSDRFKRALELPAVKRHINELTQRFAGRKVMLGVDRLDMIKGIPQKILAFEKFLEENPDWNDKVVLLQIAVPTRTDVPEYQKLTSQVHEIVGRINGRFGTLTAVPIHHLDRSLDFHALCALYAVTDVALVTSLRDGMNLVSYEYVACQGSKKGVLILSEVAD

SEQ ID NO: 186075 - protein, 472 aa, Zea Mays
MPTSSPFVGDSGTAGSPIRAERAVGEHGRRYDVFASDAMDTDAAEAASASAGAFALDGVHSPGRASPANMEDAGGAAAGHAARPPLAGSRSGFRRLGLRGMKQRLLVVANRLPVSANRRGEDHWSLEISAGGLVSALLGVKDVDAKWIGWAGVNVPDEIGQRALTKALAEKRCIPVFLDEEIVHQYYNGYCNNILWPLFHYLGLPQEDRLATTRNFESQFDAYKRANQMFADVVYQHYQEGDVIWCHDYHLMFLPKCLKDHDINMKVGWFLHTPFPSSEIYRTLPSRLELLRSVLCADLVGFHTYDYARHFVSACTRILGLEGTPEGVEDQGRLTRVAAFPIGIDSDRFKRALELPAVKRHINELTQRFAGRKVMLGVDRLDMIKGIPQKILAFEKFLEENPDWNDKVVLLQIAVPTRTDVPEYQKLTSQVHEIVGRINGRFGTLTAVPIHHLVAFTLPIAASISVLGPNFS

SEQ ID NO: 186076 - protein, 427 aa, Zea Mays
MSLSKPVSARRLVPALFPLAHADAASATASRRERRKDTFVATPPIPAPSPRAVRLAEPLPTLAPSRLAFHNRILALLSGPQADLPEAALLTRHALHSNCRPSSFTCAAVLAALLRTRRLEDFFALHRFALQAAVPPTAATHVLYLSALAARRLADDALHHLRIIARPGSPVPPSPTAYRVVVECLVADHGRLADAVKLKDEMLTSGFVGPDPKVYSLLMAGFVGAGDGAKALELYQELKDKVGGEPILDGIVYGTLMKAYFLMGTGEKVMECYKEVLCVESAVRFGAESYNEVVDALGQNGRLEDALKLFDRMLEEHDPPLRIAVDLRSFRVMVDTYCAAGRFEDAVAVFRRMGEWKLVPDVASYNNLIRHLQINQLIDKAEVLYNEMCESGVGADKETYLLLTEACFSVDRIDDVWSTRLRNTSIR

SEQ ID NO: 186077 - protein, 444 aa, Zea Mays
MVWPKQAKSSACASLQPIQKKRQEDVKFMFNVGKCDKIFDELLKNGNIKINHTVPSANELKRHAYCKWHNSFSQATNDCNVFRRQIQSVINEGRLKFQEMQVDTEPFPMNMIDFEGKKVLVRPNTADKDKGKETIIGNAKEADGDRKASCRKVVAEKTPDGGETLKVTITASSTGGQAQTGRQMQEPVLRIPDGPARRRGWSGTPPDGPESSGGRSGRTQDSQRPRTFKPRRPEIGTWKTNTLKAAGRLVKAGPTFDQLLSKYVKKKAGPSDRPAKRPRSPIHEQRQVRPIGPPHQSEEMRGHTVQLRPNIPAWTPPPYPPMSYPYPYLPPPYVPNQMWGMPPYPFGMPQYPAWGAPQTSVFDRLVPPMQDRLSTAESGHQAQAQQDCRTTRPPRPTNPVGGHMPCSNSRTTKKDIIKISTADVVIQGDNKGPMIFGESANTTE

SEQ ID NO: 186078 - protein, 428 aa, Zea Mays
MEGAGRDANPLSGYRIGKTLGIGSFGKVKIAEHILTGHKVAIKILNRKKIRSMDMEEKVKREIKILRLFMHPHIIRLYEVIDTPADICVVMEYVKSGELFDYIVEKGRLHEEEARHFFQQIISGVEYCHRNMVAHRDLKPENLLLDSKCNVKIADFGLSNIMRDGHFLKTSCGSPNYAAPEVISGKLYAGPEVDVWSCGVILYALLCGTLPFDDENIPNLFKKIKGGIYTLPSHLSPSARDLIPRMLVVDPMKRITIREIREHVWFKIRLPRYLAVPPPDTAQQVKKVDEETLNDVIKMGFDKNQLIESLQNRLQNEATVAYYLLLDNRLRTTSGYLGSEFQESMDSSLSQVIAETPTSATELRQHGFSESPGSGLRQHFAAERKWALGLQLYKTRDEKYLLDLQRVSGSHLLFLDLCSAFLTQLRVL

SEQ ID NO: 186079 - protein, 379 aa, Zea Mays
MEGAGRDANPLSSYRIGRTLGTGSFGKVKIAEHILTGHKVAIKIINRLKIRSLKMEKKVKREIKLLRLLMHPYIIRLYEVVHTPADIYVVMEYVKKGELFDYIVEKGRLHEQEACRLFQQIISSKLYVGPDVDVWSCGVILYALLCGTLPFDDENILELFYKIKGGIYILPSHLSLSARDLISRMLVVDPMKRITIHGIREHVWFKIQLPRYLAVPPPDTAQQVKKLSEETLNDVLNMGFDKNLLIESLQNRLQNEATVAYYLLLDDRLCTTSGYLGSDFQESMDSSFSQVITETPTSATELQQHVFTEGTFGCLPLPCFAWLSIKIHRLVGLLPVSVLALSRIFIASPSDLKPLSAAGKPGLAERGEASWPHKPTKRA

SEQ ID NO: 186080 - protein, 169 aa, Zea Mays
MEGAGRDANPLSSYRIGRTLGTGSFGKVKIAEHILTGHKVAIKIINRLKIRSLKMEKKVKREIKLLRLLMHPYIIRLYEVVHTPADIYVVMEYVKKGELFDYIVEKGRLHEQEACRLFQQIISGVEYCHRKMVVHCGLKLDNVLLDSRRNVKIVNFSSSNVMRDGHFLK

SEQ ID NO: 186081 - protein, 249 aa, Zea Mays
MAPPLLSPPLLADALATPPRSFLCSRPTRQLPTVGLAGAVRGDRGRWSVRRRDPRVFATSTEADRERSEEDVADDYYSVLGVMPDATPEEIKKAYYSCMKECHPDLSGDHPDVTNFCMFINEVYSVLSDPAQRAVYDEIHGYTATAINPFFDDSAPKDHVFVDEFTCIGCKNCANICPGVFQIEEDFGRSRVYSQSGSTELIQDAIDSCPVDCIHWTSAAQLSLLENEMRRVERVNVSKLSVRWNFGIV

SEQ ID NO: 186082 - protein, 69 aa, Zea Mays
MVYLQFEVGLRCECDYMFRYGGVEGKVVEQFFNLHHVIDTTFETFGVALFDILDKYNFIHLYGTRLLYF

SEQ ID NO: 186083 - protein, 215 aa, Zea Mays
MGDNKSPLSLSPMGGRDRDRELLIPVSGGGSAPGDGVEDGDRASSASAALSSSGREAFHKVVRSWASKKFMTGCVILFPIAITFYITWWFIHFVDGFFSPIYAQLGINIFGLGFVTSVTFIFLIGVFMSSWLGASVLSLGEWIIKRMPLVRHIYNASKQISAAISPGVQGSGHHKASSCWRICVWFHHIVSIPPELFWSRRSLLRLCPNEPSLHW

SEQ ID NO: 186084 - protein, 218 aa, Zea Mays
MGDNKSPLSLSPMGGRDRDRELLIPVSGGGSAPGDGVEDGDRASSASAALSSSGREAFHKVVRSWASKKFMTGCVILFPIAITFYITWWFIHFVDGFFSPIYAQLGINIFGLGFVTSVTFIFLIGVFMSSWLGASVLSLGEWIIKRMPLVRHIYNASKQISAAISPEQTGVQGSGHHKASSCWRICVWFHHIVSIPPELFWSRRSLLRLCPNEPSLHW

SEQ ID NO: 186085 - protein, 181 aa, Zea Mays
MGDNKSPLSLSPMGGRDRDRELLIPVSGGGSAPGDGVEDGDRASSASAALSSSGREAFHKVVRSWASKKFMTGCVILFPIAITFYITWWFIHFVDGFFSPIYAQLGINIFGLGFVTSVTFIFLIGVFMSSWLGASVLSLGEWIIKRMPLVRHIYNASKQISAAISPGNINQQTGQSSLLRC

SEQ ID NO: 186086 - protein, 656 aa, Zea Mays
MLSASANKLSRLKEQAEEYAALIMEELDPEGLGYIELWQLETLLLQKDTYVNYSQALSYTSQALSQNLAGLRKRSPIRKISSTLNYYLEDNWKRVWVLAVWIGIMAGLFIWKFIQYRNRYVFDVMGYCVTTAKGAAETLKLNMALILLPVCRNTITWLRNTKAARALPFDDNINFHKTIAAAIVVGVVLHAGNHLVCDFPRLISSSEVKYAPLRKYFGENKPTYLDLVKGVEGITGIIMVVCMLIAFTLATRWFRRSLVKLPRPFDKLTGFNAFWYSHHLFIIVYISLVIHGECLYLIHDWYKRTTWMYLAVPVGLYVGERTLRFFRSGSYSVRLLKVAIYPGNVLTLQMSKPPTFRYKSGQYMFVQCPAVSPFEWHPFSITSAPGDDYLSIHVRQLGDWTRELKRVFSAACEPPVGGKSGLLRADETTKKALPKLLIDGPYGSPAQDYSKYDVLLLVGLGIGATPFISILKDLLNNIIKMEEEEEASSDLYPPIGRSKAHVDLDTLMRITSKPKRVLKTTNAYFYWVTREQGSFDWFKGVMNEIAELDQRNIIEMHNYLTSVYEEGDARSALITMLQALNHAKNGVDIVSGTKVRTHFARPNFKKVLSKIATKHPYAKIGVFYCGAPVLAQELSKLCYEFNGKSTTKFEFHKEHF

SEQ ID NO: 186087 - protein, 108 aa, Zea Mays
MTRVARSRVLLGIFIPTGPTEAIRHSPTDSDPTLTYMWAKKSGPHNRFRVGHERSGKEKKVEKAKSLVAQGYKPTSNRVRVWSKEGEGSRAGNRRRQTWRSSTRRSRA

SEQ ID NO: 186088 - protein, 196 aa, Zea Mays
MAGETKKGCCCPPSSSHDSDAGPAVHRGDVLPVVGWPPVRSFRRNLANASSSKQSLEQQQQNDDEASCDKAKQTCKRSPLIKINMDGIPIGRKINLSAYDSYQKLSSAVQDLFCGFLDAAQKDESRGRGAEEKMFSGLLDGTGEYTLVCEDSEGGRTLVGHLPWNVFVSTAKRLRVMESSELPHGLIKTASERADD

SEQ ID NO: 186089 - protein, 79 aa, Zea Mays
MSACRSRFSTETRRAPRLRSSCAGVSGSVLLLHLLKLVDRHLQLVRASHGSHGVVVDPEHEGRQAPQPPPGSWSWVQGF

SEQ ID NO: 186090 - protein, 719 aa, Zea Mays
MRSVNGEVEGTHDHEANRRGQLIEWMNALLPEFSLPPDSSDEELRELLSDGVVLCRVANTLIPGVLEGSWDGYAPSDQRLGNLNKFLSVIADMGLPGFSVKDLDEGSMSPVVECLLVLRDSVDPRLGDDIPPDVTRTPLRKQWGVPEMDKPQVHGAALGKRSPAEDKRNGVADPKAHQKTSVFSGQKFCDVFQLKHGSYSGPAAAKISEMMHSNSLDNAPTQSLISVVNGILDESIERKKGEIPHRVVYLLRKVVQEIERRLYIQAEHIRSQNVIMKRREQKYCSKIKVLEMLVNGTNEENQMAINRLQIVKNEKSKIEERRKLSEQDVHRLMREKEHSENIIANLKKDIEAMNRLHEQQLEQTERKAKEMEEQLTTKVKEVEYLLLQSKKKVEEVETASRLKSQLWDKKEDNFQSHMDNQQLIIKDIRILSRSCENDMYALQMQWRNEISNLGSGLKCLVDAAENYHKVLAENQKLFNEVQELKGNIRVYCRVRPFLSGQDKKSTTIDYMGENGELLISNPFKQGKDGHRLFKFNKVFSPFASQAEVFSDIQPLIRSVLDGFNVCIFAYGQTGSGKTYTMSGPSTSKQDWGVNYRALNDLFDISLSRRNAFSYEVGVQMVEIYNEQVRDLLSNDIAQRRLGIWSTSQPNGLVVPDASLHSVKSTSDVLDLMEIGQANRAVGSTALNERSSRSHRMDLPRGVVCILLILLVVRGWRSLK

SEQ ID NO: 186091 - protein, 513 aa, Zea Mays
MKRREQKYCSKIKVLEMLVNGTNEENQMAINRLQIVKNEKSKIEERRKLSEQDVHRLMREKEHSENIIANLKKDIEAMNRLHEQQLEQTERKAKEMEEQLTTKVKEVEYLLLQSKKKVEEVETASRLKSQLWDKKEDNFQSHMDNQQLIIKDIRILSRSCENDMYALQMQWRNEISNLGSGLKCLVDAAENYHKVLAENQKLFNEVQELKGNIRVYCRVRPFLSGQDKKSTTIDYMGENGELLISNPFKQGKDGHRLFKFNKVFSPFASQAEVFSDIQPLIRSVLDGFNVCIFAYGQTGSGKTYTMSGPSTSKQDWGVNYRALNDLFDISLSRRNAFSYEVGVQMVEIYNEQVRDLLSNDIAQRRLGIWSTSQPNGLVVPDASLHSVKSTSDVLDLMEIGQANRAVGSTALNERSSRSHSILTVHVRGLDLKNGSTSRGCLHLIDLAGSERVEKSEVTGDRLKEAQYINKSLSALGDVIFALSQKSIHVPYRNSKLTQVLQSSLGNQVFIYYQ

SEQ ID NO: 186092 - protein, 731 aa, Zea Mays
MKRREQKYCSKIKVLEMLVNGTNEENQMAINRLQIVKNEKSKIEERRKLSEQDVHRLMREKEHSENIIANLKKDIEAMNRLHEQQLEQTERKAKEMEEQLTTKVKEVEYLLLQSKKKVEEVETASRLKSQLWDKKEDNFQSHMDNQQLIIKDIRILSRSCENDMYALQMQWRNEISNLGSGLKCLVDAAENYHKVLAENQKLFNEVQELKGNIRVYCRVRPFLSGQDKKSTTIDYMGENGELLISNPFKQGKDGHRLFKFNKVFSPFASQAEVFSDIQPLIRSVLDGFNVCIFAYGQTGSGKTYTMSGPSTSKQDWGVNYRALNDLFDISLSRRNAFSYEVGVQMVEIYNEQVRDLLSNDIAQRRLGIWSTSQPNGLVVPDASLHSVKSTSDVLDLMEIGQANRAVGSTALNERSSRSHSILTVHVRGLDLKNGSTSRGCLHLIDLAGSERVEKSEVTGDRLKEAQYINKSLSALGDVIFALSQKSIHVPYRNSKLTQVLQSSLGGQAKTLMFVQINPDVESYSETISTLKFAERVSGVELGAARSNKEGKDIKELLEQVASLKDTISRKDMEIEQLQVIKDKAKSPNLLLDRNGPGLTKITVNQPSQLLSGERMLKSSDRVLSDPPDNRDSNHNLTDTAPVSLDEAEYDGNASDDGLSGEAENYNSAAEMTAERLHGIPSRISRFTLTKNGQPSMSRSKSKDAKTPSNAKAPSSQLTGGSSARGSKRWQK

SEQ ID NO: 186093 - protein, 444 aa, Zea Mays
MKRREQKYCSKIKVLEMLVNGTNEENQMAINRLQIVKNEKSKIEERRKLSEQDVHRLMREKEHSENIIANLKKDIEAMNRLHEQQLEQTERKAKEMEEQLTTKVKEVEYLLLQSKKKVEEVETASRLKSQLWDKKEDNFQSHMDNQQLIIKDIRILSRSCENDMYALQMQWRNEISNLGSGLKCLVDAAENYHKVLAENQKLFNEVQELKGNIRVYCRVRPFLSGQDKKSTTIDYMGENGELLISNPFKQGKDGHRLFKFNKVFSPFASQAEVFSDIQPLIRSVLDGFNVCIFAYGQTGSGKTYTMSGPSTSKQDWGVNYRALNDLFDISLSRRNAFSYEVGVQMVEIYNEQVRDLLSNDIAQRRLGIWSTSQPNGLVVPDASLHSVKSTSDVLDLMEIGQANRAVGSTALNERSSRSHRMDLPRGVVCILLILLVVRGWRSLK

SEQ ID NO: 186094 - protein, 681 aa, Zea Mays
MSPVVECLLVLRDSVDPRLGDDIPPDVTRTPLRKQWGVPEMDKPQVHGAALGKRSPAEDKRNGVADPKAHQKTSVFSGQKFCDVFQLKHGSYSGPAAAKISEMMHSNSLDNAPTQSLISVVNGILDESIERKKGEIPHRVVYLLRKVVQEIERRLYIQAEHIRSQNVIMKRREQKYCSKIKVLEMLVNGTNEENQMAINRLQIVKNEKSKIEERRKLSEQDVHRLMREKEHSENIIANLKKDIEAMNRLHEQQLEQTERKAKEMEEQLTTKVKEVEYLLLQSKKKVEEVETASRLKSQLWDKKEDNFQSHMDNQQLIIKDIRILSRSCENDMYALQMQWRNEISNLGSGLKCLVDAAENYHKVLAENQKLFNEVQELKGNIRVYCRVRPFLSGQDKKSTTIDYMGENGELLISNPFKQGKDGHRLFKFNKVFSPFASQAEVFSDIQPLIRSVLDGFNVCIFAYGQTGSGKTYTMSGPSTSKQDWGVNYRALNDLFDISLSRRNAFSYEVGVQMVEIYNEQVRDLLSNDIAQRRLGIWSTSQPNGLVVPDASLHSVKSTSDVLDLMEIGQANRAVGSTALNERSSRSHSILTVHVRGLDLKNGSTSRGCLHLIDLAGSERVEKSEVTGDRLKEAQYINKSLSALGDVIFALSQKSIHVPYRNSKLTQVLQSSLGNQVFIYYQ

SEQ ID NO: 186095 - protein, 528 aa, Zea Mays
MFEQLKSLSCRFSATMDMWTSNQNKGYMSITIHWIDDKWQMQKRIICLPHVKGHHNGELLASEFIKGVMSWNLEKRLFALTLDNAAANDKYVRLVVKELNKLARIQKYPPLVCGGVFFHVRCLCHILNLVAQDGLSVIASPLKNIRAIIVIVKNSTLQWEEFEKCAQFFDLNNKSGLPLDVPTRWNSTYDMLSHAMYYRSAFERLVYFHKDKYWHCTPSSDEWDMAESFCKCLKQLNDATVLFSGCQYPTTNLFWWKFCEIKLALREWCESANITIASMAEAMQKKYDKYWKKSNIALAVACFLDPRYKKKLVEYFMLKIYKDSAVAELTRFMDVVNQLFQSYLSSTRDVSITQTDLAASTSNSICINTDIDEFIYEDNDAAKGEINELDVYMKDKPIRWVDPTGKGLQFDILSWWKANQVTYPVLSRLARDVLAVQVSTVASECAFSSSGRVVSKYHSRLEPETVEALVCTKDWNLASNKDRNDKVPSIVEEFMADENEYSSTIEENQADNEGNGEDSEDEGSDMEL

SEQ ID NO: 186096 - protein, 530 aa, Zea Mays
MFEQLKSLSCRFSATMDMWTSNQNKGYMSITIHWIDDKWQMQKRIICLPHVKGHHNGELLASEFIKGVMSWNLEKRLFALTLDNAAANDKYVRLVVKELNKLARIQKYPPLVCGGVFFHVRCLCHILNLVAQDGLSVIASPLKNIRAIIVIVKNSTLQWEEFEKCAQFFDLNNKSGLPLDVPTRWNSTYDMLSHAMYYRSAFERLVYFHKDKYWHCTPSSDEWDMAESFCKCLKQLNDATVLFSGCQYPTTNLFWWKFCEIKLALREWCESANITIASMAEAMQKKYDKYWKKSNIALAVACFLDPRYKKKLVEYFMLKIYKDSAVAELTRFMDVVNQLFQSYLSSTRDVSITQTDLAASTSNSICINTDIDEFIYEDNDAAKGEINELDVYMKDKPIRWVDPTGKGLQFDILSWWKANQVTYPVLSRLARDVLAVQVSTVASECAFSSSGRVVSKYHSRLEPETVEALVCTKDWNLASNKDRNDKVPSIVEEFMADENEYSSTIEEGQNQADNEGNGEDSEDEGSDMEL

SEQ ID NO: 186097 - protein, 554 aa, Zea Mays
MHVLLCIVTGRYSSRLYIAYAPLVVLGTLLAALVPVVGFNAVMTSEHFASFLVFIILHVVALVYYIKGLLTPRLFKVAMTLVISVGLAVCFAVVAILVALVASSPTKGWSGRSLSLLDPTYASKYIPIIASVSEHQPPTWPSYFMDINVLAFLIPAGIISCFLPLSDASSFMVLYLVTAVYFSGVMVRLMLVLAPAACILSGIALSEVFSVLTRSIKLQLSKLFDDSPTSSGDSSPESSTNSTKNENRNEKHEIAPKEKTSKKNRKKEKEVAESVPVKPKKENRLLVLPFELSVMGILLLIVLGGFYVVHCVWAAAEAYSAPSIVLTSRSRDGLHVFDDFREAYAWLSHNTDVDDKVASWWDYGYQTTAMANRTVIVDNNTWNNTHIATVGTAMSSPEKAAWEIFNSLDVKYVLVVFGGLVGYPSDDINKFLWMVRIGGGVFPHIKEPDYLRDGQYRVDAQATPTMLNCLMYKLCYYRFVETDGKGFDRVRGYEIGKKHFKLTHFEEVFTTHHWMVRIYKLKPQKNRVRGKLKKLKASAKTSPTLAAGRKNPWQ

SEQ ID NO: 186098 - protein, 542 aa, Zea Mays
MVCSWGGYTFIINLIPMHVLLCIVTGRYSSRLYIAYAPLVVLGTLLAALVPVVGFNAVMTSEHFASFLVFIILHVVALVYYIKGLLTPRLFKVAMTLVISVGLAVCFAVVAILVALVASSPTKGWSGRSLSLLDPTYASKYIPIIASVSEHQPPTWPSYFMDINVLAFLIPAGIISCFLPLSDASSFMVLYLVTAVYFSGVMVRLMLVLAPAACILSGIALSEVFSVLTRSIKLQLSKLFDDSPTSSGDSSPESSTNSTKNENRNEKHEIAPKEKTSKKNRKKEKEVAESVPVKPKKENRLLVLPFELSVMGILLLIVLGGFYVVHCVWAAAEAYSAPSIVLTSRSRDGLHVFDDFREAYAWLSHNTDVDDKVASWWDYGYQTTAMANRTVIVDNNTWNNTHIATVGLVGYPSDDINKFLWMVRIGGGVFPHIKEPDYLRDGQYRVDAQATPTMLNCLMYKLCYYRFVETDGKGFDRVRGYEIGKKHFKLTHFEEVFTTHHWMVRIYKLKPQKNRVRGKLKKLKASAKTSPTLAAGRKNPWQ

SEQ ID NO: 186099 - protein, 866 aa, Zea Mays
MNPDNFTHKTNEAIVGAHEIAVEAGHAQLTPLHLAAVLAADKGGILRQAITGASGGDGAAGDSFERVLNNSLKKLPSQSPPPDSVPASTALIKVIRRAQSAQKKRGDSHLAVDQLLLGLLEDSQISDCLKEAGVSAARVRAELEKLRGGEGRRVESASGDTNFQALKTYGRDLVEQAGKLDPVIGRDEEIRRVVRILSRRTKNNPVLIGEPGVGKTAVVEGLAQRIVRGDVPSNLLDVRLIALDMGALVAGAKYRGEFEERLKAVLKEVEEAEGKVILFIDEIHLVLGAGRTEGSMDAANLFKPMLARGQLRCIGATTLEEYRKYVEKDAAFERRFQQVFVAEPSVPDTVSILRGLKEKYEGHHGVRIQDRALVVAAQLSARYIMGRHLPDKAIDLVDEACANVRVQLDSQPEEIDNLERKRIQLEVELHALEKEKDKASKARLIEVRKELDDLRDKLQPLTMKYRKEKERIDEIRKLKQRREELQFTLQEAERRMDLARVADLKYGALQEIDAAISKLESETGENLMLTETVGPEQIAEVVSRWTGIPVTRLGQNDKERLVGLADRLHQRVVGQTEAVSAVAEAVLRSRAGLGRPQQPTGSFLFLGPTGVGKTELAKALAEQLFDDENLLVRIDMSEYMEQHSVARLIGAPPGYVGHEEGGQLTEQVRRRPYSVILFDEVEKAHVAVFNTLLQVLDDGRLTDGQGRTVDFRNTVIIMTSNLGAEHLLAGMVGKNSMKVARDLVMQEVRRHFRPELLNRLDEIVIFDPLSHEQLRKVARLQMKDVAVRLAERGIALAVTDAALDIILSLSYDPVYGARPIRRWIEKRVVTQLSKMLIQEEIDENCTVYIDAAPAPPGATLRRPSRR

SEQ ID NO: 186100 - protein, 753 aa, Zea Mays
MNYRFQNLLGAPYRGGDAVFAGDSPVLLSAVGNRVASTDLTASSSLTLPFESSSNVTRLATSPSGDFLLAADDNGRALYANLRRRAVLHRVSFKGAPSAVRFSPDGQLIAVAVGKVVQIWRSPGFRREFFPFHLLRTFPGFAAGVTAFDWSPDSAFLLASCKDLTARLLPVKKGLGGKPFLFLGHRAAVVGAFFATDKKTRRVKGVYTVSKDGAIFTWDLVEGNEENDTSPPPSPGTPEQGSKQNVVDAMELDGGSRKRKILGELEGLDTMLHLAKWELREKHFFMQSPAKLTACDYHRELDMVVVGFSSGVFGLYQMPDFVCLHLLSISREKITTAIFNSSGSWLVFGCAKLGQLLVWEWRSESYILKQQGHYFDVNCIAYSPDSQILATGADDNKVKVWTVSSGFCFITFSEHTNAVTAVHFMANNHSLLSASLDGTIRAWDLFRYRNFRTFTTPSPRQFVSLTADQSGEVICAGTLDSFEIFVWSMKTGRLLDVLSGHEGPVHGLMFSPINAILASSSWDKTVRLWDVFESKGAVETFQHSHDVLTLAYRPDGRQIACSTLDGLIHFWDPSDGLLMYTIEGRRDIAGGRLMTDRRSAANTSIGKYFTTLCYSADGSSILAGGNTKYICMYDVGEQVLLRRFQITRNLSLDGVLDFLNSKKMTDGGALDLIDDEDSDVEEGIDRHTRGNLGLGLPGSMANRGRPMARTKCVKFAPTGRSFAAATTDGVLLYSVDESFIFDPTDLDIDVTPE

SEQ ID NO: 186101 - protein, 360 aa, Zea Mays
MAGRYYQGQGGGGGTSMEVVSTPNQELALTNCAYVCPADLRRFPNALAVVADSWVFTLREHNAVASGRIALNAIQRRQAKVSAGDSVTVSSFVPPDDFKLALLTLELEYAKARANRNDELDAVVLAQQLRKRFLDQVMTLGQRVPFEFHGTNYVFTVNQALLEGQESSTPLDRGFLSSDTYIIFEAAPNSGIKVINQKEAASSKLFKHKEFNLEKLGIGGLSAEFTDIFRRAFASRVFPPQVVSKLGIKHVKGILLYGPPGTGKTLMARQIGKLLNGKDPKIVNGPEVLSKFVGETEKNVRDLFADAENEQRTRGDQSDLHVIIFDEIDAICKSRGSTRDGTGVHDSIVNQLLTKMVLRR

SEQ ID NO: 186102 - protein, 475 aa, Zea Mays
MARQIGKLLNGKDPKIVNGPEVLSKFVGETEKNVRDLFADAENEQRTRGDQSDLHVIIFDEIDAICKSRGSTRDGTGVHDSIVNQLLTKIDGVEALNNVLLIGMTNRKDLLDEALLRPGRLEVHIEINLPDENGRFQILQIHTNKMKENSFLSPDINLLELAARTKNYSGAELEGVVKSAVSYALNRQITMDDLTKPLDEESIKVTMDDFVNALHEITPAFGASTDDLERCRLRGIVDCGKAHKHIYQRAMLLVEQVKVSKGSPLVTCLLEGPAGSGKTAMAASVGIDSDFAYVKIISAETMIGFSESSKCAQICKVFEDAYKSQFSIIVLDDIERLLEYVAIGPRFSNLISQTLLVLLKRVPPKGKNLLVIGTTSEVGFLESVGMCDVFSVTYHVPKLKKEDAKKVLHHLDVFDDGDLDAAAEALDDMPIKKLYTLVEMAAQGPTGGSAEAIYAGEDKIDINHFFSILSDIIRY

SEQ ID NO: 186103 - protein, 285 aa, Zea Mays
MDDLTKPLDEESIKVTMDDFVNALHEITPAFGASTDDLERCRLRGIVDCGKAHKHIYQRAMLLVEQVKVSKGSPLVTCLLEGPAGSGKTAMAASVGIDSDFAYVKIISAETMIGFSESSKCAQICKVFEDAYKSQFSIIVLDDIERLLEYVAIGPRFSNLISQTLLVLLKRVPPKGKNLLVIGTTSEVGFLESVGMCDVFSVTYHVPKLKKEDAKKVLHHLDVFDDGDLDAAAEALDDMPIKKLYTLVEMAAQGPTGGSAEAIYAGEDKIDINHFFSILSDIIRY

SEQ ID NO: 186104 - protein, 54 aa, Zea Mays
MFSWNEVDAGAQWLVKNEEFSCRSQYQSIWFFSLMPSILPSPFSCFVGRRIALL

SEQ ID NO: 186105 - protein, 401 aa, Zea Mays
MGSRVKEDERNEKIIRGLLKLPGNRRCINCNSLGPQYVCTSFSTFICTNCSGIHREFSHRVKSVSMAKFTSQEVSALQEGGNERAKEIYFKHWDLQGPVIDSSDVHRLRNFIKNVYVERRYSDQRIGEHLAQAKKPSSSRTDDPSPATFKDAKLYMSKNLIDFDSDLEPPQGVAQTDIQKGSSPQTDIADLTSAPQIRFSNAKSLSFAPSNRGNQLNQQNFSPVNTTQYSNTLLNRATSAPVHSQDIFAMSYRPVSSAWNWQPNPSVNMQYGQHRTHYPVGIVNTTQLAHPYPVNPVSLAGGPASAHASTRFPSLTSMQEALPNLGSTAVLSRAPVHQYMVQQHTVQVPNYTFPSGYEGTRGIAATASTYGLPPMDQRLAAQNLQVMNHGSLPRVGGNPFA

SEQ ID NO: 186106 - protein, 329 aa, Zea Mays
MGSRVKEDERNEKIIRGLLKLPGNRRCINCNSLGPQYVCTSFSTFICTNCSGIHREFSHRVKSVSMAKFTSQEVSALQEGGNERAKEIYFKHWDLQGPVIDSSDVHRLRNFIKNVYVERRYSDQRIGEHLAQAKKPSSSRTDDPSPATFKDAKLYMSKNLIDFDSDLEPPQGVAQTDIQKGSSPQTDVGWATFDDATSKKTTTMPSTSSTNFLEGPMLQIADLTSAPQIRFSNAKSLSFAPSNRGNQLNQQNFSPVNTTQYSNTLLNRATSAPVHSQVSVVLLLEDTSFSDDKYFKLVPLRAFFIYGELHRLRQLHNGEVFFLLIRGQI

SEQ ID NO: 186107 - protein, 445 aa, Zea Mays
MGSRVKEDERNEKIIRGLLKLPGNRRCINCNSLGPQYVCTSFSTFICTNCSGIHREFSHRVKSVSMAKFTSQEVSALQEGGNERAKEIYFKHWDLQGPVIDSSDVHRLRNFIKNVYVERRYSDQRIGEHLAQAKKPSSSRTDDPSPATFKDAKLYMSKNLIDFDSDLEPPQGVAQTDIQKGSSPQTDVGWATFDDATSKKTTTMPSTSSTNFLEGPMLQIADLTSAPQIRFSNAKSLSFAPSNRGNQLNQQNFSPVNTTQYSNTLLNRATSAPVHSQDIFAMSYRPVSSAWNWQPNPSVNMQYGQHRTHYPVGIVNTTQLAHPYPVNPVSLAGGPASAHASTRFPSLTSMQEALPNLGSTAVLSRAPVHQYMVQQHTVQVPNYTFPSGYEGTRGIAATASTYGLPPMDQRLAAQNLQVSIAPSPSSLPVPAATATSAVPVVPPVE

SEQ ID NO: 186108 - protein, 203 aa, Zea Mays
MPGSKSVLIWERLRNWLRTAKSLYSSSDETEEFCLDSMEEEIAALENEFSGECERVGFCHNDLQYGNIMIDEETRLLTIIDYEYAGFNPVAYDIANHFCEMAADYHSEKPHILDYSKYPDTDERKQFVRTYLSSSGEESEEEVENLIKSIEKYTLASHLVWGLWGIISDHVNDIDFDYKDYARQRFEQYWLKKPTILASQTAE

SEQ ID NO: 186109 - protein, 355 aa, Zea Mays
MLVKSGKSEQEAQLALKGTFAKDKNELLAKQFQINYDDELAMFRKGSSVYREKVETTVKIDDYGEPIKRPRLKVTVAHVDTIGTAFWENHPHILREGKFMHGFVKKFGINHIFSPCNWIIVRIIACQFDQFSTIHSFDKPNDETALRLMNESASLMMEQYPDIVFGYGFSNEYSFVFHEKSELYQRRESLILSSCSSYFTSLYMTKWKEFFPYTELMQTPHFEADALCYPKLKIICEYLSWRQAECHAGNQYNTCFWMLVKSGKSEKEAHEILKGTLSKDKNELLFQQFQMNYNNEPAMFRKGSCVYRRKVEELAGAEDGGNGTSRERWHVKVDHVDLGPGFWRKHPWLMTNCTQ

SEQ ID NO: 186110 - protein, 361 aa, Zea Mays
MPPPSLVSILPAASISPRRRQAKHPKTPTASHPFFSRRLVSQPPRHASISPSAAGGSGSDELHLLEKPLPAVAEDNEAEEELESAPVSSTEEALAPFLKFFQVKSTDPDVGADTADGEVPEEASRRDIKQLNVPIKIKIYEWNASGLLSRIEGLRAFLPKPEMMTRPRNFTDLKNKVDQEMHVCITRIDEETNELIISEKEAWAVTCLREGTLLQGTVRKLFPYGAQIRIGETNRGGLLHISNMTHGKLRSVADVLKVGETVKALVIKSTPDRIALSTKDLESEPGLLITNKEKVFSEAEEMARRYREQIAEPQPPGSIAAEDSCDDAVPFNDESRSYANWKWLKFSKSDDVANPKSGVES

SEQ ID NO: 186111 - protein, 151 aa, Zea Mays
MHPMSPFPCHFNICHHSPVMLEFPFCGLLHISNMTHGKLRSVADVLKVGETVKALVIKSTPDRIALSTKDLESEPGLLITNKEKVFSEAEEMARRYREQIAEPQPPGSIAAEDSCDDAVPFNDESRSYANWKWLKFSKSDDVANPKSGVES

SEQ ID NO: 186112 - protein, 547 aa, Zea Mays
MGKSPAKWIKSVLFGKRSSSRSGSTKAKDLSKGTTNKAAAAAAAAAGKEPAFSESSPVISEPVLVSAHNNETAREAAKGENSSVQEVPVTDVSQDLEKQGTVGSDTSNDAERLREEQAAVKAQAAFRGYLARRAFRALKGIIRLQALIRGHLVRRQAVSTLRATWLIVKFQALVRGRNVRLSNVSIQATTELSQQNFGGSKPGSWKEKLSSNAFARKLLSSPIVVEALHVQYDEMDPNSAFNWLERWTVSHVWKPISQPKRVGTDAKPHTRKASYAMETESAKLKRNARKSPAVPFEPSQTNTTIENEKTRRNPRKLSSTPAESVPDGQLTELEKVKRSLRKVTSSTVETSKVPSPTTEIPDRQEVQCERPLRSAKQAPIHVENQEPQNVNLSENAKMDILVPDIQPDVEVASDLVTITNEEKVDETPSVVAPAAEIMPLQDINSEENALVNDVEERSKEEHSSTDNLKGSKRRSSFSAKPEYPENGSKNSPALPSYMAATQSAKAKLRGNSSPRLSSDSAEKNGFTRRHSLPSPNNERPLKAEWRR

SEQ ID NO: 186113 - protein, 577 aa, Zea Mays
MGKSPAKWIKSVLFGKRSSSRSGSTKAKDLSKGTTNKAAAAAAAAAGKEPAFSESSPVISEPVLVSAHNNETAREAAKGENSSVQEVPVTDVSQDLEKQGTVGSDTSNDAERLREEQAAVKAQAAFRGYLARRAFRALKGIIRLQALIRGHLVRRQAVSTLRATWLIVKFQALVRGRNVRLSNVSIQATTELSQQNFGGSKPGSWKEKLSSNAFARKLLSSPIVVEALHVQYDEMDPNSAFNWLERWTVSHVWKPISQPKRVGTDAKPHTRKASYAMETESAKLKRNARKSPAVPFEPSQTNTTIENEKTRRNPRKLSSTPAESVPDGQLTELEKVKRSLRKVTSSTVETSKVPSPTTEIPDRQEVQCERPLRSAKQAPIHVENQEPQNVNLSENAKMDILVPDIQPDVEVASDLVTITNEEKVDETPSVVAPAAEIMPLQDINSEENALVNDVEERSKEEHSSTDNLKGSKRRSSFSAKPEYPENGSKNSPALPSYMAATQSAKAKLRGNSSPRLSSDSAEKNGFTRRHSLPSPNNGKIISHSPRTQRPTHAGGKDGAKGDKAMLSSRDASGIKTW

SEQ ID NO: 186114 - protein, 281 aa, Zea Mays
MAAAGPGLYSEIGKKARDLLYKDYHTDQKFTLTTYAANGAAITAASTRKDEAIFNEIQSQLKHNNVTVDVKATSESNVITTITVHELGTPGLKAILCVPFPYQKSAKAELQYLHHHAGVAASVGLNANPVVNLSGVFGTKAIAVGADAAFDTSSGDLTKYNAGLSYTTPDFVAAATLNNKGDNIAASYYHSVSPTTAVGGELSHSFSTNGNTITFGTQHALDPLTTVKARFNNYGMASALIQHEWRPKSLVTISTEVDTKAIEKSSKSRSSLICQIRHRTN

SEQ ID NO: 186115 - protein, 1229 aa, Zea Mays
MTRLSYLHEPGVLNNLAVRYAKNIIYTYTGNILIAINPFQSLPHLSEPRTMEKYKGANFGELDPHVFAIADVSYRQMMNEGKSNSILVSGESGAGKTETTKMLMRYLAFLGGRSKTGGRTVEQQVLESNPVLEAFGNAKTVRNNNSSRFGKFVEIQFDKSGKISGAAIRTYLLERSRVCQINSPERNYHCFYFLCAAPLEDIKSYKLGDPSSFHYLNQSTCIKLDEISDAKEYLATRSAMNTVGITEQEQEAIFRVVAAVLHLGNISFVKGREADSSVIKDEKARFHLNATAELLMCDCGNLENALIKRKINTPEGVITTTVDPNSATVSRDGLAKQIYSQLFDWLVNRLNASIGHDTSSDRLIGVLDIYGFESFKTNSFEQLCINFTNEKLQQHFNQNVFKMEQEEYNREQIDWSYIEFVDNQDVLDLIEKKPGGIIALLDEACMFPKCTHESFSQKLYEKFRNNKRFCKPKLSRTAFTIQHYAGEVTYQSDQFLDKNRDYVVVEHQELLNASKCSFVSGLFPSVLENTKASKSSIATRFKWQLQELMETLSSTEPHYIRCIKPNNHLKPATFENINVLQQLRCSGVLEAIRISCAGYPTRKIFHDFLCRFCILAPEVFTERNNEKLICQKILDNIGLHGYQIGRTKVFLRAGQMAELDARRTEVRNKAAITVQSRFRTHVAREQFLALRMTSISFQSFVRVILACKLHVFLRKQAAVLHIQKSYRCYFAWKTYSELCSSAITLQTGLRAFGAYNEYIIRKQNKASICVQACWRCHRDHLNYLKMKRSVLIYQCAWRRRIAREELRKLKMAARDTEALKVEKEKLEEHVEELTSRLSFEKNLRIDLEKSKAREICKLQATLREMEQRVEEAIEMHERELAKKAIEEALAQEREKITVLTNEVDELKVLLSREREENSATKSALVVVREENDVLNKKIVVADASMEQLRDTVTRVEELMRQIANAKGKSTELQIAVQRLQESLIEGEATLLAERKESDAAKKSLTEAHVKNEELFNKIEVAEHNVSIFQDDIQRLEETAATLETSLLSEKQQSTAIISQLTEAQQDIQVLQKKFADANKTIELLQDSLKRCEDSTTTRDALYVAERQEHGQTKQALSKAQERNLELLRKVDDSEKTLNKMLENAQRLEKHATARESLLLKTKQNLDCTTKALTEARGRNRDLLTSFEDSAKKINMLEDSLNRERLFVGSRKKTKQNDQRRTGQCPENNR

SEQ ID NO: 186116 - protein, 1995 aa, Zea Mays
MTRLSYLHEPGVLNNLAVRYAKNIIYTYTGNILIAINPFQSLPHLSEPRTMEKYKGANFGELDPHVFAIADVSYRQMMNEGKSNSILVSGESGAGKTETTKMLMRYLAFLGGRSKTGGRTVEQQVLESNPVLEAFGNAKTVRNNNSSRFGKFVEIQFDKSGKISGAAIRTYLLERSRVCQINSPERNYHCFYFLCAAPLEDIKSYKLGDPSSFHYLNQSTCIKLDEISDAKEYLATRSAMNTVGITEQEQEAIFRVVAAVLHLGNISFVKGREADSSVIKDEKARFHLNATAELLMCDCGNLENALIKRKINTPEGVITTTVDPNSATVSRDGLAKQIYSQLFDWLVNRLNASIGHDTSSDRLIGVLDIYGFESFKTNSFEQLCINFTNEKLQQHFNQNVFKMEQEEYNREQIDWSYIEFVDNQDVLDLIEKKPGGIIALLDEACMFPKCTHESFSQKLYEKFRNNKRFCKPKLSRTAFTIQHYAGEVTYQSDQFLDKNRDYVVVEHQELLNASKCSFVSGLFPSVLENTKASKSSIATRFKWQLQELMETLSSTEPHYIRCIKPNNHLKPATFENINVLQQLRCSGVLEAIRISCAGYPTRKIFHDFLCRFCILAPEVFTERNNEKLICQKILDNIGLHGYQIGRTKVFLRAGQMAELDARRTEVRNKAAITVQSRFRTHVAREQFLALRMTSISFQSFVRVILASITLQTGLRAFGAYNEYIIRKQNKASICVQACWRCHRDHLNYLKMKRSVLIYQCAWRRRIAREELRKLKMAARDTEALKVEKEKLEEHVEELTSRLSFEKNLRIDLEKSKAREICKLQATLREMEQRVEEAIEMHERELAKKAIEEALAQEREKITVLTNEVDELKVLLSREREENSATKSALVVVREENDVLNKKIVVADASMEQLRDTVTRLQESLIEGEATLLAERKESDAAKKSLTEAHVKNEELFNKIEVAEHNVSIFQDDIQRLEETAATLETSLLSEKQQSTAIISQLTEAQQDIQVLQKKFADANKTIELLQDSLKRCEDSTTTRDALYVAERQEHGQTKQALSKAQERNLELLRKVDDSEKTLNKMLENAQRLEKHATARESLLLKTKQNLDCTTKALTEARGRNRDLLTSFEDSAKKINMLEDSLNRLEECTAEKDSLLAVERKQNKTTKEELANAQKTIDELVHESQQSQEIRNQLEDTIKRFKAESTARDTILLSEKQAHETTKKVLTEIQSRNEELIKKIQDCDKNILELQLTVERLQENTSTTEALLLREREQNNATMKAQAETQEINLQLLNKLEDVETKIGLLQGSVQRLGDNTAKDTLLLSEKREKDALKEALTESEYKNEELLIKTEEANKKVEHLQNTINSLKENMAASLEAERQENEAIKRSLVEAQERNDALFKKVRDSEYRAHQLQDTVQKLQVDAISRLSSFVMERQDGDGVKNAHTEVHGTNEDLMRRNENLLKRNDDLVKKIEDSAILVTELRGNLERLEGKAANLEAENQLLRQQAIATPPSTAKSSQAACSKISMIHRCQESGHILNGNVAYAEMKSSTGQTEMRPSMGSSLDLINHKVYENGQSLFNDVYQHQQPQNHQQLLLKYITQYLGFSGRKPIAASLIYYCLLHWRSFEEAKTTVFDSIIQIVNSATEAQHDTRSLAYWLSNLSTLSVLLQRSFKATRATASTPHRRRISCERIFQANQTSSSGLACLSAQSVDGGTVFHQIEARYPASLFKQQLVDQVEKVYGVISDKIKKELNPLLELCIQDPRTYSNQAKALMSPSSGLGQQDQLMHWLSIVKIFNSYLHVLRANHVPSILVHKLLTQIFSVVNVQLFNRLLLRRECCSFSNGQYIKDGLTQLRYWCNDVSQEFADSAWVALRHIRQAVDFVVISLKPIRTWEEICNDICPALSLQQLERIVGMYWDDLKGTNVTSAEFMSSMRAMLREESNSVSSFSVLLDDDSSIPFSLEDISKSMPNIEETSVNDLLPFIRENQSFAFLL

SEQ ID NO: 186117 - protein, 1458 aa, Zea Mays
MAATLKIVVGSHIWLEDKDLVWIDGEVFRTEGQNVHVHTTNGKTVTVSISDIHPKDTEVPSDGIDDMTRLSYLHEPGVLNNLAVRYAKNIIYTYTGNILIAINPFQSLPHLSEPRTMEKYKGANFGELDPHVFAIADVSYRQMMNEGKSNSILVSGESGAGKTETTKMLMRYLAFLGGRSKTGGRTVEQQVLESNPVLEAFGNAKTVRNNNSSRFGKFVEIQFDKSGKISGAAIRTYLLERSRVCQINSPERNYHCFYFLCAAPLEDIKSYKLGDPSSFHYLNQSTCIKLDEISDAKEYLATRSAMNTVGITEQEQEAIFRVVAAVLHLGNISFVKGREADSSVIKDEKARFHLNATAELLMCDCGNLENALIKRKINTPEGVITTTVDPNSATVSRDGLAKQIYSQLFDWLVNRLNASIGHDTSSDRLIGVLDIYGFESFKTNSFEQLCINFTNEKLQQHFNQNVFKMEQEEYNREQIDWSYIEFVDNQDVLDLIEKKPGGIIALLDEACMFPKCTHESFSQKLYEKFRNNKRFCKPKLSRTAFTIQHYAGEVTYQSDQFLDKNRDYVVVEHQELLNASKCSFVSGLFPSVLENTKASKSSIATRFKWQLQELMETLSSTEPHYIRCIKPNNHLKPATFENINVLQQLRCSGVLEAIRISCAGYPTRKIFHDFLCRFCILAPEVFTERNNEKLICQKILDNIGLHGYQIGRTKVFLRAGQMAELDARRTEVRNKAAITVQSRFRTHVAREQFLALRMTSISFQSFVRVILACKLHVFLRKQAAVLHIQKSYRCYFAWKTYSELCSSAITLQTGLRAFGAYNEYIIRKQNKASICVQACWRCHRDHLNYLKMKRSVLIYQCAWRRRIAREELRKLKMAARDTEALKVEKEKLEEHVEELTSRLSFEKNLRIDLEKSKAREICKLQATLREMEQRVEEAIEMHERELAKKAIEEALAQEREKITVLTNEVDELKVLLSREREENSATKSALVVVREENDVLNKKIVVADASMEQLRDTVTRLQESLIEGEATLLAERKESDAAKKSLTEAHVKNEELFNKIEVAEHNVSIFQDDIQRLEETAATLETSLLSEKQQSTAIISQLTEAQQDIQVLQKKFADANKTIELLQDSLKRCEDSTTTRDALYVAERQEHGQTKQALSKAQERNLELLRKVDDSEKTLNKMLENAQRLEKHATARESLLLKTKQNLDCTTKALTEARGRNRDLLTSFEDSAKKINMLEDSLNRLEECTAEKDSLLAVERKQNKTTKEELANAQKTIDELVHESQQSQEIRNQLEDTIKRFKAESTARDTILLSEKQAHETTKKVLTEIQSRNEELIKKIQDCDKNILELQLTVERLQENTSTTEALLLREREQNNATMKAQAETQEINLQLLNKLEDVETKIGLLQGSVQRLGDNTAKDTLLLSEKREKDALKEALTESEYKNEELLIKTEEANKKA

SEQ ID NO: 186118 - protein, 1271 aa, Zea Mays
MAATLKIVVGSHIWLEDKDLVWIDGEVFRTEGQNVHVHTTNGKTVTVSISDIHPKDTEVPSDGIDDMTRLSYLHEPGVLNNLAVRYAKNIIYTYTGNILIAINPFQSLPHLSEPRTMEKYKGANFGELDPHVFAIADVSYRQMMNEGKSNSILVSGESGAGKTETTKMLMRYLAFLGGRSKTGGRTVEQQVLESNPVLEAFGNAKTVRNNNSSRFGKFVEIQFDKSGKISGAAIRTYLLERSRVCQINSPERNYHCFYFLCAAPLEDIKSYKLGDPSSFHYLNQSTCIKLDEISDAKEYLATRSAMNTVGITEQEQEAIFRVVAAVLHLGNISFVKGREADSSVIKDEKARFHLNATAELLMCDCGNLENALIKRKINTPEGVITTTVDPNSATVSRDGLAKQIYSQLFDWLVNRLNASIGHDTSSDRLIGVLDIYGFESFKTNSFEQLCINFTNEKLQQHFNQNVFKMEQEEYNREQIDWSYIEFVDNQDVLDLIEKKPGGIIALLDEACMFPKCTHESFSQKLYEKFRNNKRFCKPKLSRTAFTIQHYAGEVTYQSDQFLDKNRDYVVVEHQELLNASKCSFVSGLFPSVLENTKASKSSIATRFKWQLQELMETLSSTEPHYIRCIKPNNHLKPATFENINVLQQLRCSGVLEAIRISCAGYPTRKIFHDFLCRFCILAPEVFTERNNEKLICQKILDNIGLHGYQIGRTKVFLRAGQMAELDARRTEVRNKAAITVQSRFRTHVAREQFLALRMTSISFQSFVRVILACKLHVFLRKQAAVLHIQKSYRCYFAWKTYSELCSSAITLQTGLRAFGAYNEYIIRKQNKASICVQACWRCHRDHLNYLKMKRSVLIYQCAWRRRIAREELRKLKMAARDTEALKVEKEKLEEHVEELTSRLSFEKNLRIDLEKSKAREICKLQATLREMEQRVEEAIEMHERELAKKAIEEALAQEREKITVLTNEVDELKVLLSREREENSATKSALVVVREENDVLNKKIVVADASMEQLRDTVTRLQESLIEGEATLLAERKESDAAKKSLTEAHVKNEELFNKIEVAEHNVSIFQDDIQRLEETAATLETSLLSEKQQSTAIISQLTEAQQDIQVLQKKFADANKTIELLQDSLKRCEDSTTTRDALYVAERQEHGQTKQALSKAQERNLELLRKVDDSEKTLNKMLENAQRLEKHATARESLLLKTKQNLDCTTKALTEARGRNRDLLTSFEDSAKKINMLEDSLNRERLFVGSRKKTKQNDQRRTGQCPENNR

SEQ ID NO: 186119 - protein, 1643 aa, Zea Mays
MAATLKIVVGSHIWLEDKDLVWIDGEVFRTEGQNVHVHTTNGKTVTVSISDIHPKDTEVPSDGIDDMTRLSYLHEPGVLNNLAVRYAKNIIYTYTGNILIAINPFQSLPHLSEPRTMEKYKGANFGELDPHVFAIADVSYRQMMNEGKSNSILVSGESGAGKTETTKMLMRYLAFLGGRSKTGGRTVEQQVLESNPVLEAFGNAKTVRNNNSSRFGKFVEIQFDKSGKISGAAIRTYLLERSRVCQINSPERNYHCFYFLCAAPLEDIKSYKLGDPSSFHYLNQSTCIKLDEISDAKEYLATRSAMNTVGITEQEQEAIFRVVAAVLHLGNISFVKGREADSSVIKDEKARFHLNATAELLMCDCGNLENALIKRKINTPEGVITTTVDPNSATVSRDGLAKQIYSQLFDWLVNRLNASIGHDTSSDRLIGVLDIYGFESFKTNSFEQLCINFTNEKLQQHFNQNVFKMEQEEYNREQIDWSYIEFVDNQDVLDLIEKKPGGIIALLDEACMFPKCTHESFSQKLYEKFRNNKRFCKPKLSRTAFTIQHYAGEVTYQSDQFLDKNRDYVVVEHQELLNASKCSFVSGLFPSVLENTKASKSSIATRFKWQLQELMETLSSTEPHYIRCIKPNNHLKPATFENINVLQQLRCSGVLEAIRISCAGYPTRKIFHDFLCRFCILAPEVFTERNNEKLICQKILDNIGLHGYQIGRTKVFLRAGQMAELDARRTEVRNKAAITVQSRFRTHVAREQFLALRMTSISFQSFVRVILACKLHVFLRKQAAVLHIQKSYRCYFAWKTYSELCSSAITLQTGLRAFGAYNEYIIRKQNKASICVQACWRCHRDHLNYLKMKRSVLIYQCAWRRRIAREELRKLKMAARDTEALKVEKEKLEEHVEELTSRLSFEKNLRIDLEKSKAREICKLQATLREMEQRVEEAIEMHERELAKKAIEEALAQEREKITVLTNEVDELKVLLSREREENSATKSALVVVREENDVLNKKIVVADASMEQLRDTVTRLQESLIEGEATLLAERKESDAAKKSLTEAHVKNEELFNKIEVAEHNVSIFQDDIQRLEETAATLETSLLSEKQQSTAIISQLTEAQQDIQVLQKKFADANKTIELLQDSLKRCEDSTTTRDALYVAERQEHGQTKQALSKAQERNLELLRKVDDSEKTLNKMLENAQRLEKHATARESLLLKTKQNLDCTTKALTEARGRNRDLLTSFEDSAKKINMLEDSLNRLEECTAEKDSLLAVERKQNKTTKEELANAQKTIDELVHESQQSQEIRNQLEDTIKRFKAESTARDTILLSEKQAHETTKKVLTEIQSRNEELIKKIQDCDKNILELQLTVERLQENTSTTEALLLREREQNNATMKAQAETQEINLQLLNKLEDVETKIGLLQGSVQRLGDNTAKDTLLLSEKREKDALKEALTESEYKNEELLIKTEEANKKVEHLQNTINSLKENMAASLEAERQENEAIKRSLVEAQERNDALFKKVRDSEYRAHQLQDTVQKLQVDAISRLSSFVMERQDGDGVKNAHTEVHGTNEDLMRRNENLLKRNDDLVKKIEDSAILVTELRGNLERLEGKAANLEAENQLLRQQAIATPPSTAKSSQAACSKIKMSRKWSYFKWQRSIC

SEQ ID NO: 186120 - protein, 1165 aa, Zea Mays
MAATLKIVVGSHIWLEDKDLVWIDGEVFRTEGQNVHVHTTNGKTVTVSISDIHPKDTEVPSDGIDDMTRLSYLHEPGVLNNLAVRYAKNIIYTYTGNILIAINPFQSLPHLSEPRTMEKYKGANFGELDPHVFAIADVSYRQMMNEGKSNSILVSGESGAGKTETTKMLMRYLAFLGGRSKTGGRTVEQQVLESNPVLEAFGNAKTVRNNNSSRFGKFVEIQFDKSGKISGAAIRTYLLERSRVCQINSPERNYHCFYFLCAAPLEDIKSYKLGDPSSFHYLNQSTCIKLDEISDAKEYLATRSAMNTVGITEQEQEAIFRVVAAVLHLGNISFVKGREADSSVIKDEKARFHLNATAELLMCDCGNLENALIKRKINTPEGVITTTVDPNSATVSRDGLAKQIYSQLFDWLVNRLNASIGHDTSSDRLIGVLDIYGFESFKTNSFEQLCINFTNEKLQQHFNQNVFKMEQEEYNREQIDWSYIEFVDNQDVLDLIEKKPGGIIALLDEACMFPKCTHESFSQKLYEKFRNNKRFCKPKLSRTAFTIQHYAGEVTYQSDQFLDKNRDYVVVEHQELLNASKCSFVSGLFPSVLENTKASKSSIATRFKWQLQELMETLSSTEPHYIRCIKPNNHLKPATFENINVLQQLRCSGVLEAIRISCAGYPTRKIFHDFLCRFCILAPEVFTERNNEKLICQKILDNIGLHGYQIGRTKVFLRAGQMAELDARRTEVRNKAAITVQSRFRTHVAREQFLALRMTSISFQSFVRVILACKLHVFLRKQAAVLHIQKSYRCYFAWKTYSELCSSAITLQTGLRAFGAYNEYIIRKQNKASICVQACWRCHRDHLNYLKMKRSVLIYQCAWRRRIAREELRKLKMAARDTEALKVEKEKLEEHVEELTSRLSFEKNLRIDLEKSKAREICKLQATLREMEQRVEEAIEMHERELAKKAIEEALAQEREKITVLTNEVDELKVLLSREREENSATKSALVVVREENDVLNKKIVVADASMEQLRDTVTRVEELMRQIANAKGKSTELQIAVQRLQESLIEGEATLLAERKESDAAKKSLTEAHVKNEELFNKIEVAEHNVSIFQDDIQRLEETAATLETSLLSEKQQSTAIISQLTEAQQDIQVLQKKFADANKTIELLQDSLKRLSFHVTLIT

SEQ ID NO: 186121 - protein, 1324 aa, Zea Mays
MFLTGNRQMMNEGKSNSILVSGESGAGKTETTKMLMRYLAFLGGRSKTGGRTVEQQVLESNPVLEAFGNAKTVRNNNSSRFGKFVEIQFDKSGKISGAAIRTYLLERSRVCQINSPERNYHCFYFLCAAPLEDIKSYKLGDPSSFHYLNQSTCIKLDEISDAKEYLATRSAMNTVGITEQEQEAIFRVVAAVLHLGNISFVKGREADSSVIKDEKARFHLNATAELLMCDCGNLENALIKRKINTPEGVITTTVDPNSATVSRDGLAKQIYSQLFDWLVNRLNASIGHDTSSDRLIGVLDIYGFESFKTNSFEQLCINFTNEKLQQHFNQNVFKMEQEEYNREQIDWSYIEFVDNQDVLDLIEKKPGGIIALLDEACMFPKCTHESFSQKLYEKFRNNKRFCKPKLSRTAFTIQHYAGEVTYQSDQFLDKNRDYVVVEHQELLNASKCSFVSGLFPSVLENTKASKSSIATRFKWQLQELMETLSSTEPHYIRCIKPNNHLKPATFENINVLQQLRCSGVLEAIRISCAGYPTRKIFHDFLCRFCILAPEVFTERNNEKLICQKILDNIGLHGYQIGRTKVFLRAGQMAELDARRTEVRNKAAITVQSRFRTHVAREQFLALRMTSISFQSFVRVILACKLHVFLRKQAAVLHIQKSYRCYFAWKTYSELCSSAITLQTGLRAFGAYNEYIIRKQNKASICVQACWRCHRDHLNYLKMKRSVLIYQCAWRRRIAREELRKLKMAARDTEALKVEKEKLEEHVEELTSRLSFEKNLRIDLEKSKAREICKLQATLREMEQRVEEAIEMHERELAKKAIEEALAQEREKITVLTNEVDELKVLLSREREENSATKSALVVVREENDVLNKKIVVADASMEQLRDTVTRLQESLIEGEATLLAERKESDAAKKSLTEAHVKNEELFNKIEVAEHNVSIFQDDIQRLEETAATLETSLLSEKQQSTAIISQLTEAQQDIQVLQKKFADANKTIELLQDSLKRCEDSTTTRDALYVAERQEHGQTKQALSKAQERNLELLRKVDDSEKTLNKMLENAQRLEKHATARESLLLKTKQNLDCTTKALTEARGRNRDLLTSFEDSAKKINMLEDSLNRLEECTAEKDSLLAVERKQNKTTKEELANAQKTIDELVHESQQSQEIRNQLEDTIKRFKAESTARDTILLSEKQAHETTKKVLTEIQSRNEELIKKIQDCDKNILELQLTVERLQENTSTTEALLLREREQNNATMKAQAETQEINLQLLNKLEDVETKIGLLQGSVQRLGDNTAKDTLLLSEKREKDALKEALTESEYKNEELLIKTEEANKKA

SEQ ID NO: 186122 - protein, 1192 aa, Zea Mays
MCDCGNLENALIKRKINTPEGVITTTVDPNSATVSRDGLAKQIYSQLFDWLVNRLNASIGHDTSSDRLIGVLDIYGFESFKTNSFEQLCINFTNEKLQQHFNQEEYNREQIDWSYIEFVDNQDVLDLIEKKPGGIIALLDEACMFPKCTHESFSQKLYEKFRNNKRFCKPKLSRTAFTIQHYAGEVTYQSDQFLDKNRDYVVVEHQELLNASKCSFVSGLFPSVLENTKASKSSIATRFKIGRTKVFLRAGQMAELDARRTEVRNKAAITVQSRFRTHVAREQFLALRMTSISFQSFVRGKVLLVGIASGNNAHVRWNYILRVPLYIAVILASITLQTGLRAFGAYNEYIIRKQNKASICVQACWRCHRDHLNYLKMKRSVLIYQCAWRRRIAREELRKLKMAARDTEALKVEKEKLEEHVEELTSRLSFEKNLRIDLEKSKAREICKLQATLREMEQRVEEAIEMHERELAKKAIEEALAQEREKITVLTNEVDELKVLLSREREENSATKSALVVVREENDVLNKKIVVADASMEQLRDTVTRVEELMRQIANAKGKSTELQIAVQRLQESLIEGEATLLAERKESDAAKKSLTEAHVKNEELFNKIEVAEHNVSIFQDDIQRLEETAATLETSLLSEKQQSTAIISQLTEAQQDIQVLQKKFADANKTIELLQDSLKRCEDSTTTRDALYVAERQEHGQTKQALSKAQERNLELLRKVDDSEKTLNKMLENAQRLEKHATARESLLLKTKQNLDCTTKALTEARGRNRDLLTSFEDSAKKINMLEDSLNRLEECTAEKDSLLAVERKQNKTTKEELANAQKTIDELVHESQQSQEIRNQLEDTIKRFKAESTARDTILLSEKQAHETTKKVLTEIQSRNEELIKKIQDCDKNILELQLTVERLQENTSTTEALLLREREQNNATMKAQAETQEINLQLLNKLEDVETKIGLLQGSVQRLGDNTAKDTLLLSEKREKDALKEALTESEYKNEELLIKTEEANKKVEHLQNTINSLKENMAASLEAERQENEAIKRSLVEAQERNDALFKKVRDSEYRAHQLQDTVQKLQVDAISRLSSFVMERQDGDGVKNAHTEVHGTNEDLMRRNENLLKRNDDLVKKIEDSAILVTELRGNLERLEGKAANLEAENQLLRQQAIATPPSTAKSSQAACSKIKMSRKWSYFKWQRSIC

SEQ ID NO: 186123 - protein, 887 aa, Zea Mays
MAELDARRTEVRNKAAITVQSRFRTHVAREQFLALRMTSISFQSFVRVILASITLQTGLRAFGAYNEYIIRKQNKASICVQACWRCHRDHLNYLKMKRSVLIYQCAWRRRIAREELRKLKMAARDTEALKVEKEKLEEHVEELTSRLSFEKNLRIDLEKSKAREICKLQATLREMEQRVEEAIEMHERELAKKAIEEALAQEREKITVLTNEVDELKVLLSREREENSATKSALVVVREENDVLNKKIVVADASMEQLRDTVTRLQESLIEGEATLLAERKESDAAKKSLTEAHVKNEELFNKIEVAEHNVSIFQDDIQRLEETAATLETSLLSEKQQSTAIISQLTEAQQDIQVLQKKFADANKTIELLQDSLKRCEDSTTTRDALYVAERQEHGQTKQALSKAQERNLELLRKVDDSEKTLNKMLENAQRLEKHATARESLLLKTKQNLDCTTKALTEARGRNRDLLTSFEDSAKKINMLEDSLNRLEECTAEKDSLLAVERKQNKTTKEELANAQKTIDELVHESQQSQEIRNQLEDTIKRFKAESTARDTILLSEKQAHETTKKVLTEIQSRNEELIKKIQDCDKNILELQLTVERLQENTSTTEALLLREREQNNATMKAQAETQEINLQLLNKLEDVETKIGLLQGSVQRLGDNTAKDTLLLSEKREKDALKEALTESEYKNEELLIKTEEANKKVEHLQNTINSLKENMAASLEAERQENEAIKRSLVEAQERNDALFKKVRDSEYRAHQLQDTVQKLQVDAISRLSSFVMERQDGDGVKNAHTEVHGTNEDLMRRNENLLKRNDDLVKKIEDSAILVTELRGNLERLEGKAANLEAENQLLRQQAIATPPSTAKSSQAACSKIKMSRKWSYFKWQRSIC

SEQ ID NO: 186124 - protein, 65 aa, Zea Mays
MFLKFAERFFSSFCFDMMGQNRKSKYSGPGTLQFCQRKLPLHGKLDQCYFFTIWSFGPKKMYSKS

SEQ ID NO: 186125 - protein, 68 aa, Zea Mays
MLNFAGRDTVSKKRYFLFQVSEYLNWMHHRTGFLYLWSRSCLLYKKDMYVCKETKCVVLPRSYLFVAV

SEQ ID NO: 186126 - protein, 57 aa, Zea Mays
MFTPIKRRRNWRVSLSLSLLSRASASSSASLGRVAKGGDQRLEALEDEINGAEGPKR

SEQ ID NO: 186127 - protein, 160 aa, Zea Mays
MLRRKQKWTSWDLLLETVALQDDSILVDLADAITKEGISAFRFDFSGNGESDGEFQYGSYRKEAADLRSVVLHFSEQKYDIIALIGHSKGGNAVLLYASKYHDVPAIVNISGRFALERGMEGRLGKNFMRRINEDGYIDVKNKKGLAFLYLINNTSFFSC

SEQ ID NO: 186128 - protein, 147 aa, Zea Mays
MLEPHQTITDIGRTDTRQFRGIRHFIQTIYKKNGIRGIYRGLPASLHGMVVHRGLYFGGFDTAKDVLVPLESPLWQRWVAAQAVTSMAGLISYPLDTVRRRMMMQSGMEGIRSFYRGALSNMFRSTGAAAILVLYDEVKKFMDRGRL

SEQ ID NO: 186129 - protein, 96 aa, Zea Mays
MLKSFVTFGIYGLKTPEVLARDRLLGSFSVKPVVNRVKFTLVGLAGSLILCILLYLGCVPVEGLSRKCTVTLPQGHLGLMRSVEKLICRSIAKRGA

SEQ ID NO: 186130 - protein, 323 aa, Zea Mays
MTCAAYSIRGPLMLAARRSSDVFASSKSCNGKSSVSYPVIQWWSSNCSSFTMRHVASHHHLIVKASATWHSKASATDAATASDERITVLVIGGGGREHALCYALNRSPSCAAVLCAPGNAGIAQSGDATCISDLDISSSDDVISFCRKREVGMVVVGPEAPLVAGLVNDLVKVGIPTFGPSSEAAALEGSKDFMKKLCDKYNIPTAKYRTFTDAVEAKKYVKNEGAPIVVKADGLAAGKGVVVAMTLDEAFEAIDSMLVEGSFGSAGSLVIIEEFLEGEEASFFALVDGTNALPLESAQDHKRVGDGDVGPNTGGMGAYSPAP

SEQ ID NO: 186131 - protein, 293 aa, Zea Mays
MTCAAYSIRGPLMLAARRSSDVFASSKSCNGKSSVSYPVIQWWSSNCSSFTMRHVASHHHLIVKASATWHSKASATDAATASVLCAPGNAGIAQSGDATCISDLDISSSDDVISFCRKREVGMVVVGPEAPLVAGLVNDLVKVGIPTFGPSSEAAALEGSKDFMKKLCDKYNIPTAKYRTFTDAVEAKKYVKNEGAPIVVKADGLAAGKGVVVAMTLDEAFEAIDSMLVEGSFGSAGSLVIIEEFLEGEEASFFALVDGTNALPLESAQDHKRVGDGDVGPNTGGMGAYSPAP

SEQ ID NO: 186132 - protein, 160 aa, Zea Mays
MSLNPSSVTMLTLSSRTRRSGTHEVLMMRLESDLAQVLLSACQGELGNVSLTWSPEMAMVVVMASQGYPGPYKKGTVIKNVDKAEQVSPAVKIFHAGTALDGDGNLVAVGGRVLGVTAKGKDIEEARARAYGAVDAVEWPEGFFRHDIGWRALRQKQAAK

SEQ ID NO: 186133 - protein, 180 aa, Zea Mays
MGVIARTVRHGGCHVLGVIPKALMPIEISGESVGEVRVVDDMHQRKAEMARQSQAFIALPGGYGTMEELLEMITWCQLGIHDKPVGLLNVDGYYDPLLALFEKGAAEGFISTDCSQIFVSAPTASELLTKMEQYTRVHQEVAPATSWEISELGYGRGGDAGAATPPAAAAGGAEEGKGGS

SEQ ID NO: 186134 - protein, 94 aa, Zea Mays
MHQRKAEMARQSQAFIALPGGYGTMEELLEMITWCQLGIHDKPVGLLNVDGYYDPLLALFEKGAAEGFISTDCSQIFVSAPTASELLTKMEVAS

SEQ ID NO: 186135 - protein, 194 aa, Zea Mays
MEKEARNHYRTRGSSRGSGGGGTAAERDLLLQWGNRKRLRCVKVQRRDVEAAATAAAEKAAISQRRAAAAAAAAQHHPTGHTHHRVLRKSEEFAIMKLPARQRQNDRIHTVASPDRECPGRGNNNNGVPQTYPDDKKGSSSGSEGSIWPKFEITLSNREKEEDFLVFKGSKLPQRPKKRAKVIQRTVNERGYVT

SEQ ID NO: 186136 - protein, 295 aa, Zea Mays
MRWKNRDKAWIGLQSPCDKIDEELFNASTVVNVGNGRTASFWKSSWIHGQAPKNIAPILFKKARKKNISVFHALRANSWIQLCLPCIREDEIKDFVTLWQAISSMHELNNLEDSISWRWTTDGQYSASSAYNIQFSTNFCTMKICSIWKAKTEPKCRFFAWTLLHNRVLTAENLQKRGWPHNPSCCLCNSTFETTVHLCKDCPFSREVWDRILSWANLSSFKGIYGSDSLYDWWRNLRSRCNKPSRRSFDGLIIYFWWSIWLERNNRIFHSQLRSAEQVALVVKELVGCFHGLAG

SEQ ID NO: 186137 - protein, 79 aa, Zea Mays
MLKRKGLGSKINVGAVDELYKTKDEVGSANNEEEMEFDALFGPDNAAGETVDDGYNYNYGGYDDDGAEGYNGLDDDFDF

SEQ ID NO: 186138 - protein, 143 aa, Zea Mays
MASHQDKASYQAGETKARTEEKTGQAVGATKDTAQHAKDRAADAAGHAAGKGQDAKEATKQKASDTGSYLGKKTDEAKHKAGETTEATKQKAGETTEAAKQKAADAMEAAKQKAAEAGQYAKDTAVSGKDKSGGVIQQRAGRS

SEQ ID NO: 186139 - protein, 136 aa, Zea Mays
MASHQDKASYQAGETKARTEEKTGQAVGATKDTAQHAKDRATKQKAGETTEAAKQKAADAMEAAKQKAAEAGQYAKDTAVSGKDKSGGVIQQATEQVKSAAAGAKDAVMSTLGMGGDDKQGDANTNKDSSTITRDH

SEQ ID NO: 186140 - protein, 86 aa, Zea Mays
MASHQDKASYQAGETKARTEAGQYAKDTAVSGKDKSGGVIQQATEQVKSAAAGAKDAVMSTLGMGGDDKQGDANTNKDSSTITRDH

SEQ ID NO: 186141 - protein, 146 aa, Zea Mays
MASHQDKASYQAGETKARTEEATKQKASDTGSYLGKKTDEAKHKAGETTEATKQKAGETTEAAKQKAADAMEAAKQKAAEAGQYAKDTAVSGKDKSGGVIQQATEQVKSAAAGAKDAVMSTLGMGGDDKQGDANTNKDSSTITRDH

SEQ ID NO: 186142 - protein, 73 aa, Zea Mays
MASHQDKASYQAGETKARTEDKSGGVIQQATEQVKSAAAGAKDAVMSTLGMGGDDKQGDANTNKDSSTITRDH

SEQ ID NO: 186143 - protein, 345 aa, Zea Mays
MSLSSVKIGEEVWLTCLSHALTTETEEVMGLLLGDIELSSKGATALIWGASPQMRCERKKDRVEVNPELLAAASAQAEKMTATIKKTTRVIGWYHSHPHITVLPSHVDVRTQAMFQLLDTGFVGLIFSCFSEDAQKVGKIQVTAFQSEGGQQHALPLAIAPVIDLDSSLSSSDNALTSHSALVEGMEQDTGDSRASKHNKAWKRSLDFYSHPDTNHSTNYQPNENTLALYNPDNTQEAPVDPYDSDMTQSLQEALHRSTMDISGAEYRGKEVPLFVLPTRYLLKLDTTMTSYCDMQRVLFEEEQSAYNQAMQQNICDGKIHPLTSIHCTSTYNSSLCKLMEYWTA

SEQ ID NO: 186144 - protein, 215 aa, Zea Mays
MFQLLDTGFVGLIFSCFSEDAQKVGKIQVTAFQSEGGQQHALPLAIAPVIDLDSSLSSSDNALTSHSALVEGMEQDTGDSRASKHNKAWKRSLDFYSHPDTNHSTNYQPNENTLALYNPDNTQEAPVDPYDSDMTQSLQEALHRSTMDISGAEYRGKEVPLFVLPTRYLLKLDTTMTSYCDMQRVLFEEEQSAYNQAMQQNICDGKIHPLTSIHF

SEQ ID NO: 186145 - protein, 208 aa, Zea Mays
MPFLLPLLQLLTLIHPLVHQIMHSLHILHWLKAWNRTQGIPGPQSITSGAEYRGKEVPLFVLPTRYLLKLDTTMTSYCDMQRVLFEEEQSAYNQAMQQNICDGKIHPLTSIHCTSTYNSSLCKLMEYCLSPAVITLQDRLKENELRLSMLKEECKQLEADTQGMRNGSPRRLMNHGAGGSGSPMAQSRHPFSSQGSPRSPSGGSRRRA

SEQ ID NO: 186146 - protein, 224 aa, Zea Mays
MWAWPWHQHRKPWKEPDHRHGGGREGRHLLAHQHDQRRPYQELAGRHGLRAGPAVREHRDEERLQPHHHRPVLLRPAHALRQPDAGGGGAQGGVRGHPGHVGDAAGDQHRVQRRRAVPGPGAGERQPDAGGRWCRPSHRPLLPGVGEERRHRGPAVLPRQVLTETHLAKQWPKRVYTHMLHGCRLELLPYPNKTNLLIVHAVVDDKETQRRNIGASYLQNVVRT

SEQ ID NO: 186147 - protein, 164 aa, Zea Mays
MAAALSQLDDEIVRGMAIGAVFTDYAGKINCLDFHRKEDLLVTSSEDDSIRMYNITSATLLKTTYHRKHGADRVCFSHHPSSILCSSRYNLESAESLRYLSLYDNRCLRYFKGHKDRVVSLCMSPVNDSFMSGSLDHSVRIWDLRVNACQMLFILEALSCLLIY

SEQ ID NO: 186148 - protein, 123 aa, Zea Mays
MAAALSQLDDEIVRGMAIGAVFTDYAGKINCLDFHRKEDLLVTSSEDDSIRMYNITSATLLKTTYHRKHGADRVCFSHHPSSILCSSRYNLESAESLRYLSLYDNRCLRYFKGHKDSNGRRCY

SEQ ID NO: 186149 - protein, 358 aa, Zea Mays
MYIINAGQGFKMLWSTIKSFLDPKTASKIHVLGNKYQHKLLEIIDECELPEFLGGKCNCIEGCQRSDKGPWKDPNIIKRVLNDEANYGRQIVTISSIDGKIIRYARPDHPTRKGSDASAESGSEVEDVTSPTASRNLITHPILTPVHEESKLSPHGSTFVAHASIEENIPVVDKVVDDGWGTPRGSLQASSGSLPSRNTHGTFEGLRVQAVAWLTFLITALFATLCSVPSKMARRISSQSSKHDDYRGEYPQEEEEHKEEFRPPSPAPSYTEKDVLSSMLRRLGELEGRVQVLETKPSEMPFEKEELLNAAVRRVDALEAELISTKKALYDALMRQDELLAYIDRQELIKFRKKKFCF

SEQ ID NO: 186150 - protein, 611 aa, Zea Mays
MSGPLDRFARPCFEGFVHNDERKESRSDADNSEGDKKTKIGSFKKKAINAGNKFRHSLRRRSKKKTERGDSIKDIRDVKELQDVETFRQCLIDEDLLPPQHDDYHMMLRFLKARKFEVEKAKSMWSDMINWRKEFGVDKIEEFDYTELDEVTEYYPQFYHGVDKEGRPVYIELVGKVDANKLIQVTTLDRYVKYHVKEFEKCFQMKFPACTIAAKKHIDSSTTILDVQGVGFKNFSKSARELITRLQKIDSDNYPETLCRMYIINAGQGFKMLWSTIKSFLDPKTASKIHVLGNKYQHKLLEIIDECELPEFLGGKCNCIEGCQRSDKGPWKDPNIIKRVLNDEANYGRQIVTISSIDGKIIRYARPDHPTRKGSDASAESGSEVEDVTSPTASRNLITHPILTPVHEESKLSPHGSTFVAHASIEENIPVVDKVVDDGWGTPRGSLPSRNTHGTFEGLRVQAVAWLTFLITALFATLCSVPSKMARRISSQSSKHDDYRGEYPQEEEEHKEEFRPPSPAPSYTEKDVLSSMLRRLGELEGRVQVLETKPSEMPFEKEELLNAAVRRVDALEAELISTKKALYDALMRQDELLAYIDRQELIKFRKKKFCF

SEQ ID NO: 186151 - protein, 178 aa, Zea Mays
MRLFSGVLDSSSALASAVLGSVSDRLGFSRIVFGRASPSNMPALACSAASSSSAATGAQKPWLFVGLGNPGRMYKGTRHNVGFEMIDAIAEAEGISVSSKQFKAIVGKGLIGDVPVMLAKPQTFMNASGESVGQLVSYFKIPLNQLVVIYDDLDLPFAKLRLLPKGGHGGHNGYSFLF

SEQ ID NO: 186152 - protein, 258 aa, Zea Mays
MRLFSGVLDSSSALASAVLGSVSDRLGFSRIVFGRASPSNMPALACSAASSSSAATGAQKPWLFVGLGNPGRMYKGTRHNVGFEMIDAIAEAEGISVSSKQFKAIVGKGLIGDVPVMLAKPQTFMNASGESVGQLVSYFKIPLNQLVVIYDDLDLPFAKLRLLPKGGHGGHNGMRSIVDHLNQSRDFGRLRIGIGIGRPPEELGAINFVLRSFTKQEKEELEVTFQRSLQAVRIMVREGFNKSAQFVNTPQPPEMLNR

SEQ ID NO: 186153 - protein, 83 aa, Zea Mays
MRSIVDHLNQSRDFGRLRIGIGRPPEELGAINFVLRSFTKQEKEELEVTFQRSLQAVRIMVREGFNKSAQFVNTPQPPEMLNR

SEQ ID NO: 186154 - protein, 206 aa, Zea Mays
MQTHLIPPDTPRSIFVYFRGLFYDTGNDPEGGYYARGARASVWENFKNNPLFDISTDHPPTYYEDMQRSVFCLCPLGWAPWSPRLVEAVVFGCIPVIIADDIVLPFADAIPWEEIGVFVAEDDVPQLDSILTSIPTDVVLRKQRLLANPSMKQAMLFPQPAQPGDAFHQILNGLARKLPHGSNVFLKPGERALNWTAGPPGDLKPW

SEQ ID NO: 186155 - protein, 496 aa, Zea Mays
MASGAVTCASDGNGFKTCQSLCPCYVSSNGAFSKPVKRASQGESSTNTDRNHSSHNAATEASQCNNRACYIPRLRVESSYLGVHSSTPTKSFRPLSFNYVAPSLYSSLFSWDTDTLVSGPDNISKPIDTIFKFHKAIRKDLEFLDLESGKLIDGNESCLSQFIGRFRLLWGLYRAHSNAEDEIVFPALESKEALHNVSHSYTLDHKQEEKLFQDISTVLSELSQLHDGLSYPLDVEAGTNDISSNEIDWARKRNELLTKLQGLCKSIRVTLSNHVHREELELWPLFDKHFSVDEQDKIIGHIIGTTGAEVLQSMLPWVTSALSLEEQNMMLDTWKQATKNTMFDEWLNEWWKGPSTSSDPSDKASTPSEESHFQENLEQNDQMFRPGWKDIFRMNQSELEAEIRKVSRDSTLDPRRKAYLIQNLMTRNHHNQASKDIMDVHDDLDVLLRTETQGNKYLAVSITKETASLLLHAAISYSLADSVTIKLVTIQWTGNQ

SEQ ID NO: 186156 - protein, 842 aa, Zea Mays
MRLQFIADVCIFHSIAEDQVIFPAVDGELSFVQEHAEEERRLNKFRSLIEQIQLAGAKSTVVDFHSELCSQADQIMQKIESHFNDEEIKVLPKARIKFSPEKQRELLYQSLCVMPLKLLERVLPWFIVKLNDAEAVSFLQNMRLAAPSSETALVTLLSGWACKGRLEDTSNPGKFVCMASGAVTCASDGNGFKTCQSLCPCYVSSNGAFSKPVKRASQGESSTNTDRNHSSHNAATEASQCNNRACYIPRLRVESSYLGVHSSTPTKSFRPLSFNYVAPSLYSSLFSWDTDTLVSGPDNISKPIDTIFKFHKAIRKDLEFLDLESGKLIDGNESCLSQFIGRFRLLWGLYRAHSNAEDEIVFPALESKEALHNVSHSYTLDHKQEEKLFQDISTVLSELSQLHDGLSYPLDVEAGTNDISSNEIDWARKRNELLTKLQGLCKSIRVTLSNHVHREELELWPLFDKHFSVDEQDKIIGHIIGTTGAEVLQSMLPWVTSALSLEEQNMMLDTWKQATKNTMFDEWLNEWWKGPSTSSDPSDKASTPSEESHFQENLEQNDQMFRPGWKDIFRMNQSELEAEIRKVSRDSTLDPRRKAYLIQNLMTSRWIAAQQKSPQPSVEGHNGCTRRPGCVASYRDPGKQIFGCEHYKRNCKLVAACCDKLFTCRFCHDKVSDHTMDRKSVMEMMCMQCLNVQPVGPNCQSPSCNGLSMAKYYCSICKFFDDERSVYHCPFCNLCRLGSGLGTDFFHCMKCNCCLGIKMIEHKCREKMLEMNCPICCDFLFTSSAPVKGLPCGHFMHSACFQVMEKADNELVALSTPTVQTTNRRSNLRRGNERGVKKKLLG

SEQ ID NO: 186157 - protein, 1050 aa, Zea Mays
MSKEEEQVFPLLIKKFSHEEQADLVWQFLCSIPVNMMAKFLPWISASVSTDENQDILDCLSKIVPEEKLLQEVVFTWFGGKSESSSTCESSSGQTDKHAHSLEHTKIGKRKSIESSQLVTHPIDEILYWHNAVLRELSDIAEETKRIHQSGDFSDIAGFNMRLQFIADVCIFHSIAEDQVIFPAVDGELSFVQEHAEEERRLNKFRSLIEQIQLAGAKSTVVDFHSELCSQADQIMQKIESHFNDEEIKVLPKARIKFSPEKQRELLYQSLCVMPLKLLERVLPWFIVKLNDAEAVSFLQNMRLAAPSSETALVTLLSGWACKGRLEDTSNPGKFVCMASGAVTCASDGNGFKTCQSLCPCYVSSNGAFSKPVKRASQGESSTNTDRNHSSHNAATEASQCNNRACYIPRLRVESSYLGVHSSTPTKSFRPLSFNYVAPSLYSSLFSWDTDTLVSGPDNISKPIDTIFKFHKAIRKDLEFLDLESGKLIDGNESCLSQFIGRFRLLWGLYRAHSNAEDEIVFPALESKEALHNVSHSYTLDHKQEEKLFQDISTVLSELSQLHDGLSYPLDVEAGTNDISSNEIDWARKRNELLTKLQGLCKSIRVTLSNHVHREELELWPLFDKHFSVDEQDKIIGHIIGTTGAEVLQSMLPWVTSALSLEEQNMMLDTWKQATKNTMFDEWLNEWWKGPSTSSDPSDKASTPSEESHFQENLEQNDQMFRPGWKDIFRMNQSELEAEIRKVSRDSTLDPRRKAYLIQNLMTSRWIAAQQKSPQPSVEGHNGCTRRPGCVASYRDPGKQIFGCEHYKRNCKLVAACCDKLFTCRFCHDKVSDHTMDRKSVMEMMCMQCLNVQPVGPNCQSPSCNGLSMAKYYCSICKFFDDERSVYHCPFCNLCRLGSGLGTDFFHCMKCNCCLGIKMIEHKCREKMLEMNCPICCDFLFTSSAPVKGLPCGHFMHSACFQAYTCTHYTCPICCKSLGDMTVYFGMLDGLLAAEQLPEEYQDRCQDILCNDCERKGRSRFHWLYHKCGFCGSYNTRVIKTDTAECSRPL

SEQ ID NO: 186158 - protein, 815 aa, Zea Mays
MQKIESHFNDEEIKVLPKARIKFSPEKQRELLYQSLCVMPLKLLERVLPWFIVKLNDAEAVSFLQNMRLAAPSSETALVTLLSGWACKGRLEDTSNPGKFVCMASGAVTCASDGNGFKTCQSLCPCYVSSNGAFSKPVKRASQGESSTNTDRNHSSHNAATEASQCNNRACYIPRLRVESSYLGVHSSTPTKSFRPLSFNYVAPSLYSSLFSWDTDTLVSGPDNISKPIDTIFKFHKAIRKDLEFLDLESGKLIDGNESCLSQFIGRFRLLWGLYRAHSNAEDEIVFPALESKEALHNVSHSYTLDHKQEEKLFQDISTVLSELSQLHDGLSYPLDVEAGTNDISSNEIDWARKRNELLTKLQGLCKSIRVTLSNHVHREELELWPLFDKHFSVDEQDKIIGHIIGTTGAEVLQSMLPWVTSALSLEEQNMMLDTWKQATKNTMFDEWLNEWWKGPSTSSDPSDKASTPSEESHFQENLEQNDQMFRPGWKDIFRMNQSELEAEIRKVSRDSTLDPRRKAYLIQNLMTSRWIAAQQKSPQPSVEGHNGCTRRPGCVASYRDPGKQIFGCEHYKRNCKLVAACCDKLFTCRFCHDKVSDHTMDRKSVMEMMCMQCLNVQPVGPNCQSPSCNGLSMAKYYCSICKFFDDERSVYHCPFCNLCRLGSGLGTDFFHCMKCNCCLGIKMIEHKCREKMLEMNCPICCDFLFTSSAPVKGLPCGHFMHSACFQAYTCTHYTCPICCKSLGDMTVYFGMLDGLLAAEQLPEEYQDRCQDILCNDCERKGRSRFHWLYHKCGFCGSYNTRVIKTDTAECSRPL

SEQ ID NO: 186159 - protein, 923 aa, Zea Mays
MATPLAGKGPIAAAIPRSPPPLAEGGAGGSAAEAPVLIFVYFHKAIRAELERMHAAAVRLAMGRAGGDVATLEARCRFLFTVYRHHCDAEDAVIFPALDIRVKNVAGTYSLEHKGENDLFAHLFTLLQLDVQNDNAIRRELASCTGAIRTFVSQHMSKEEEQVVFTWFGGKSESSSTCESSSGQTDKHAHSLEHTKIGKRKSIESSQLVTHPIDEILYWHNAVLRELSDIAEETKRIHQSGDFSDIAGFNMRLQFIADVCIFHSIAEDQVIFPAVDGELSFVQEHAEEERRLNKFRSLIEQIQLAGAKSTVVDFHSELCSQADQIMQKIESHFNDEEIKVLPKARIKFSPEKQRELLYQSLCVMPLKLLERVLPWFIVKLNDAEAVSFLQNMRLAAPSSETALVTLLSGWACKGRLEDTSNPGKFVCMASGAVTCASDGNGFKTCQSLCPCYVSSNGAFSKPVKRASQGESSTNTDRNHSSHNAATEASQCNNRACYIPRLRVESSYLGVHSSTPTKSFRPLSFNYVAPSLYSSLFSWDTDTLVSGPDNISKPIDTIFKFHKAIRKDLEFLDLESGKLIDGNESCLSQFIGRFRLLWGLYRAHSNAEDEIVFPALESKEALHNVSHSYTLDHKQEEKLFQDISTVLSELSQLHDGLSYPLDVEAGTNDISSNEIDWARKRNELLTKLQGLCKSIRVTLSNHVHREELELWPLFDKHFSVDEQDKIIGHIIGTTGAEVLQSMLPWVTSALSLEEQNMMLDTWKQATKNTMFDEWLNEWWKGPSTSSDPSDKASTPSEESHFQENLEQNDQMFRPGWKDIFRMNQSELEAEIRKVSRDSTLDPRRKAYLIQNLMTRNHHNQASKDIMDVHDDLDVLLRTETQGNKYLAVSITKETASLLLHAAISYSLADSVTIKLVTIQWTGNQ

SEQ ID NO: 186160 - protein, 1026 aa, Zea Mays
MATPLAGKGPIAAAIPRSPPPLAEGGAGGSAAEAPVLIFVYFHKAIRAELERMHAAAVRLAMGRAGGDVATLEARCRFLFTVYRHHCDAEDAVIFPALDIRVKNVAGTYSLEHKGENDLFAHLFTLLQLDVQNDNAIRRELASCTGAIRTFVSQHMSKEEEQVFPLLIKKFSHEEQADLVWQFLCSIPVNMMAKFLPWISASVSTDENQDILDCLSKIVPEEKLLQEVVFTWFGGKSESSSTCESSSGQTDKHAHSLEHTKIGKRKSIESSQLVTHPIDEILYWHNAVLRELSDIAEETKRIHQSGDFSDIAGFNMRLQFIADVCIFHSIAEDQVIFPAVDGELSFVQEHAEEERRLNKFRSLIEQIQLAGAKSTVVDFHSELCSQADQIMQKIESHFNDEEIKVLPKARIKFSPEKQRELLYQSLCVMPLKLLERVLPWFIVKLNDAEAVSFLQNMRLAAPSSETALVTLLSGWACKGRLEDTSNPGKFVCMASGAVTCASDGNGFKTCQSLCPCYVSSNGAFSKPVKRASQGESSTNTDRNHSSHNAATEASQCNNRACYIPRLRVESSYLGVHSSTPTKSFRPLSFNYVAPSLYSSLFSWDTDTLVSGPDNISKPIDTIFKFHKAIRKDLEFLDLESGKLIDGNESCLSQFIGRFRLLWGLYRAHSNAEDEIVFPALESKEALHNVSHSYTLDHKQEEKLFQDISTVLSELSQLHDGLSYPLDVEAGTNDISSNEIDWARKRNELLTKLQGLCKSIRVTLSNHVHREELELWPLFDKHFSVDEQDKIIGHIIGTTGAEVLQSMLPWVTSALSLEEQNMMLDTWKQATKNTMFDEWLNEWWKGPSTSSDPSDKASTPSEESHFQENLEQNDQMFRPGWKDIFRMNQSELEAEIRKVSRDSTLDPRRKAYLIQNLMTSRWIAAQQKSPQPSVEGHNGCTRRPGCVASYRDPGKQIFGCEHYKRNCKLVAACCDKLFTCRFCHDKVSDHTMDSDGDDVHAMSECSTCWSKLSIPFLQWTVHGQVLL

SEQ ID NO: 186161 - protein, 340 aa, Zea Mays
MSTSSLKEPNVSQSKDVENGNDNSVKSCISKPVLNGNKCANKEQNVPSCCPGAVTNGNEAGNADVEYIDSENLVDLPDVDAALCTLVKRLDSKDWVMTCEALNNVRQLAMYHKERLQELLEPLVPLIVKSVKNPRSAVCKTALMTCADIFKVYGDLLVESIDPLASQDKRFVCEAAEAALTSMTSWISPLLLLPRMQPYLKNRNPRVRAKASVCLSKSVPCLDVQGIREYGMDKLVQIAATQLSDQLPESREAARNLALELQVLYEKSQASTSDENEGEPSVSQDAESWEAFCQSKLSALSAQAILRVTSTTPKEGVASTSNATKEGVTAAPKEGLDVDC

SEQ ID NO: 186162 - protein, 251 aa, Zea Mays
MTCEALNNVRQLAMYHKERLQELLEPLVPLIVKSVKNPRSAVCKTALMTCADIFKVYGDLLVESIDPLLVQLFLKASQDKRFVCEAAEAALTSMTSWISPLLLLPRMQPYLKNRNPRVRAKASVCLSKSVPCLDVQGIREYGMDKLVQIAATQLSDQLPESREAARNLALELQVLYEKSQASTSDENEGEPSVSQDAESWEAFCQSKLSALSAQAILRVTSTTPKEGVASTSNATKEGVTAAPKEGLDVDC

SEQ ID NO: 186163 - protein, 444 aa, Zea Mays
MSDFVRSRYDKQEDFQVLLSKKDPGEQPQHKDYLWMAHWTKASSAAEPRNNDSNPLEDTNNGTTTKDSETLPYEFMKSTVAERLMVGVRHGSASMQHVRQFKSSMRGMPRLSNELGPKNSEQVDESFEKSLKNDAMNLRTRQVVSETYSIHKLSELPLDFQNLGSSDDPSPDWSHFPMFEINQKIDSIVNRKRRSPPLDLNVSASHVMALSSQEYMMHSHQTADENMDTCKPAEGFASRVEDHAGFNSDPPGPKLKGQLLDTMSCSCSKDDNNSADCPIDEQHTSHYFANSKHELPSVSNKKKFKFAGNNHNRIVASASHDLKTKRSAVHKQQSAAEAVFCAPVLDSEFQNEPITISNIDKKDGENFHDMYKCLGKAVSCPLLPYEHRHLNTQRTESAENLKVCTLPDHQTANKLTEKSHGELLTYGPKSKEMYTGSCNQRRKI

SEQ ID NO: 186164 - protein, 729 aa, Zea Mays
MSDFVRSRYDKQEDFQVLLSKKDPGEQPQHKDYLWMAHWTKASSAAEPRNNDSNPLEDTNNGTTTKDSETLPYEFMKSTVAERLMVGVRHGSASMQHVRQFKSSMRGMPRLSNELGPKNSEQVDESFEKSLKNDAMNLRTRQVVSETYSIHKLSELPLDFQNLGSSDDPSPDWSHFPMFEINQKIDSIVNRKRRSPPLDLNVSASHVMALSSQEYMMHSHQTADENMDTCKPAEGFASRVEDHAGFNSDPPGPKLKGQLLDTMSCSCSKDDNNSADCPIDEQHTSHYFANSKHELPSVSNKKKFKFAGNNHNRIVASASHDLKTKRSAVHKQQSAAEAVFCAPVLDSEFQNEPITISNIDKKDGENFHDMYKCLGKAVSCPLLPYEHRHLNTQRTESAENLKVCTLPDHQTANKLTEKSHGELLTYGPKSKEMYTGKSSDFGVCMYGTNIGSQLFRAQNQSSAKTETLHSDTLIGSKSPAGIASLSAQKDYGCTDEAKSEQLVAPSRRGDSGYGKEDGFHNVNEGHDVWSKATIGSKQSCMPGTGITNLDLILSQMSRMRNQISIGRIQPPIGAEPSDRWLKRLQPDIPDPDIPGSRRPNVGGSPPLRQRNRSFDMALPCNRTDTGTTDCVMEDQSLDKVEKTQEKQESTPIPAKSVNSWIGRWCQGGTPVFHEGPGQGRQATKPGRPSEELEGRFPSIAAMAMMGRAMNKLRPCEHQKMGPLVVWKTD

SEQ ID NO: 186165 - protein, 694 aa, Zea Mays
MAHWTKASSAAEPRNNDSNPLEDTNNGTTTKDSETLPYEFMKSTVAERLMVGVRHGSASMQHVRQFKSSMRGMPRLSNELGPKNSEQVDESFEKSLKNDAMNLRTRQVVSETYSIHKLSELPLDFQNLGSSDDPSPDWSHFPMFEINQKIDSIVNRKRRSPPLDLNVSASHVMALSSQEYMMHSHQTADENMDTCKPAEGFASRVEDHAGFNSDPPGPKLKGQLLDTMSCSCSKDDNNSADCPIDEQHTSHYFANSKHELPSVSNKKKFKFAGNNHNRIVASASHDLKTKRSAVHKQQSAAEAVFCAPVLDSEFQNEPITISNIDKKDGENFHDMYKCLGKAVSCPLLPYEHRHLNTQRTESAENLKVCTLPDHQTANKLTEKSHGELLTYGPKSKEMYTGKSSDFGVCMYGTNIGSQLFRAQNQSSAKTETLHSDTLIGSKSPAGIASLSAQKDYGCTDEAKSEQLVAPSRRGDSGYGKEDGFHNVNEGHDVWSKATIGSKQSCMPGTGITNLDLILSQMSRMRNQISIGRIQPPIGAEPSDRWLKRLQPDIPDPDIPGSRRPNVGGSPPLRQRNRSFDMALPCNRTDTGTTDCVMEDQSLDKVEKTQEKQESTPIPAKSVNSWIGRWCQGGTPVFHEGPGQGRQATKPGRPSEELEGRFPSIAAMAMMGRAMNKLRPCEHQKMGPLVVWKTD

SEQ ID NO: 186166 - protein, 116 aa, Zea Mays
MQNADHSATSTGYGHDQTPDPTGVLCCRIIAIALMVLLVFRDAVSVFLGDQDAYTVAVVTLLMLRTAAIVIPVYIILVAVTELLHRRRHRQVVHGQASDHAAEERTQPQQHVISIQ

SEQ ID NO: 186167 - protein, 109 aa, Zea Mays
MTVIDILTRVDAICQKYDKYDVDKLNGANVAGDDPFARLYASVDADINQCVDKAETAKQEKNRAAVVALNAEIRRTKAKLLEEDLPKLQRLAVKKVAALVPALPPLSYR

SEQ ID NO: 186168 - protein, 95 aa, Zea Mays
MRRMKQDEGLDVIGEGLETLKNMASDMNEELDRQVPLMDEMDDKVDRANADLKNTNVRLKETVLQLRSSRNFCIDIILLCVILGIAAYLYNVLKK

SEQ ID NO: 186169 - protein, 181 aa, Zea Mays
MWRWREWLEGHHVTWWRLGTKEAAHADLEWKLIYVGSAEDENYDQQLESVLVGPVNVGTYRFVLQADPPDPSKIREEDIIGVTVLLLTCSYMGQEFMRVGYYVNNDYDDEQLREEPPAKVLIDRVQRNILADKPRVTKFPINFHPEPSTGPGQQQQEPQTTSPENHTGNGEANGSKPEADQ

SEQ ID NO: 186170 - protein, 304 aa, Zea Mays
MEAKQRPRHGGERRPPPATDGGEEYDPWTAWLYKPRTISVLLVGACLLIWASGALDPEGTAAHSSVTSIKRGVWAMIAVFLAYCTLQAPSTILIRPHPAVWRLVHGLAVVYLVALTFLLFQNRDDARQFMKHLHPDLGVELPERSYGADCRLYVPENPKNKFINIYETLFDEFVVAHILGWWGKAVMIRNQLLLWVLSIGFELMELTFRHMLPNFNECWWDSIILDILICNWFGIWAGMHTVRHFDGKTYEWVGLSRQRSIMGEKIVEPVHSCSMGQGSVASFHGATAVHPSAVPLRCLHDRGA

SEQ ID NO: 186171 - protein, 513 aa, Zea Mays
MGPLRFIQVLFLCVVFMTVELNTFFLKFCLWIPPRNPLVVYRLILWWLIAIPTIREYNSYLQDRKPVKKVGAFCWLSLAICIVELLICMKFGHDAPALTAHKPRAAAAASCPGRILRAARAALIFPAPTRRTTRALAMSKKVGRAKKAAGGGELSRFLESHLQTISDTFQMMAESAPGALERTEWSEVVKLGDQVSRQATVAGMLWSGDLPDVETLKENIVAYFNILQGFLLVCHGSMVGAGPTLHKSIFGSAKDVVDSSFSLFKHAVSAYESRSSDRNTTIPQVTGTVWEACAALKKVPASNCIAIGRAMTRIGVCLKDVLREMNELPIGGSGDSTAEKSSNGVVDTTSCSDRDERSDLDLDDDDDDEFTEEEVAVAKLVINVVSDSLVVVKEAIRFITGLLRSSGNKDKDGANEDRVEPMEKLLSHCKEIADQVNDLGASVYPPQDSSEMELAIKRLYNGINGMRKEIGNLGGAPESTFAALEGFENCLGSLRARLADDVVNEMEGLNISH

SEQ ID NO: 186172 - protein, 612 aa, Zea Mays
MIRNQLLLWVLSIGFELMELTFRHMLPNFNECWWDSIILDILICNWFGIWAGMHTVRHFDGKTYEWVGLSRQRSIMGKVKRSLSQFTPAQWDKDQWHPFMGPLRFIQVLFLCVVFMTVELNTFFLKFCLWIPPRNPLVVYRLILWWLIAIPTIREYNSYLQDRKPVKKVGAFCWLSLAICIVELLICMKFGHDAPALTAHKPRAAAAASCPGRILRAARAALIFPAPTRRTTRALAMSKKVGRAKKAAGGGELSRFLESHLQTISDTFQMMAESAPGALERTEWSEVVKLGDQVSRQATVAGMLWSGDLPDVETLKENIVAYFNILQGFLLVCHGSMVGAGPTLHKSIFGSAKDVVDSSFSLFKHAVSAYESRSSDRNTTIPQVTGTVWEACAALKKVPASNCIAIGRAMTRIGVCLKDVLREMNELPIGGSGDSTAEKSSNGVVDTTSCSDRDERSDLDLDDDDDDEFTEEEVAVAKLVINVVSDSLVVVKEAIRFITGLLRSSGNKDKDGANEDRVEPMEKLLSHCKEIADQVNDLGASVYPPQDSSEMELAIKRLYNGINGMRKEIGNLGGAPESTFAALEGFENCLGSLRARLADDVVNEMEGLNISH

SEQ ID NO: 186173 - protein, 420 aa, Zea Mays
MEAKQRPRHGGERRPPPATDGGEEYDPWTAWLYKPRTISVLLVGACLLIWASGALDPEGTAAHSSVTSIKRGVWAMIAVFLAYCTLQAPSTILIRPHPAVWRLVHGLAVVYLVALTFLLFQNRDDARQFMKHLHPDLGVELPERSYGADCRLYVPENPKNKFINIYETLFDEFVVAHILGWWGKAVMIRNQLLLWVLSIGFELMELTFRHMLPNFNECWWDSIILDILICNWFGIWAGMHTVRHFDGKTYEWVGLSRQRSIMGKVKRSLSQFTPAQWDKDQWHPFMGPLRFIQVLFLCVVFMTVELNTFFLKFCLWIPPRNPLVVYRLILWWLIAIPTIREYNSYLQDRKPVKKVGAFCWLSLAICIVELLICMKFGHGLFHDPMPTWLIIFWSSVGTALVIFLLSWSWRSHQSWNALER

SEQ ID NO: 186174 - protein, 101 aa, Zea Mays
MLPDHQTANKLTKKSNGELLTFGPKSKEMYTGSCNQRRSYFFEKLMIPSKSQSVHPKNSVSSVKSSDFGVCMYGTNISSQLFRAQNQSSAKTETLHSDSLV

SEQ ID NO: 186175 - protein, 98 aa, Zea Mays
MAASHRTAGPGPSDGSSAGARKKLQLTNEQSTLLEDTFRAHNILSNAQKQELARQVDLSARKQPQSNCCKCVPRSEDKKICCPLATKCYRGCVLCTST

SEQ ID NO: 186176 - protein, 76 aa, Zea Mays
MAASHRTAGPGPSDGSSAGARKKLQLTNEQSTLLEDTFRAHNILSNAQKQELARQVDLSARQETTTIELLQVRPTI

SEQ ID NO: 186177 - protein, 265 aa, Zea Mays
MGRRNSSPGNLTHLKVPFMRTLFWMSLLLMMCLYPSYCRPNIWPNDNLPELEIAFKDLGKLMMEVGLMLAHHCDRYVMRQGVGSYDGDSLEQTIARSRCHKGRLLYYFPRQFSKQTDFDSVSSWCGWHTDHGSLTGLTCGLFTKNSMEVPCPDSAAGLYIRTRDNQVVKVVFDEDQLAYQIGETTEILSRGYLCATPHCVQAPSSENASNVDRSTFALFMQPDWNEKLKFPSEIPYHQELIPPNGTLTFGEYSERLVDKYYQTTT

SEQ ID NO: 186178 - protein, 407 aa, Zea Mays
MVLEVGTAVGIRTTSTWAAGPAARRRSRGQVVSFALAPASSRRVRHRCRAMQQHEEEQERPPTVRAVTIPFADLRVPDRDLGDKIEEGLGPHGLGIVTIADVPEFPELRKRLLRLAPRIANLPEEVKKQLEDPDSRYNFGWSHGKEKLESGKLDTFKGSFYANPVLDVPTTDDVLVSRYPSYCRPNIWPNDNLPELEIDLGKLMMEVGLMLAHHCDRYVMRQGVGSYDGDSLEQTIARSRCHKGRLLYYFPRQFSKQTDFDSVSSWCGWHTDHGSLTGLTCGLFTKNSMEVPCPDSAAGLYIRTRDNQVVKVVFDEDQLAYQIGETTEILSRGYLCATPHCVQAPSSENASNVDRSTFALFMQPDWNEKLKFPSEIPYHQELIPPNGTLTFGEYSERLVDKYYQTTT

SEQ ID NO: 186179 - protein, 296 aa, Zea Mays
MVLEVGTAVGIRTTSTWAAGPAARRRSRGQVVSFALAPASSRRVRHRCRAMQQHEEEQERPPTVRAVTIPFADLRVPDRDLGDKIEEGLGPHGLGIVTIADVPEFPELRKRLLRLAPRIANLPEEVKKQLEDPDSRYNFGWSHGKEKLESGKLDTFKGSFYANPVLDVPTTDDVLVSRYPSYCRPNIWPNDNLPELEIAFKDLGKLMMEVGLMLAHHCDRYVMRQGVGSYDGDSLEQTIARSRCHKGRLLYYFPRQFSKQTDFDSVSSWCGWHTDHGSLTGCVRRGSASLPNRGNY

SEQ ID NO: 186180 - protein, 411 aa, Zea Mays
MVLEVGTAVGIRTTSTWAAGPAARRRSRGQVVSFALAPASSRRVRHRCRAMQQHEEEQERPPTVRAVTIPFADLRVPDRDLGDKIEEGLGPHGLGIVTIADVPEFPELRKRLLRLAPRIANLPEEVKKQLEDPDSRSYNFGWSHGKEKLESGKLDTFKGSFYANPVLDVPTTDDVLVSRYPSYCRPNIWPNDNLPELEIAFKDLGKLMMEVGLMLAHHCDRYVMRQGVGSYDGDSLEQTIARSRCHKGRLLYYFPRQFSKQTDFDSVSSWCGWHTDHGSLTGLTCGLFTKNSMEVPCPDSAAGLYIRTRDNQVVKVVFDEDQLAYQIGETTEILSRGYLCATPHCVQAPSSENASNVDRSTFALFMQPDWNEKLKFPSEIPYHQELIPPNGTLTFGEYSERLVDKYYQTTT

SEQ ID NO: 186181 - protein, 242 aa, Zea Mays
MVLEVGTAVGIRTTSTWAAGPAARRRSRGQVVSFALAPASSRRVRHRCRAMQQHEEEQERPPTVRAVTIPFADLRVPDRDLGDKIEEGLGPHGLGIVTIADVPEFPELRKRLLRLAPRIANLPEEVKKQLEDPDSRYNFGWSHGKEKLESGKLDTFKGSFYANPVLDVPTTDDVLVSRYPSYCRPNIWPNDNLPELEIAFKDLGKLMMEVGLMLAHHCDRYASRQTSTRFHHGVDGTLIMDL

SEQ ID NO: 186182 - protein, 267 aa, Zea Mays
MGRRNSSPGNLTFKGSFYANPVLDVPTTDDVLVSRYPSYCRPNIWPNDNLPELEIAFKDLGKLMMEVGLMLAHHCDRYVMRQGVGSYDGDSLEQTIARSRCHKGRLLYYFPRQFSKQTDFDSVSSWCGWHTDHGSLTGLTCGLFTKNSMEVPCPDSAAGLYIRTRDNQVVKVVFDEDQLAYQIGETTEILSRGYLCATPHCVQAPSSENASNVDRSTFALFMQPDWNEKLKFPSEIPYHQELIPPNGTLTFGEYSERLVDKYYQTTT

SEQ ID NO: 186183 - protein, 139 aa, Zea Mays
MNPAATADPSSSSTSAATLRKRMISIDTARRGADGASPETAPRPDRAGSDKAPQEREEEGSMAASAPAAAAARESDLEAVGEPMSPAGRLFRETHFNCYIVAVIGLGAAVDVAAARAGLEVTLVRHPRFSSVQYCHQTF

SEQ ID NO: 186184 - protein, 662 aa, Zea Mays
MEEAACTAAPSLPYHSPWIRTAPVRVVAKICPGGDPTGSMQVSARVPDPANSSSASVSFVPIIKESALSNMTHRKHREHKLDWCYLNDDSYTDIFHNEGSDHQPGLLTMAMERIFDYAKPIRATVSVSSYHVLQDSHVFDLLDPKNNEVLVREDADGRTHLKGLSMVEINSIQEFQNLCYDSDKHQNRTKVSKAKGHNGFIIFISKSDQNGKESSVSKMHFLELADHINDKQKSHGERFVQQNSKKSLYAVMDVVQALNSHQSFIPYRKSKITHILQDSLSKTGGALLIACLDEVSCQDAISTLSLASRSSQVVNEQRYNLSLITKGCSKSNVKLSVNNKNLSRSLLSSIQQQSPVLEKPYKTQVNNIAVKATRSLNANKRSETSTHSAKKTVNLVSASINLKHSGAKSILRERNFFIPTTNSSKEDKKTFVTTAVRKHESDMQENHNGTKNIVVSSEMQVVPCSMKEIVSSDMKEEDHSSPGFLAENLFADLGFTCSSNAADKTTEENPATVLQSSPKISDQLRKISNSLKLLNSMAPSIVKQKTDIVRPQSFDLVEAEPKTPEVNLKLWHAQDAQESLKARSTGIKKSLAKECLLFLNSANKEQLKSLKGIGEKRANYILELREESPLKEIDDLKSIIGMSKREIDKMMSKLISDSEMNE

SEQ ID NO: 186185 - protein, 500 aa, Zea Mays
MEEAACTAAPSLPYHSPWIRTAPVRVVAKICPGGDPTGSMQVSARVPDPANSSSASVSFVPIIKESALSNMTHRKHREHKLDWCYLNDDSYTDIFHNEVKQLVDKIFSSDGHNHACVVTCGSTSKTHLVIGSDHQPGLLTMAMERIFDYAKPIRATVSVSSYHVLQDSHVFDLLDPKNNEVLVREDADGRTHLKGLSMVEINSIQEFQNLCYDSDKHQNRTKVSKAKGHNGFIIFISKSDQNGKESSVSKMHFLELADHINDKQKSHGERFVQQNSKKSLYAVMDVVQALNSHQSFIPYRKSKITHILQDSLSKTGGALLIACLDEVSCQDAISTLSLASRSSQVVNEQRYNLSLITKGCSKSNVKLSVNNKNLSRSLLSSIQQQSPVLEKPYKTQVNNIAVKATRSLNANKRSETSTHSAKKTVNLVSASINLKHSGAKSILRERNFFIPTTNSSKEDKKTFVTTAVRKHEVCILSILYLHLPLTISEHIYIRVFYIIS

SEQ ID NO: 186186 - protein, 657 aa, Zea Mays
MEEAACTAAPSLPYHSPWIRTAPVRVVAKICPGGDPTGSMQVSARVPDPANSSSASVSFVPIIKESALSNMTHRKHREHKLDWCYLNDDSYTDIFHNEGSDHQPGLLTMAMERIFDYAKPIRATVSVSSYHVLQDSHVFDLLDPKNNEVLVREDADGRTHLKGLSMVEINSIQEFQNLCYDSDKHQNRTKVSKAKGHNGFIIFISKSDQNGKESSVSKMHFLELADHINDKQKSHGERFVQQNSKKSLYAVMDVVQALNSHQSFIPYRKSKITHILQDSLSKTGGALLIACLDEVSCQDAISTLSLASRSSQVVNEQRYNLSLITKGCSKSNVKLSVNNKNLSRSLLSSIQQQSPVLEKPYKTQVNNIAVKATRSLNANKRSETSTHSAKKTVNLVSASINLKHSGAKSILRERNFFIPTTNSSKEDKKTFVTTASDMQENHNGTKNIVVSSEMQVVPCSMKEIVSSDMKEEDHSSPGFLAENLFADLGFTCSSNAADKTTEENPATVLQSSPKISDQLRKISNSLKLLNSMAPSIVKQKTDIVRPQSFDLVEAEPKTPEVNLKLWHAQDAQESLKARSTGIKKSLAKECLLFLNSANKEQLKSLKGIGEKRANYILELREESPLKEIDDLKSIIGMSKREIDKMMSKLISDSEMNE

SEQ ID NO: 186187 - protein, 689 aa, Zea Mays
MEEAACTAAPSLPYHSPWIRTAPVRVVAKICPGGDPTGSMQVSARVPDPANSSSASVSFVPIIKESALSNMTHRKHREHKLDWCYLNDDSYTDIFHNEVKQLVDKIFSSDGHNHACVVTCGSTSKTHLVIGSDHQPGLLTMAMERIFDYAKPIRATVSVSSYHVLQDSHVFDLLDPKNNEVLVREDADGRTHLKGLSMVEINSIQEFQNLCYDSDKHQNRTKVSKAKGHNGFIIFISKSDQNGKESSVSKMHFLELADHINDKQKSHGERFVQQNSKKSLYAVMDVVQALNSHQSFIPYRKSKITHILQDSLSKTGGALLIACLDEVSCQDAISTLSLASRSSQVVNEQRYNLSLITKGCSKSNVKLSVNNKNLSRSLLSSIQQQSPVLEKPYKTQVNNIAVKATRSLNANKRSETSTHSAKKTVNLVSASINLKHSGAKSILRERNFFIPTTNSSKEDKKTFVTTASDMQENHNGTKNIVVSSEMQVVPCSMKEIVSSDMKEEDHSSPGFLAENLFADLGFTCSSNAADKTTEENPATVLQSSPKISDQLRKISNSLKLLNSMAPSIVKQKTDIVRPQSFDLVEAEPKTPEVNLKLWHAQDAQESLKARSTGIKKSLAKECLLFLNSANKEQLKSLKGIGEKRANYILELREESPLKEIDDLKSIIGMSKREIDKMMSKLISDSEMNE

SEQ ID NO: 186188 - protein, 326 aa, Zea Mays
MMRYPRPSSDGLPLPNGIGSGGGGASKKPATPPPRSSKDDVAPAVATDSSRLAAFLASTSLESKARARAPPAQPAPTSAATAAVAATKSPVRDHDHGHGHSHGASSDHSDPASPSSTGTGELLLQWGQNKRMRCRRDSASPSPQHRQAGGKIQRRSSSPAVDKLMPPPSAAPYTRGSNLRSVSSLPPRSGSGSGSGSSAGALPHPLRSAEDRAAGKFSAARAEKQRAVSPGSVMGMGVPVPDPRRQQQQQHAGAAAAATSKPASKVEMPRIYTTLSRKEKEEDFMAMKGTKLPQRPKRRPKIVEKTVSQQKNRGLKGMEGMDSDSD

SEQ ID NO: 186189 - protein, 265 aa, Zea Mays
MMRYPRPSSDGLPLPNGIGSGGGGASKKPATPPPRSSKDDVAPAVATDSSRLAAFLASTSLESKARARAPPAQPAPTSAATAAVAATKSPVRDHDHGHGHSHGASSDHSDPASPSSTGTGELLLQWGQNKRMRCRRDSASPSPQHRQAGGKIQRRSSSPAVDKLMPPPSAAPYTRGSNLRSVSSLPPRSGSGSGSGSSAGALPHPLSNRRIEASRGWRAWTATPTDHRRQPELPARGAVAAEEEEGSATVTGDEERALLYMVALG

SEQ ID NO: 186190 - protein, 464 aa, Zea Mays
MEPSPAAGELGAMLRAAADFASYPGLHSDDTVRQFLERCPLPKLLGALQSEEDVPGMVETVTECLDKIFSSRYGASLLPNYGAFIQAGLLTDSKQIRKLACKAVLHLLDKAEDGGAAVETVVQHNLYPLLIKCLIEGDEEISAIILDTVKRLAQIPKGAEVIFPPDGQGSVQLGKVAAQSSSLARIRILSLIAKLFTVSSYTATAIRDSNLLSIFEEEIKDRRDMLKTLSALEVLYELVEHPHSNIFLLKTNLLQLIIDIINDSSADSVIRSRAALVSGRLLSSADAFTAIDKSCVTNLLIAIGRILKMEESKNTDEIESALETLGLIGTTSQGAHFLLTSSNVARHVVESSFDRQGRGRQLAALHAFGNICGVGRQEDQMKLDSEAEENLKRLVYTTAANSPKLTPSALLLSVLQQDPDVRIAGYRVITGLVIREWCLREVCLNSEIIRFVTDPTMETTKLGK

SEQ ID NO: 186191 - protein, 376 aa, Zea Mays
MEPSPAAGELGAMLRAAADFASYPGLHSDDTVRQFLERCPLPKLLGALQSEEDVPGMVETVTECLDKIFSSRYGASLLPNYGAFIQAGLLTDSKQIRKLACKAVLHLLDKAEDGGAAVETVVQHNLYPLLIKCLIEGDEEISAIILDTVKRLAQIPKGAEVIFPPDGQGSVQLGKVAAQSSSLARIRILSLIAKLFTVSSYTATAIRDSNLLSIFEEEIKDRRDMLKTLSALEVLYELVEHPHSNIFLLKTNLLQLIIDIINDSSADSVIRSRAALVSGRLLSSADAFTAIDKSCVTNLLIAIGRILKMEESKNTDEIESALETLGLIGTTSQGAHFLLTSSNVARHVVESSFDRQGRGRQLPQTWSNHGLPTATN

SEQ ID NO: 186192 - protein, 110 aa, Zea Mays
MPKENYPDIDASAHSGRRFTKNSKYNWYLVPKEICPKSDVKLKVELVPKEICPVRNLKANAKGDLPPKELLISTAKGDLPSKSDGTKPYETSIKLNENFLMDIIWKSLRC

SEQ ID NO: 186193 - protein, 88 aa, Zea Mays
MVSIPVAIPTRRHARSREPRPAHRRRRRRGSYCAPLPPRLNPSPNPWTMASSKLLSSNGSNPSEEAEAKTCSTTTNNTKSHQITARSS

SEQ ID NO: 186194 - protein, 658 aa, Zea Mays
MAWWSGKVSLSGLQDIAGAVNKISESVKNIEKNFDSALGLEEKRDDEEASGSRTSNSDGIGFFNPVMAFMGHNGEEDGTEVSEKPQFPKDLSVEEENHSTPTKKQTSEVDHSEVSVTTFPEQPSKSEEAHSISNESPVSKADVSEQSITPQTPAHPSVAEEKLDGCTEALASKVGDDEASETSQSPGHPSTVEENQDHQYSKHSCPSDEAEPNQLRESAGDLPDGSAFSSPIKIDKSGDTETGESIDTGKEDTSDGNASQSQPAESMLASSDNITEVEDKIAQEYNVPKELSSPQENCDTVDKVTRLEVKLHDGNIDTKKSEEESNKMEAGEVSVVVQEDNVMEQPEDLMSKSITAAHDSHSQNESVVSLTDVPAGLGGVGPADNFTEEEKIARITDFQIVDSVVSVGELEKLRREMKMMEAALQGAARQSQSKADEIARLMNENEQLKSTIDDLKSKSSEAEMDALKDEYHQRVATLERKVYALTKERDTLRREQNKKSDAAALLKEKDEIINQVMAEGEELSKKQAAQEATIRKLRAQIREFEEEKQRLNSKIQVEEAKVESIKRDKMATEKLLQETIERNQTELAAQKEFYTNALNAAKEAEALAEARVNSEAKVELENLLREAGEKENMLIKTIEELRLSLTRQEQELYASIGT

SEQ ID NO: 186195 - protein, 1020 aa, Zea Mays
MAWWSGKVSLSGLQDIAGAVNKISESVKNIEKNFDSALGLEEKRDDEEASGSRTSNSDGIGFFNPVMAFMGHNGEEDGTEVSEKPQFPKDLSVEEENHSTPTKKQTSEVDHSEVSVTTFPEQPSKSEEAHSISNESPVSKADVSEQSITPQTPAHPSVAEEKLDGCTEALASKVGDDEASETSQSPGHPSTVEENQDHQYSKHSCPSDEAEPNQLRESAGDLPDGSAFSSPIKIDKSGDTETGESIDTGKEDTSDGNASQSQPAESMLASSDNITEVEDKIAQEYNVPKELSSPQENCDTVDKVTRLEVKLHDGNIDTKKSEEESNKMEAGEVSVVVQEDNVMEQPEDLMSKSITAAHDSHSQNESVVSLTDVPAGLGGVGPADNFTEEEKIARITDFQIVDSVVSVGELEKLRREMKMMEAALQGAARQSQSKADEIARLMNENEQLKSTIDDLKSKSSEAEMDALKDEYHQRVATLERKVYALTKERDTLRREQNKKSDAAALLKEKDEIINQVMAEGEELSKKQAAQEATIRKLRAQIREFEEEKQRLNSKIQVEEAKVESIKRDKMATEKLLQETIERNQTELAAQKEFYTNALNAAKEAEALAEARVNSEAKVELENLLREAGEKENMLIKTIEELRLSLTRQEQEAAFREERLKRDYDDLQKRYQASELRYNELVTQVPESTRPLLRQIEAMQETSAQREEAWAGVERTLNSRLQEAEAKAAASEEKERSVNERLSQSLSRITVLETQITILRTEQTQLSRSLEKERQRASESRQEYLAIKEEAAMQEGRAKQLEEEIKDLRVKHKEELQEAAEHRELLEKDLEREKAARAEIEKTSSREAPKVPLPDQTRNAPLRKLPSSGSINSLEESHFLQASLDLSDNASLERRMSSESNMSYYLRTMTPSAFESALRQKDGELASYMSRLASLESIRNSLAEELVKLTEQCEKLRTEAAAVPGLRAELEALKQRHFQALELMGERDEELEELRNDIVDLKEMYREQVDLLVSQALGARV

SEQ ID NO: 186196 - protein, 436 aa, Zea Mays
MPMNLSLLAPPSSPASFSNSALPSTAQSPNCFLSVSANSPGGPTSNMFAVGPYANEPQLVSPPVFSTYTTEPSTAPLTPPPELAHATTPSSPDVPYARFLSSSMDIKTASKEHNMPFLSTTYSGGSGLQASYPLYPESPCSSLISPASVTPRTGLSSPIPEQEVPPAHWKTSRSACDTPYFRASPIPEQETTAQWKTSRSACDTPYARTSPTNIFGLDSNTPRNYMLDSNFFRPAASAQFYLDQAQQAFPHNGGRVSVSREKQDADEIEAYRASFGFSADEIVQSQSYVGIPDAVDESFSISPFGNNAPATEICPFSDLPSEVQKADKSCTYVKDGTSPKKSANQLSIDSPNKVLRLDVFKVTKGGHLSEDEGIARDGHPFRRTTDEISLKPIEVRKKSPPGHSCSDAEIEYRRTRSLRDANGVLSRRSALARQLH

SEQ ID NO: 186197 - protein, 103 aa, Zea Mays
MKVEFSSLSYSCLRNIQWLPRKLGFSPKFTIRTLTRICLDILKDKWSPALQIRTVLLSIQALLSAPNPDDPLSDNIAKHWKSNEAEAFETAKEWTRLYASGAL

SEQ ID NO: 186198 - protein, 121 aa, Zea Mays
MRYFNVMILGPAQSPYEGGVFKLELFLPEEYPMAAPKVRFLTKIYHPNIDKLGRICLDILKDKWSPALQIRTVLLSIQALLSAPNPDDPLSDNIAKHWKSNEAEAFETAKEWTRLYASGAL

SEQ ID NO: 186199 - protein, 93 aa, Zea Mays
MRQLSPLHQVRFLTKIYHPNIDKLGRICLDILKDKWSPALQIRTVLLSIQALLSAPNPDDPLSDNIAKHWKSNEAEAFETAKEWTRLYASGAL

SEQ ID NO: 186200 - protein, 519 aa, Zea Mays
MASPARPAAASVSAAFGLSPDPKRCSFDQALRHKENRLLMSFVNYHDQEKVSKEIVTDAIESCMKKQADNLLNSLEVISGRLSQLELYCYKLERSIGELRSDVMDYHNEANLNFQCLDKQLKEKSVQVVQERQELAETQKEMTKLQIVHEDSAQKSERSAPSVFINRENEIALVPLHQVNSVQSPAVQFQSCSGLILQQLVPVQDQQRSNQTAMYCMRGQSHLEHRQAQMFQAAAQPVQTHTTRKTQAHTVLEVPQVTTRQTPEFYAQPQHQWQHQTGQQLQSQVRQPQPQVVQQQQQYNNIQQGPAQMVQPQTSSPHAHSTPQITLVYPPYGAHQSACGNAEARTGSIVVPPSHSTISSSQRKHHEAAPIYVQSNTVSVPLTEQHQQLHSLGNGSFVPQPSKVSPCGVASYTVQGNAQAYSPAYGSPSSNPATIVAVLNQQAHCSAPMVLHHLGPSQSVQNHPIGIADKVARMGYPKDQVVDGLALRMVDAGQPAECNTLHDRLSSVTHAVAPQAWSG

SEQ ID NO: 186201 - protein, 717 aa, Zea Mays
MAGIDLNDTVEEDEEEAEPGNACSQQSRTSSAATFPPPPPNQPRPSAAVCLELWHACAGPVAPLPRKGSVVVYLPQGHIEHLGDAAAAGGGAPPPVALPPHVFCRVVDVTLHADASTDEVYAQLALVAENEDVARRLRGRSEDGSAEDGDEGETVKQRFSRMPHMFCKTLTASDTSTHGGFSVPRRAAEDCFPPLDYSQQRPSQELVAKDLHGTEWRFRHIYRGQPRRHLLTTGWSAFVNKKKLVSGDAVLFLRGDNGELRLGVRRAAQLKNGSAFPALYNQCLNLGSLPNVAHAVATKSVFHIYYNPRLSQSEFIIPFSKFIKSFSQPFSAGSRFKVKYESDDASERRCTGIIAGIGDADPMWRGSKWKCLMVRWDDDVDFRQPNRISPWEIELTSSVSGSHMSAPNAKRLKPCLPHVNPDYLVPNGSGRPDFAESAQFHKVLQGQELLGYRTHDNAAVATSQPCEATNMQYIDERSCSNDASNIIPGVPRIGVRTPLGSPRFSYRCSGFGESPRFQKVLQGQEVFHPYRGTLVDASLSNSGFHQQDGSHVPTQASKWHAQLHGCAFRGQQAPAVPSQSSSPPSVLMFQRGDPKMSPFEFGHFHVNKKEDRRAMFVHAGGIGGTEQTTMLQAHHVSGGTGNRDVTVEKSHPAVAAASDNREVSKNSCKIFGISLTEKVPAMKEKGCGDINTNYPSPFLSLKQQVPKSLGNSCATGD

SEQ ID NO: 186202 - protein, 393 aa, Zea Mays
MRVLCRCTGIIAGIGDADPMWRGSKWKCLMVRWDDDVDFRQPNRISPWEIELTSSVSGSHMSAPNAKRLKPCLPHVNPDYLVPNGSGRPDFAESAQFHKVLQGQELLGYRTHDNAAVATSQPCEATNMQYIDERSCSNDASNIIPGVPRIGVRTPLGSPRFSYRCSGFGESPRFQKVLQGQEVFHPYRGTLVDASLSNSGFHQQDGSHVPTQASKWHAQLHGCAFRGQQAPAVPSQSSSPPSVLMFQRGDPKMSPFEFGHFHVNKKEDRRAMFVHAGGIGGTEQTTMLQAHHVSGGTGNRDVTVEKSHPAVAAASDNREVSKNSCKIFGISLTEKVPAMKEKGCGDINTNYPSPFLSLKQQVPKSLGNSCATVHEQRPVVARVIDVSTVDMMI

SEQ ID NO: 186203 - protein, 333 aa, Zea Mays
MSAPNAKRLKPCLPHVNPDYLVPNGSGRPDFAESAQFHKVLQGQELLGYRTHDNAAVATSQPCEATNMQYIDERSCSNDASNIIPGVPRIGVRTPLGSPRFSYRCSGFGESPRFQKVLQGQEVFHPYRGTLVDASLSNSGFHQQDGSHVPTQASKWHAQLHGCAFRGQQAPAVPSQSSSPPSVLMFQRGDPKMSPFEFGHFHVNKKEDRRAMFVHAGGIGGTEQTTMLQAHHVSGGTGNRDVTVEKSHPAVAAASDNREVSKNSCKIFGISLTEKVPAMKEKGCGDINTNYPSPFLSLKQQVPKSLGNSCATVHEQRPVVARVIDVSTVDMMI

SEQ ID NO: 186204 - protein, 435 aa, Zea Mays
MDSLRSLVLSSSSDDSDDEIDNLLLWQHVEHLVLGDTRTRRRRSSLPRRVIHRDHAAGENLIKHHYFGPNPVYPSHVFRRRFRMQRPLFLRILRAVQREDDYFTLRCDATGLAGLGPLQKVCAALRILAYGLPSDAVDEYIQIGQTTARDCLIRFCRAIISSFSEQYLRIPNHDDIARILSVNADRGFPGMLGSIDRMHWEWRNCPTAWRGQFCGRNSRPTMILEAVAGYDLWIWHAFFGMPGTNNDLNVLHRSPVFDPLRNGTMPPVHFTINGTTYNFGYYLADGIYPNWPTFVKAIRHAFEEKKVHFTTKQESCRKDIERAFGVLQARWAVLRGPAYGWDRNHLAEMMTACIIMHNMIVEDEGDGAANLDFVGPTGPPEVCNNIPEVRNEWLNNHIRSELPNDPDQDITSQTTYLSLQHNLIEHLWARRGSMG

SEQ ID NO: 186205 - protein, 294 aa, Zea Mays
MAEHLASIFGTEKDRVNCPFYFKIGACRHGDRCSRLHNRPTISPTLVLANMYQRPDMITPGVDAQGQPIDPEKMQEHFEDFYEDIYEELGKFGEIENLNVCDNLADHMIGNVYVQFREEEQAAAAYNALQGRFYSGRPIIVEYSPVTDFREATCRQFEENSCNRGGYCNFMHVKQIGRDLRRKLYGRSASRRYHGRSRSRSPPPQRRGHRDRDDYHHRDRDDYRGGGGGGRGRGSRYDRYDDGAGRGGRHDRYDDGGRRRHGSPSRRARSPVRESSEERRAKIEQWNREREGKQ

SEQ ID NO: 186206 - protein, 490 aa, Zea Mays
MTHRNMLWTHQSVNPEWEQRHAQVQPGSSYYAGTASDSSNLGVQVAVGVPGNTANVGICDLRNHECPHVHNSYPHAGVTSRFVFPTTMYNPSMSAAAVNIYIPQTQSFGLGSVLPPSLHNQVPTGTIDESSSSVNFGDSAIGFMKRKNAVVAGSHHFLHGFAGSSSSVHVPQNPVHGPWNPSSQSNCLPSSAASNLPEYHNSNGWPYLEESSADASNSFSSVAACQELAPHGNYLYPACHISQSNTWVPQPAGYGVPQWGYSNAVVNPPAADMSNGPLPHFCQNSMQAPQIQVSHQQFIGNNAVHGLNPSATGLPLHPRMLALPFNAEHTFGHPMHPPLINQVNNGALRILPYQNATVMDHSRIYEAGHVIDEHSDMRLDVDNMTYEELVALQEQIGDVNTGLTESYIQENLRSSFHVPGAASMSDQFSELSLENDACIICQEEYKAKELIGTLECGHKYHVNCIKQWLMMKNLCPICKTTALSSDRRNG

SEQ ID NO: 186207 - protein, 665 aa, Zea Mays
MAPPTSASARPLSLPLTVPLSCHRSHLLPAPNARLLTRRRVALAPTRPGATLLSSLSDAREEEEDESGFYEEDEQQEFEDEEEQGYDGENEELVEVGYVSGAHGVRGDVLVTPRTDFPELRLATPGTRWLRARAAGKQQVREFELVRGRAHTGKKSWIVSFDGVNNLDEARQIVGSAVLVKARDRPEIEDDEFYSLDLVGMRVIVKDTGKLVGTVGQVFNFGGGDLLQVIMGSSEGTAVDPDSENQDSISSREHVWIPFAEDIVPDVDMASREMRITPPKGLLELNSRSDKRSKKERRAMEWKDRKRFQRRVIAGKKVLSEMDQVHVLEGLVSGDKVQKASLAEQIGSIDFQLFRHAVHCVSKQIESSSMNLLANSSLSRKKVIKIPYKTLINLGDKAEHAFSTEFKNGLDILLKSKAAIVLVRNGSDSDTEFLSLLNSFSELMKVVENKVSPPLIVIAPAGHVESVRKCLVENDYFGFDTQKNHSQVWVLEEVELPVVSICSEGNRKKVLMKSPWEIIKKPTGSGAIFSLLLSNKILETLNEMGVQYTQICSSSNKPIIGHPLLFGAVASRGADVGIQVSKTGETLDDFDVILSIDQLNKMCRDVTQIRFSARSEQNVHVEHVDGQWVAVQPEVANSHRLHAEVTSVLDSCAPDKLCVMEIVEQ

SEQ ID NO: 186208 - protein, 313 aa, Zea Mays
MAPPTSASARPLSLPLTVPLSCHRSHLLPAPNARLLTRRRVALAPTRPGATLLSSLSDAREEEEDESGFYEEDEQQEFEDEEEQGYDGENEELVEVGYVSGAHGVRGDVLVTPRTDFPELRLATPGTRWLRARAAGKQQVREFELVRGRAHTGKKSWIVSFDGVNNLDEARQIVGSAVLVKARDRPEIEDDEFYSLDLVGMRVIVKDTGKLVGTVGQVFNFGGGDLLQVIMGSSEGTAVDPDSENQDSISSREHVWIPFAEDIVPDVDMASREMRITPPKGLLELNSRSDKRSKKERRAMVRSGRTGKGFNVV

SEQ ID NO: 186209 - protein, 388 aa, Zea Mays
MRITPPKGLLELNSRSDKRSKKERRAMEWKDRKRFQRRVIAGKKVLSEMDQVHVLEGLVSGDKVQKASLAEQIGSIDFQLFRHAVHCVSKQIESSSMNLLANSSLSRKKVIKIPYKTLINLGDKAEHAFSTEFKNGLDILLKSKAAIVLVRNGSDSDTEFLSLLNSFSELMKVVENKVSPPLIVIAPAGHVESVRKCLVENDYFGFDTQKVWVLEEVELPVVSICSEGNRKKVLMKSPWEIIKKPTGSGAIFSLLLSNKILETLNEMGVQYTQICSSSNKPIIGHPLLFGAVASRGADVGIQVSKTGETLDDFDVILSIDQLNKMCRDVTQIRFSARSEQNVHVEHVDGQWVAVQPEVANSHRLHAEVTSVLDSCAPDKLCVMEIVEQ

SEQ ID NO: 186210 - protein, 223 aa, Zea Mays
MASSTMALSSTAFAGKAVNVPSSSAFGEARVTMRKTAAKAKPAAASGSPWYGPDRVLYLGPLSGEPPSYLTGEFPGDYGWDTAGLSADPETFAKNRELEVIHSPLGHAGRARLRLPGASRPQRRQVRRGRVVQGRLPDLQRGRAGLPREPEPHPRAEHPCHLGLPGRAHGRRRGLPHRRRPARRGLRRAQGQGAQERPPRHVLHVRILRPGHRHREGPAREPR

SEQ ID NO: 186211 - protein, 751 aa, Zea Mays
MSGGGAGGKGAAAPVPPGSRKLVQGLKEIVNRPEAEIYAALRECGMDPDETVSRLLSQDTFQEVKSKRDKKKEIKEVPETRYRSANSSTNRGLRSGVDRGGRNNSMHSSSTDNMTSRPPGSGTASGTSSQRQTVASPSANKHMVADGPAASLQSSSGFQHGGWSGTPGQLSMADIVKMGRPQGKTSIKPVVTADRGYAGQYPSLPSTNQNLKQSGSMVPPTELDKGLQPAQDSVQVKDHDHSTADSKLPYVEDSSADVSAAAANFQSLSLHNDELAAKKSAEDNPAVIIPDHLQVTNTECVKLSFGSFGSGAFSGLLPQNTTDSNVEFPAREESAPVDQIDARNQDYYESGAVTSPADENLEAMLGANMENVDAPSVSQANELRQDVLDPSELQYDVPSVPSHAYSNTDTLQPSTIEEPQGNNQAHTLSHLSNLMQANPLSTSSLLGSNQNHATLHGLEFDLPPYLGAKYNAGSTTNPRPPISMQQEALKAGVFSNAQSTQSLPSTSIQTGLPLPQQLAHHPYSQPTLPITHFPNMVGYPYLPQNYATYLSSGTFQQAYPSSGPFHQSAAAALLASGMKYSTPEYKNNLSATGLQQQHQPQPQPLSSVISGYGGFGSSSNIQGNFTLSQSTGSASALGFDEALSRQYKNTSQYMALQQGDNSGMWVHGSGSRAASTLPPNHFYGYQGQSQLGGFARAQQPQPSQFGGHGYPTVYQSQGQEHPQNLAEGSLNGFQVTPSQPSHPSWQHQHTY

SEQ ID NO: 186212 - protein, 817 aa, Zea Mays
MCSRMLAVDLWICPRFLNSWLHWKYTFQEVKSKRDKKKEIKEVPETRYRSANSSTNRGLRSGVDRGGRNNSMHSSSTDNMTSRPPGSGTASGTSSQRQTVASPSANKHMVADGPAASLQSSSGFQHGGWSGTPGQLSMADIVKMGRPQGKTSIKPVVTADRGYAGQYPSLPSTNQNLKQSGSMVPPTELDKGLQPAQDSVQVKDHDHSTADSKLPYGTDWSPQDGPTFANQSSLPEPSGDPSLYEASFQSSTLVTDVVNSHENSHLDENDTFAMGPAPASERHLDPSDGISEYNDVILNNSSSYQPHNYSYTEQQEVEDSSADVSAAAANFQSLSLHNDELAAKKSAEDNPAVIIPDHLQVTNTECVKLSFGSFGSGAFSGLLPQNTTDSNVEFPAREESAPVDQIDARNQDYYESGAVTSPADENLEAMLGANMENVDAPSVSQANELRQDVLDPSELQYDVPSVPSHAYSNTDTLQPSTIEEPQGNNQAHTLSHLSNLMQANPLSTSSLLGSNQNHATLHGLEFDLPPYLGAKYNAGSTTNPRPPISMQQEALKAGVFSNAQSTQSLPSTSIQTGLPLPQQLAHHPYSQPTLPITHFPNMVGYPYLPQNYATYLSSGTFQQAYPSSGPFHQSAAAALLASGMKYSTPEYKNNLSATGLQQQHQPQPQPLSSVISGYGGFGSSSNIQGNFTLSQSTGSASALGFDEALSRQYKNTSQYMALQQGDNSGMWVHGSGSRAASTLPPNHFYGYQGQSQLGGFARAQQPQPSQFGGHGYPTVYQSQGQEHPQNLAEGSLNGFQVTPSQPSHPSWQHQHTY

SEQ ID NO: 186213 - protein, 268 aa, Zea Mays
MQQEALKAGVFSNAQSTQSLPSTSIQTGLPLPQQLAHHPYSQPTLPITHFPNMVGYPYLPQNYATYLSSGTFQQAYPSSGPFHQSAAAALLASGMKYSTPEYKNNLSATGLQQQHQPQPQPLSSVISGYGGFGSSSNIQGNFTLSQSTGSASALGFDEALSRQYKNTSQYMALQQGDNSGMWVHGSGSRAASTLPPNHFYGYQGQSQLGGFARAQQPQPSQFGGHGYPTVYQSQGQEHPQNLAEGSLNGFQVTPSQPSHPSWQHQHTY

SEQ ID NO: 186214 - protein, 352 aa, Zea Mays
MGTRGVALLLLAAVLLLQALLLASSEGLVRVALKKLPVDQNGRVAARLSAEERQRLLLRGANALGSGGDDDSDVIALKNYMNAQYFGEIGVGSPQQKFTVIFDTGSSNLWVPSSKCYFSIACYFHSRYKSGQSSTYKKNGKPAAIRYGTGSIAGFFSEDSVTLGDLVVKDQEFIEATKEPGLTFMVAKFDGILGLGFQEISVGNATPVWYNMVKQGLISDPVFSFWFNRHADEGEGGEIVFGGMDSSHYKGDHTFVPVTRKGYWQFNMGDVLVDGKSTGFCAGGCAAIADSGTSLLAGPTAIITEINEKIGAAGVVSQECKTVVSQYGQQILDLLLAETTSEDLFSGWSVHF

SEQ ID NO: 186215 - protein, 426 aa, Zea Mays
MAPPPQPKQLVLAASSADAGVAAWDLRTGAEDIRLRPCASRPRSLASVADRFLASAQALPAGGNSGTIHFYYWDKPQVAVKSFPAEPIRALIADQEGSYLIGGGSNGNIFLWEVSSGELLHTWHAHYRAVRCLGLYDYLLVSGSEDGTIKVWDLITVLDEQSRLEVQTPYLYSFSQHALPVTDIACFLGAIAISSSEDRTCKIWSLSEGRMLRSISFPTSIDSIALDPRSHIFYAGGRDGKIYVTAMGVDLSFHGRDESSILGALDDHSKAVTSLASSRDGLLLVSGSEDGNVRVWDTRCQQVTRKFKHSQVTNVLIVTPQRVNLPPLQPLRKVRSANGEAERQAVLLHRPENDVPIPGNKTFIFMERYLDELQKHGGSSRLFDFGPNAQNGTPNQQGTEWRDRYLELQDLFVHEVLHQMPSSRNP

SEQ ID NO: 186216 - protein, 256 aa, Zea Mays
MLLVVSSGELLHTWHAHYRAVRCLGLYDYLLVSGVLDEQSRLEVQTPYLYSFSQHALPVTDIACFLGAIAISSSEDRTCKIWSLSEGRMLRSISFPTSIDSIALDPRSHIFYAGGRDGKIYVTAMGVDLSFHGRDESSILGALDDHSKAVTSLASSRDGLLLVSGSEDGNVRVWDTRCQQVTRKFKHSQGPVTNVLIVTPQRVNLPPLQPLRKVRSANGEAERQAVLLHRPENDVPIPGNKTFIFMERYLDELQVI

SEQ ID NO: 186217 - protein, 115 aa, Zea Mays
MGRLNGRQYFFIGLKMMSQFLEIRPSFLWSATWMSFRSMVVHPGYLILGRMLRMALQTNREQNGEIDTWSCRISLYMRSSIRCHPRGTHDAHALDIDHLWCRNSDGCHSGYKRCR

SEQ ID NO: 186218 - protein, 469 aa, Zea Mays
MDDDVLLQEMEELTSVIDRKKKREKKRLSKRRAKDKARKATGMQVDATGDDYGDPDLFSISVIKGGKELEAVESAEIDVEDEIGDGDNEDTQALEDSDEEMDSDDEQQRYDAQLEEMLDEAYERFVTKKGGEIKQERKRAKRINPDADAELLEGGEDDGDVEMDQDFDEDQDQEANPLLFALDEQKPTKEQIVKQWYSQDVFTEAATGVTERSDTEDEREILQRNKKMDTGKREKVAKAQDLQHDGFEIVPAEPVQNEEDSSSSSDESEDDIDDYRKAEVLAYAKKMLRKKQREQILDDAYNKHMFDDEGLPNWFVEDEKRHRQPMKPVSREEVAAMRAQFKEIDARPSKKVAEAKARKKRVAMKKLDKARQKADAIADQNDINELSKRKMIDRIYRKAMPKKPQKEYVVAKKGVQVRAGKGKVLVDPRMKKDKRASGTGKKGGKGAKGKGGQKGMRGKAGKKAGKAPR

SEQ ID NO: 186219 - protein, 703 aa, Zea Mays
MGKAKGKQRQDKFYHLAKEQGYRSRAAFKLLQLDARFHFLPTARSVLDLCAAPGGWVQVAVNHAPVGAFVVGVDLVPIRPIRGAHSLTEDITATKCRAAVRRLMDSNGVSAFDVVLHDGSPNVGGAWAQEATSQSALVIDALRLATMFLAPKGAFITKVFRSQDYNAIMYCLKQLFEKVEATKPTIKNFCEDLLLLDKHSFKHILKWRIRLRKSLSASSQVTPKVNDAVESTKVMDDDVLLQEMEELTSVIDRKKKREKKRLSKRRAKDKARKATGMQVDATGDDYGDPDLFSISVIKGGKELEAVESAEIDVEDEIGDGDNEDTQALEDSDEEMDSDDEQQRYDAQLEEMLDEAYERFVTKKGGEIKQERKRAKRINPDADAELLEGGEDDGDVEMDQDFDEDQDQEANPLLFALDEQKPTKEQIVKQWYSQDVFTEAATGVTERSDTEDEREILQRNKKMDTGKREKVAKAQDLQHDGFEIVPAEPVQNEEDSSSSSDESEDDIDDYRKAEVLAYAKKMLRKKQREQILDDAYNKHMFDDEGLPNWFVEDEKRHRQPMKPVSREEVAAMRAQFKEIDARPSKKVAEAKARKKRVAMKKLDKARQKADAIADQNDINELSKRKMIDRIYRKAMPKKPQKEYVVAKKGVQVRAGKGKVLVDPRMKKDKRASGTGKKGGKGAKGKGGQKGMRGKAGKKAGKAPR

SEQ ID NO: 186220 - protein, 213 aa, Zea Mays
MGRLLEGFGVGIISYTVPVYIAEISPQNMRGALGSVNQLSVTFGIFLAYLLGMFIPWRLLAVIGALPCTMLIPGLFFIPESPRWLAKMNLTEDCETSLQVLRGFETDITTEVNDIKRAVASSSKRTTISFQELNQKKYRTPLLLGIGLLVLQNLSGINGVLFYASSIFKAAGPCYWSYNMAVRPSWTTHPSHYFYLWHDSMPSCRFCCIFSQG

SEQ ID NO: 186221 - protein, 351 aa, Zea Mays
MGGGSNRGGAGAGEESGSDHDGVLRRPLLNTGSWYRMSSRQSSFAPGTSSMAVLRESHVSAFLCTLIVALGPIQFGFTSGFSSPTQDAMVRDLNLSISEFSAFGSLSNVGGMVGAIASGQMAEYIGRKGSLMIAAIPNIIGWLAISFAKDASFLYMGRLLEGFGVGIISYTVPVYIAEISPQNMRGALGSVNQLSVTFGIFLAYLLGMFIPWRLLAVIGALPCTMLIPGLFFIPESPRWLAKMNLTEDCETSLQVLRGFETDITTEVNDIKRAVASSSKRTTISFQELNQKKYRTPLLGLAYLYCKILVESTVYCFMQVASSKLQGLQTATWPPVHLVLFRSLLLELQHGC

SEQ ID NO: 186222 - protein, 369 aa, Zea Mays
MIAAIPNIIGWLAISFAKDASFLYMGRLLEGFGVGIISYTVPVYIAEISPQNMRGALGSVNQLSVTFGIFLAYLLGMFIPWRLLAVIGALPCTMLIPGLFFIPESPRWLAKMNLTEDCETSLQVLRGFETDITTEVNDIKRAVASSSKRTTISFQELNQKKYRTPLLLGIGLLVLQNLSGINGVLFYASSIFKAAGVTNSDLATCSLGAIQVLATGVTTWLLDRAGRRILLIISTSGMTLCLLAVSVVFFLKDNISQDSNSYYILTMISLVGIVSFVITFSFGMGAIPWLMMSEILPVSIKSLGGSIATLANWLTSFAITMTTNLMLTWSVGGTFLSYMVVSAFTIVFVVLWVPETKGRTLEEIQFSFR

SEQ ID NO: 186223 - protein, 363 aa, Zea Mays
MARSRTSGGGEYESGSDHDGALQKPLLPNSGSWYRMGMGSRQSSLNAAGTSSMAVLRESHVSAFLCTLIVALGPIQFGFTGGYSSPTQASIIRDLNLSISEFSVFGSLSNVGAMVGAIASGQMAEYVGRKGSLMIAAIPNVIGWLAISFAKDSSFLYMGRLLEGFGVGIISYVVPVYIAEISPQNMRGALGSVNQLSVTLGIMFAYLLGLFVPWRLLAVIGTLPCIVLIPGLFFIPESPRWLAKMNMMDDCETSLQVLRGFDADITAELNDIKRAVMSANKRATIRFQELNQKKYRTPLIIGIGLLVLQQLSGINGILFYASSIFKAAVYWTTNIKTANWDKVDLLFLMHYNRFRKANNCTPL

SEQ ID NO: 186224 - protein, 226 aa, Zea Mays
MARSRTSGGGEYESGSDHDGALQKPLLPNSGSWYRMGMGSRQSSLNAAGTSSMAVLRESHVSAFLCTLIVALGPIQFGFTGGYSSPTQASIIRDLNLSISEFSVFGSLSNVGAMVGAIASGQMAEYVGRKGSLMIAAIPNVIGWLAISFAKDSSFLYMGRLLEGFGVGIISYVVPVYIAEISPQNMRGALGSVNQLSVTLGIMFAYLLGLFVPWRLLAVIGKVAIP

SEQ ID NO: 186225 - protein, 426 aa, Zea Mays
MASNNGGAMQEPLLPKAPKSGGWLWKGTRPSASGDLPSSKAVLRPPRHVPALLCTLIVALGPVQFGFTSGYSSPTQDAVIRDLNLSISEFSAFGSLSNVGAMVGAIASGQMAKYVGRRGSLMIAAVPNIMGWLAISFAKDTTFLYVGRLLEGFGVGVISYVVPVYIAEISPHNMRGALGAVNPLSATFGVLLSYVLGLFFPWRLLALIGTLPCLLLVAGLFFIPESPRWLARMNMMDDCETSLQVLRGFDADITEEVNDIKIAVASANKSGTISFRELNQKKYRTPLILGIGLLVLQQLSGINCIIFYSGSIFKAAGLNNSNLDTCLIGAISVLATGVTTTILDRAGRRILLIISSSGMTLSLLAVAVVFCIKDNIAQDSDLYNILRIVSLVGVVVSLSFAFCQGPVVSAPALVPHRLAKGAVGSL

SEQ ID NO: 186226 - protein, 405 aa, Zea Mays
MASNNGGAMQEPLLPKAPKSGGWLWKGTRPSASGDLPSSKAVLRPPRHVPALLCTLIVALGPVQFGFTSGYSSPTQDAVIRDLNLSISEFSAFGSLSNVGAMVGAIASGQMAKYVGRRGSLMIAAVPNIMGWLAISFAKDTTFLYVGRLLEGFGVGVISYVVPVYIAEISPHNMRGALGAVNPLSATFGVLLSYVLGLFFPWRLLALIGTLPCLLLVAGLFFIPESPRWLARMNMMDDCETSLQVLRGFDADITEEVNDIKIAVASANKSGTISFRELNQKKYRTPLILGIGLLVLQQLSGINCIIFYSGSIFKAAGLNNSNLDTCLIGAISVLATGVTTTILDRAGRRILLIISSSGMTLSLLAVAVVFCIKGLSSQSTEYSTLLSSAIRFRITLHKTLTCTTS

SEQ ID NO: 186227 - protein, 448 aa, Zea Mays
MASNNGGAMQEPLLPKAPKSGGWLWKGTRPSASGDLPSSKAVLRPPRHVPALLCTLIVALGPVQFGFTSGYSSPTQDAVIRDLNLSISEFSAFGSLSNVGAMVGAIASGQMAKYVGRRGSLMIAAVPNIMGWLAISFAKDTTFLYVGRLLEGFGVGVISYVVPVYIAEISPHNMRGALGAVNPLSATFGVLLSYVLGLFFPWRLLALIGTLPCLLLVAGLFFIPESPRWLARMNMMDDCETSLQVLRGFDADITEEVNDIKIAVASANKSGTISFRELNQKKYRTPLILGIGLLVLQQLSGINCIIFYSGSIFKAAGLNNSNLDTCLIGAISVLATGVTTTILDRAGRRILLIISSSGMTLSLLAVAVVFCIKILPVSIKCVAGSFATLANWLTSFGITMTANLLLNWSAAGTFASYMMVSAFTLVFVILWVPETKGRTLEEIQWSFQ

SEQ ID NO: 186228 - protein, 448 aa, Zea Mays
MASNNGGAMQEPLLPKAPKSGGWLWKGTRPSASGDLPSSKAVLRPPRHVPALLCTLIVALGPVQFGFTSGYSSPTQDAVIRDLNLSISEFSAFGSLSNVGAMVGAIASGQMAKYVGRRGVPVYIAEISPHNMRGALGAVNPLSATFGVLLSYVLGLFFPWRLLALIGTLPCLLLVAGLFFIPESPRWLARMNMMDDCETSLQVLRGFDADITEEVNDIKIAVASANKSGTISFRELNQKKYRTPLILGIGLLVLQQLSGINCIIFYSGSIFKAAGLNNSNLDTCLIGAISVLATGVTTTILDRAGRRILLIISSSGMTLSLLAVAVVFCIKDNIAQDSDLYNILRIVSLVGVVAYVTAFSFGMGSIPWIIMSEILPVSIKCVAGSFATLANWLTSFGITMTANLLLNWSAAGTFASYMMVSAFTLVFVILWVPETKGRTLEEIQWSFQ

SEQ ID NO: 186229 - protein, 468 aa, Zea Mays
MASNNGGAMQEPLLPKAPKSGGWLWKGTRPSASGDLPSSKAVLRPPRHVPALLCTLIVALGPVQFGFTSGYSSPTQDAVIRDLNLSISEFSAFGSLSNVGAMVGAIASGQMAKYVGRRGSLMIAAVPNIMGWLAISFAKDTTFLYVGRLLEGFGVGVISYVVPVYIAEISPHNMRGALGAVNPLSATFGVLLSYVLGLFFPWRLLALIGTLPCLLLVAGLFFIPESPRWLARMNMMDDCETSLQVLRGFDADITEEVNDIKIAVASANKSGTISFRELNQKKYRTPLILGIGLLVLQQLSGINCIIFYSGSIFKAAGLNNSNLDTCLIGAISVLATGVTTTILDRAGRRILLIISSSGMTLSLLAVAVVFCIKAYVTAFSFGMGSIPWIIMSEILPVSIKCVAGSFATLANWLTSFGITMTANLLLNWSAAGTFASYMMVSAFTLVFVILWVPETKGRTLEEIQWSFQ

SEQ ID NO: 186230 - protein, 369 aa, Zea Mays
MIAAVPNIMGWLAISFAKDTTFLYVGRLLEGFGVGVISYVVPVYIAEISPHNMRGALGAVNPLSATFGVLLSYVLGLFFPWRLLALIGTLPCLLLVAGLFFIPESPRWLARMNMMDDCETSLQVLRGFDADITEEVNDIKIAVASANKSGTISFRELNQKKYRTPLILGIGLLVLQQLSGINCIIFYSGSIFKAAGLNNSNLDTCLIGAISVLATGVTTTILDRAGRRILLIISSSGMTLSLLAVAVVFCIKDNIAQDSDLYNILRIVSLVGVVAYVTAFSFGMGSIPWIIMSEILPVSIKCVAGSFATLANWLTSFGITMTANLLLNWSAAGTFASYMMVSAFTLVFVILWVPETKGRTLEEIQWSFQ

SEQ ID NO: 186231 - protein, 86 aa, Zea Mays
MRRRSALRRKRVRDVAAKVAPRAAPGAGSGTTPLDPAAAATPVRQQQQQTQTQAEVEELAWLDEMYRVGHWGFGRVSFSGSAGKTP

SEQ ID NO: 186232 - protein, 262 aa, Zea Mays
MVSYHPSLLRPSVLIAQASGIGRCPTLNAFLSTPVVSAVPLRLRPLRAAAGGAASPVSGDGGKRAVPPPAALLVFARSNFLPLALVSGVIFGLLDPTLGCLAHKYSLSKFSTFGIFIMSGLTLRTKELGTALEAWPAGLYGLGSVLLFTPFLSQFIMQVQFSPREFITGLAIFCCMPTTLSSGVILTQLVGGNSALALAMTVASNLLGIIIVPLSLARYIGTGAGVSLPTEKLFRSLVTRLLIPLIIGKCKPELTEASWRHS

SEQ ID NO: 186233 - protein, 407 aa, Zea Mays
MVSYHPSLLRPSVLIAQASGIGRCPTLNAFLSTPVVSAVPLRLRPLRAAAGGAASPVSGDGGKRAVPPPAALLVFARSNFLPLALVSGVIFGLLDPTLGCLAHKYSLSKFSTFGIFIMSGLTLRTKELGTALEAWPAGLYGLGSVLLFTPFLSQFIMQVQFSPREFITGLAIFCCMPTTLSSGVILTQLVGGNSALALAMTVASNLLGIIIVPLSLARYIGTGAGVSLPTEKLFRSLVTRLLIPLIIGKVAREASKGIADFVDGNQQGFSVGNAVLLSLVPWIQVSKSRSLILSVQVEAFAAAITVGVLLHIALLAFNIATLHILSHLEKKGDSVFAKKEYTRAVILVTSQKTLPVMITVVEQLGGALGESGLLVIPCVFAHINQIIIDSIIVNWWRRRDQQFSNPK

SEQ ID NO: 186234 - protein, 296 aa, Zea Mays
MVSYHPSLLRPSVLIAQASGIGRCPTLNAFLSTPVVSAVPLRLRPLRAAAGGAASPVSGDGGKRAVPPPAALLVFARSNFLPLALVSGVIFGLLDPTLGCLAHKYSLSKFSTFGIFIMSGLTLRTKELGTALEAWPAGLYGLGSVLLFTPFLSQFIMQVQFSPREFITGLAIFCCMPTTLSSGVILTQLVGGNSALALAMTVASNLLGIIIVPLSLARYIGTGAGVSLPTEKLFRSLVTRLLIPLIIGKVAREASKGFYILHCWLSTLQRCISCHILKRKGIQSLQRKSTHELSFW

SEQ ID NO: 186235 - protein, 317 aa, Zea Mays
MVSYHPSLLRPSVLIAQASGIGRCPTLNAFLSTPVVSAVPLRLRPLRAAAGGAASPVSGDGGKRAVPPPAALLVFARSNFLPLALVSGVIFGLLDPTLGCLAHKYSLSKFSTFGIFIMSGLTLRTKELGTALEAWPAGLYGLGSVLLFTPFLSQFIMQVQFSPREFITGLAIFCCMPTTLSSGVILTQLVGGNSALALAMTVASNLLGIIIVPLSLARYIGTGAGVSLPTEKLFRSLVTRLLIPLIIGKVAREASKGIADFVDGNQQGFSVGNAVLLSLVPWIQVSKSRSLILSVQVEAFAAAITVGVYVYLLSLSK

SEQ ID NO: 186236 - protein, 282 aa, Zea Mays
MVSYHPSLLRPSVLIAQASGIGRCPTLNAFLSTPVVSAVPLRLRPLRAAAGGAASPVSGDGGKRAVPPPAALLVFARSNFLPLALVSGVIFGLLDPTLGCLAHKYSLSKFSTFGIFIMSGLTLRTKELGTALEAWPAGLYGLGSVLLFTPFLSQFIMQVQFSPREFITGLAIFCCMPTTLSSGVILTQLVGGNSALALAMTVASNLLGIIIVPLSLARYIGTGAGVSLPTEKLFRSLVTRLLIPLIIGKVAREASKGIADFVDGNQQGFSVGNAVLLSLVYL

SEQ ID NO: 186237 - protein, 108 aa, Zea Mays
MNLGACFHVMKPLDRRSFRILRHQALDYKSKKAAPQGSSLNNSTKNRMVSPSTEKPKEVLILKTNDYLFLKAMDMKRQKSKIRPHGPLNSMKSSWRLSKLLGGQVCCT

SEQ ID NO: 186238 - protein, 217 aa, Zea Mays
MANQNIFAGAETTTGGNTECVLAPNHTLGNATILPQHCFSAPVIKPSATNVANSRAIGTALSPPPGVMVPVHNAVPSDLSVKDERELKREKRKQSNRESARRSRLRKQAETEELATQVESLAAENTSLRSEIGQLTESSEKLRLENSALMVKLKDTAEPSPIKASASPSSPRASAENFLSMIDSANAPSVSRHTEHGGPRLRQLLDSSPATDVAAVS

SEQ ID NO: 186239 - protein, 215 aa, Zea Mays
MANQNIFAGAETTTGGNTECVLAPNHTLGNATILPQHCFSAPVIKPSATNVANSRAIGTALSPPPGVMVPVHNAVPSDLSDERELKREKRKQSNRESARRSRLRKQAETEELATQVESLAAENTSLRSEIGQLTESSEKLRLENSALMVKLKDTAEPSPIKASASPSSPRASAENFLSMIDSANAPSVSRHTEHGGPRLRQLLDSSPATDVAAVS

SEQ ID NO: 186240 - protein, 282 aa, Zea Mays
MSTPMSVEPAKSTNSKEKNSNKKLKEIDRTAVSAGSGNSKRTVSSIEDYSAEGSSDVNDQNVNETSRKRSSDGGPETTTGGNTECVLAPNHTLGNATILPQHCFSAPVIKPSATNVANSRAIGTALSPPPGVMVPVHNAVPSDLSVKDERELKREKRKQSNRESARRSRLRKQAETEELATQVESLAAENTSLRSEIGQLTESSEKLRLENSALMVKLKDTAEPSPIKASASPSSPRASAENFLSMIDSANAPSVSRHTEHGGPRLRQLLDSSPATDVAAVS

SEQ ID NO: 186241 - protein, 146 aa, Zea Mays
MSDMLRLVNSSEVRIEGLETLDYLDNLSHKERFTEQGDAITFESEVDRVYVSSPNVVAVIDHEKKHSFVIRKEGLPDVVVWNPWEKKSKTMVDLGDEEYKQMLCVDAAAVERAISLRPGEEWTGKLELSAVLSTNCSDHLDHPVSI

SEQ ID NO: 186242 - protein, 121 aa, Zea Mays
MTSRSMTRRTTGYRWITLGKLPDRSVSVNGWGLAFRSCGDCVLRWDPCGHYGWPKSTPHKRTLPYLALFLYHPTTIPFHMRRGRSGKPTIYSPFHKSRASYLLIQRVNIGKAATPVSSSSR

SEQ ID NO: 186243 - protein, 79 aa, Zea Mays
MGSMWALWMAKIHSSQADPSILGTLPLSPHYHPLPYATRTIWEAHHLLPLPQVESFLFINPKGEHRQGRHPSFILLSLS

SEQ ID NO: 186244 - protein, 125 aa, Zea Mays
MTSRSMTRRTTGYRWITLGKLPDRSVSVNGWGLAFRSCGDCVLRQKPSHATLCLSTVVLSLLKSMLDGIHVGIMDGQNPLLTSGPFHTWHSSFITPLPSPSICDEDDLGSPPSTPPSTSRELPIY

SEQ ID NO: 186245 - protein, 118 aa, Zea Mays
MTSTSLLEPKPRLRIWFPAQSAGREAVSCVQNAPRSHDPGTKAVSCVQNTLNAVVLSAFGWAGWVFCILFFFILSSNKNYGKYIVILPQKVKYPNAISPQLATLATTDDRTKSIHSSF

SEQ ID NO: 186246 - protein, 122 aa, Zea Mays
MQKISIALDGQMEGLTSSEIAGFVVGALLLGATIAAPKVDGFIASSQRRSLGMCKRCGDLRIVACSQCKGTGSARSGGMLSLGMLDDLYESLGAEAKTENLVPCTKCRSRGRLLCPECSKVA

SEQ ID NO: 186247 - protein, 108 aa, Zea Mays
MKISSLSPDTFEEVKSKRDRKKTRWQGNLYQGQMWLAGQQMEDLAPNLFLMVSKCIINKRTILEALTDSRWIQDLRGVLSWEVFMEITLLWKLSKGLTCSPALPDRHF

SEQ ID NO: 186248 - protein, 68 aa, Zea Mays
MEDLAPNLFLMVSKCIINKRTILEALTDSRWIQDLRGVLSWEVFMEITLLWKLSKGLTCSPALPDRHF

SEQ ID NO: 186249 - protein, 407 aa, Zea Mays
MLPPSRREFRDIYVIFELMESDLHQVIKANDDLTAEHHQFFLYQLLRGMKYIHAASVFHRDLKPKNILANADCKLKICDFGLARVSFNDTPSAIFWTDYVATRWYRAPELCGSFFSKYTPAIDIWSVGCIFAELLTGKPLFPGKNVVHQLDLMTDLLGTPSAESISKIRNEKARRYMNNMRKKPRVPFTKKFPGIDPMALHLLERLLAFDPKERPSAAEALADPYFNGLANNEREPIAQPISKLEFEFEKRKLAKDDVRELIYREILEYHPQMLQEYLQGADHNQMTFMYPSGVDRFRRQFAHLEEGTAKGEKHSPQLRQNVSLPRERVIGNKHGDGNTGDKLAHASVTDGISQPSLSERSFLKSESISASKCIGEKPKHVKDGESVLESVDETVDDLSKKIPQLKT

SEQ ID NO: 186250 - protein, 231 aa, Zea Mays
MNNMRKKPRVPFTKKFPGIDPMALHLLERLLAFDPKERPSAAEALADPYFNGLANNEREPIAQPISKLEFEFEKRKLAKDDVRELIYREILEYHPQMLQEYLQGADHNQMTFMYPSGVDRFRRQFAHLEEGTAKGEKHSPQLRQNVSLPRERVIGNKHGDGNTGDKLAHASVTDGISQPSLSERSFLKSESISASKCIGEKPKHVKDGESVLESVDETVDDLSKKIPQLKT

SEQ ID NO: 186251 - protein, 72 aa, Zea Mays
MRASASRYGAKKLCQPYRPYGTTSLTSATATTTPPRIPSSRAPFANAASISCSLMQYPTTKKKVQARTLAHQ

SEQ ID NO: 186252 - protein, 83 aa, Zea Mays
MRASASRYGAKKLCQPYRPYGTTSLTSATATTTPPRIPSSRAPFANAASISCRFKQGPLRISEETDNKIFQELKDSLVSPPVF

SEQ ID NO: 186253 - protein, 185 aa, Zea Mays
MDEIDEAFRRLQSPSSNSASSNMCTSQGVFDHSCRITEQEIKVDRKCMNGLERVEPEAGPVAPVVPRHPKSYMEIMEMIQRGERPDDIQDINDDPPNPDQPISEPRMAPKPKPWEKQGQGSLACDLKSLPRESDVLRSEVQHDDGTNQVTESADGANQADSLLQAGVAAGSESPGVPDDAASSLE

SEQ ID NO: 186254 - protein, 184 aa, Zea Mays
MDEIDEAFRRLQSPSSNSASSNMCTSQGVFDHSCRITEEIKVDRKCMNGLERVEPEAGPVAPVVPRHPKSYMEIMEMIQRGERPDDIQDINDDPPNPDQPISEPRMAPKPKPWEKQGQGSLACDLKSLPRESDVLRSEVQHDDGTNQVTESADGANQADSLLQAGVAAGSESPGVPDDAASSLE

SEQ ID NO: 186255 - protein, 173 aa, Zea Mays
MTGIYAANFKLLPFSSMQQEIKVDRKCMNGLGLPMLLIYERVEPEAGPVAPVVPRHPKSYMEIMEMIQRGERPDDIQDINDDPPNPDQPISEPRMAPKPKPWEKQGQGSLACDLKSLPRESDVLRSEVQHDDGTNQVTESADGANQADSLLQAGVAAGSESPGVPDDAASSLE

SEQ ID NO: 186256 - protein, 272 aa, Zea Mays
MAELSTSSDGLVDEEARQQEPGQGSAEGSHGLQDTKEQDIKKGKAALVSTELLREDLVQSAVSFLKHPKVVASSDGQRRSFLVNKGLTMDEIDEAFRRLQSPSSNSASSNMCTSQGVFDHSCRITEEIKVDRKCMNGLERVEPEAGPVAPVVPRHPKSYMEIMEMIQRGERPDDIQDINDDPPNPDQPISEPRMAPKPKPWEKQGQGSLACDLKSLPRESDVLRSEVQHDDGTNQVTESADGANQADSLLQAGVAAGSESPGVPDDAASSLE

SEQ ID NO: 186257 - protein, 200 aa, Zea Mays
MDEIDEAFRRLQSPSSNSASSNMCTSQGVFDHSCRITEEIKVDRKCMNGLERVEPEAGPVAPVVPRHPKSYMEFISSQTWLLKCDLTWQIMEMIQRGERPDDIQDINDDPPNPDQPISEPRMAPKPKPWEKQGQGSLACDLKSLPRESDVLRSEVQHDDGTNQVTESADGANQADSLLQAGVAAGSESPGVPDDAASSLE

SEQ ID NO: 186258 - protein, 150 aa, Zea Mays
MAELSTSSDGLVDEEARQQEPGQGSAEGSHGLQDTKEQDIKKGKAALVSTELLREDLVQSAVSFLKHPKVVASSDGQRRSFLVNKGLTMDEIDEAFRRLQSPSSNSASSNMCTSQGVFDHSCRITEQEIKVDRKCMNGLGLPMLLIYGKY

SEQ ID NO: 186259 - protein, 138 aa, Zea Mays
MNGLERVEPEAGPVAPVVPRHPKSYMEIMEMIQRGERPDDIQDINDDPPNPDQPISEPRMAPKPKPWEKQGQGSLACDLKSLPRESDVLRSEVQHDDGTNQVTESADGANQADSLLQAGVAAGSESPGVPDDAASSLE

SEQ ID NO: 186260 - protein, 1261 aa, Zea Mays
MSYNKTAERRPDDLIEMMTCTVKPSVDFVIDSRNSLHGPATNHVSRIDYGTMANDDSNKKPSPANTSVQSAESDFAVDQKQQSQSWTPISGSISANENHKNSDSHSTRSTVTPPDYAFLQVSDSDTQTQSIKVQQPLKQQPKLLNKKESAAKEDVRIVDDNCSPTSAHITSSSNMSHTDKKVDANPTSASAAMKEAMNFAEARLKAAKALLEGKGDSFKLRKKPSHLKSTRSTEIKSPISVEADTSEQKLWVKKSSEEEKNPDDSLSDKHKKLTAVRLDHFDDNGKKVLPLEKPEHMVQHCTESCQTSSKLQKLGNWKSGNDFFELTRDDQKCKNDEATEGGDKCEQMNPITSVINDHNEIEFNAAGSDLDRYEKLWEVNDGRSVGVKPVNLRENKTAPVDKDSVSVILESSTENKAHQKTHNSIGEGLVTLKNAKESHGTDKCFELPSMSGASTKLDVFKDVSGSFPEARSSVNASDLGDHGNISPNLSPLAGTSQEDTTSKLVSEVSCDGGMQHTSRSNEKLQESSDVSDVAISQGSNIKSFILEELKESDVCDAFMRGPNGKGQEAENYGREKFSFIDGSLLLRPHFHNKGAKMNVISEEVQKVKNEEKLGPCTHPEVTIVDLDGDCPKDLNDVILQNDDFADPEESNMPNVFEVASKLIKRDLDQEMHGSLGHGEEENMEEGTDVHLCDINGKEVDETLLENSVCTDTEEGCAHCNQEDQNSSDSTNRGKSDVDNMCYTSCDEVLSSEMYTRMQHSMQKDGTAAFQTSGGVPGLEEIGDVSNRGGRELSTERSTCEDHGNAIIMEEKDTTTRISKAEHASSPLETMCGVTKSAEAPTTRENMTTADSACEKDKGSSQRVQEENESERRLEKEREVEEKERRKLEKERELAEEKERRKFEKERELAEEKERRKMEKEKEHAEEKERSKLEKEKELAEEKERHKLKKERELAEEKERRRLEEAERERERKKDRLAVERATREAHERAFAEAREKAEKMALERINAARQRASAEAREKEDRASVEPAAERATREARIKAERAAVERATAEARERAIEKAKAEKALAEARERRERYKSSFKESFKSTNQDIRQESQFHRATSSNFIRNPDSSNRAMVEVESALRHKARLERHQRTAERVTKALAEKNTRDLLAQREQAEKHRLSEFLDPEIKRWSNGKEGNLRALLSTLQYILGADSGWQPVPLTDLITAVAVKKAYRKATLCVHPDKLQQRGATIRQKYICEKVFDLLKDAWNKFTSEER

SEQ ID NO: 186261 - protein, 774 aa, Zea Mays
MSYNKTAERRPDDLIEMMTCTVKPSVDFVIDSRNSLHGPATNHVSRIDYGTMANDDSNKKPSPANTSVQSAESDFAVDQKQQSQSWTPISGSISANENHKNSDSHSTRSTVTPPDYAFLQVSDSDTQTQSIKVQQPLKQQPKLLNKKESAAKEDVRIVDDNCSPTSAHITSSSNMSHTDKKVDANPTSASAAMKEAMNFAEARLKAAKALLEGKGDSFKLRKKPSHLKSTRSTEIKSPISVEADTSEQKLWVKKSSEEEKNPDDSLSDKHKKLTAVRLDHFDDNGKKVLPLEKPEHMVQHCTESCQTSSKLQKLGNWKSGNDFFELTRDDQKCKNDEATEGGDKCEQMNPITSVINDHNEIEFNAAGSDLDRYEKLWEVNDGRSVGVKPVNLRENKTAPVDKDSVSVILESSTENKAHQKTHNSIGEGLVTLKNAKESHGTDKCFELPSMSGASTKLDVFKDVSGSFPEARSSVNASDLGDHGNISPNLSPLAGTSQEDTTSKLVSEVSCDGGMQHTSRSNEKLQESSDVSDVAISQGSNIKSFILEELKESDVCDAFMRGPNGKGQEAENYGREKFSFIDGSLLLRPHFHNKGAKMNVISEEVQKVKNEEKLGPCTHPEVTIVDLDGDCPKDLNDVILQNDDFADPEESNMPNVFEVASKLIKRDLDQEMHGSLGHGEEENMEEGTDVHLCDINGKEVDETLLENSVCTDTEEGCAHCNQEDQNSSDSTNRGKSDVDNMCYTSCDEKSGMFPTEEEENYQQKGLHVKIMATQS

SEQ ID NO: 186262 - protein, 104 aa, Zea Mays
MQCVETFYDGNDEKEYRAVNEDLDKFQKRQGSFSKKMARSCERFEFQPASWWRLYGGGAPDLQYMAIRILSLTSSSSGCERNWSTFEQVSFIIQREGIGLQQSV

SEQ ID NO: 186263 - protein, 263 aa, Zea Mays
MNATLVLPELDTNSFWHDESGFVDIYDVPHFINTLKYDVRIVMSIPKITAQGKTKKLKAYKILPPRDAPVTWYRTTALERLRKYGAIYLTPFSHRLAEKIDDPEFQRLRCRVNYHALRFKPSIMKTSSDIANKLHSEGHFMSIHLRFELDVLAYAGCFDIFTPEEQEILLRHRNKYFPLLLRYWGKYFPGNTPDYRERRLIGKCPLTPEELIAVDGGTNLAQYLVRFWLKGIAKLGPASQRGDRKCLISQHRQLPTTTELAPI

SEQ ID NO: 186264 - protein, 182 aa, Zea Mays
MSTPPRTLIERLETSERLLERHRLDVAELLDARDDGEEPIWNGVEELLHHGSVVERRAKPGVTRRHTADFACVVVQCLLVLHVQLVELPLERGEACRLDPIRTDETSLEARPHLRCCFLGGDLHQDVIGQSLEKLCPRRLVLHRIHLAIIWWRHGLPETLRVEDRLHLDRPRRVARRRQHRV

SEQ ID NO: 186265 - protein, 509 aa, Zea Mays
MQFSSVLPLEGKACMSPVRRGSGGYGSERMRINCCSIRRNKALRRMCFSARGAVSSTQCVLTSDAGPDTLVVRTSFRRNYADPNEVAAVILGGGTGTQLFPLTSTRATPAVPIGGCYRLIDIPMSNCFNSGINKIFVMTQFNSASLNRHIHRTYLGGGINFTDGSVEVLAATQMPGEAAGWFQGTADAVRKFIWVLEDYYKHKAIEHILILSGDQLYRMDYMELVQKHVDDNADITLSCAPVGESRASDYGLVKFDSSGRVIQFSEKPKGAALEEMKVDTSFLNFAIDSPAEYPYIASMGVYVFKRDVLLDLLKSRYAELHDFGSEILPKALHEHNVQAYVFTDYWEDIGTIRSFFDANMALCEQPPKFEFYDPKTPFFTSPRYLPPTKSDKCRIKDAIISHGCFLRECAIEHSIVGVRSRLNSGCELKNTMMMGADLYETEDEISRLLAEGKVPIGVGENTKISNCIIDMNARVGRNVSITNKEGVQEADRPDEGYYIRLVIVLRVET

SEQ ID NO: 186266 - protein, 510 aa, Zea Mays
MQFSSVLPLEGKACMSPVRRGSGGYGSERMRINCCSIRRNKALRRMCFSARGAVSSTQCVLTSDAGPDTLVVRTSFRRNYADPNEVAAVILGGGTGTQLFPLTSTRATPAVPIGGCYRLIDIPMSNCFNSGINKIFVMTQFNSASLNRHIHRTYLGGGINFTDGSVEVLAATQMPGEAAGWFQGTADAVRKFIWVLEDYYKHKAIEHILILSGDQLYRMDYMELVQKHVDDNADITLSCAPVGESRASDYGLVKFDSSGRVIQFSEKPKGAALEEMKVDTSFLNFAIDSPAEYPYIASMGVYVFKRDVLLDLLKSRYAELHDFGSEILPKALHEHNVQAYVFTDYWEDIGTIRSFFDANMALCEQPPKFEFYDPKTPFFTSPRYLPPTKSDKCRIKDAIISHGCFLRECAIEHSIVGVRSRLNSGCELKNTMMMGADLYETEDEISRLLAEGKVPIGVGENTKISNCIIDMNARVGRNVSITNKEGVQEADRPDEGYYIRSGIVSHRLES

SEQ ID NO: 186267 - protein, 246 aa, Zea Mays
MQFSSVLPLEGKACMSPVRRGSGGYGSERMRINCCSIRRNKALRRMCFSARGAVSSTQCVLTSDAGPDTLVVRTSFRRNYADPNEVAAVILGGGTGTQLFPLTSTRATPAVPIGGCYRLIDIPMSNCFNSGINKIFVMTQFNSASLNRHIHRTYLGGGINFTDGSVEVLAATQMPGEAAGWFQGTADAVRKFIWVLEDYYKHKAIEHILILSGDQLYRMDYMELVQKHVDDNADITLSCAPVGESI

SEQ ID NO: 186268 - protein, 532 aa, Zea Mays
MSNSRKEGRRCASAMQFSSVLPLEGKACMSPVRRGSGGYGSERMRINCCSIRRNKALRRMCFSARGAVSSTQCVLTSDAGPDTLVVRTSFRRNYADPNEVAAVILGGGTGTQLFPLTSTRATPAVPIGGCYRLIDIPMSNCFNSGINKIFVMTQFNSASLNRHIHRTYLGGGINFTDGSVEVLAATQMPGEAAGWFQGTADAVRKFIWVLEDYYKHKAIEHILILSGDQLYRMDYMELVQKHVDDNADITLSCAPVGESRASDYGLVKFDSSGRVIQFSEKPKGAALEEMKVDTSFLNFAIDSPAEYPYIASMGVYVFKRDVLLDLLKSRYAELHDFGSEILPKALHEHNVQAYVFTDYWEDIGTIRSFFDANMALCEQPPKFEFYDPKTPFFTSPRYLPPTKSDKCRIKDAIISHGCFLRECAIEHSIVGVRSRLNSGCELKNTMMMGADLYETEDEISRLLAEGKVPIGVGENTKISNCIIDMNARVGRNVSITNKEGVQEADRPDEGYYIRSGIVVVLKNATIKDGTVI

SEQ ID NO: 186269 - protein, 243 aa, Zea Mays
MKVDTSFLNFAIDSPAEYPYIASMGVYVFKRDVLLDLLKSRYAELHDFGSEILPKALHEHNVQAYVFTDYWEDIGTIRSFFDANMALCEQPPKFEFYDPKTPFFTSPRYLPPTKSDKCRIKDAIISHGCFLRECAIEHSIVGVRSRLNSGCELKNTMMMGADLYETEDEISRLLAEGKVPIGVGENTKISNCIIDMNARVGRNVSITNKEGVQEADRPDEGYYIRSGIVVVLKNATIKDGTVI

SEQ ID NO: 186270 - protein, 512 aa, Zea Mays
MFYSHQLLARKAPLGQIWMAATLHSKINRKRLDKLDIIKICEEILNPSVPMALRLSGILMGGVVIVYERKVKLLYTDVSRLLTEINEAWRIKPVTDPTVLPKGKTQAKYEAVTLPEINMVVEQPMFFSEPDGAKFRRMGLEDLDEQYVQVNLDDDDFSHADDRHQAVNITLVDNFESGLAETDLFNHFERFDIADDETTVNITPDEYPQVPSTLIPSPPRQEDIPQQEEPYYAAPSPVHGEPQQGGPEDQEEQKMKQPPKASKRKARWEVPRVIMDNNQMMIPGNIYQTWLKDASSLVSKRRKLNSNFNFIRSTKISDLMHIPPVALISHDNLFSELCYPKPLMQLWKDCTEVKSTKASSGGQRSSSQEPQPKNSPPQAGGEYEMETGGLPMDLTDGIEKLRANMSAKYDRAYNILHSDHSVTPGSPGLSRRSASSSGGSGSAFIQLDPEVQLPSGSGRSKRGQHSSARSLGNLDTVEEDFPLEQEVRDFKMRRLSDYVPTPGWLHSVLCYI

SEQ ID NO: 186271 - protein, 364 aa, Zea Mays
MAATLHSKINRKRLDKLDIIKICEEILNPSVPMALRLSGILMGGVVIVYERKVKLLYTDVSRLLTEINEAWRIKPVTDPTVLPKGKTQAKYEAVTLPEINMVVEQPMFFSEPDGAKFRRMGLEDLDEQYVQVNLDDDDFSHADDRHQAKAVNITLVDNFESGLAETDLFNHFERFDIADDETTVNITPDEYPQVPSTLIPSPPRQEDIPQQEEPYYAAPSPVHGEPQQGGPEDQEEQKMKQPPKASKRKARWEVPRVIMDNNQMMIPGNIYQTWLKDASSLVSKRRKLNSNFNFIRSTKISDLMHIPPVALISHDNLFSELCYPKPLMQLWKDCTEVKSTKASSAIIITRTTTEKLTTSGWGRV

SEQ ID NO: 186272 - protein, 258 aa, Zea Mays
MKQPPKASKRKARWEVPRVIMDNNQMMIPGNIYQTWLKDASSLVSKRRKLNSNFNFIRSTKISDLMHIPPVALISHDNLFSELCYPKPLMQLWKDCTEVKSTKASSGGQRSSSQEPQPKNSPPQAGGEYEMETGGLPMDLTDGIEKLRANMSAKYDRAYNILHSDHSVTPGSPGLSRRSASSSGGSGSAFIQLDPEVQLPSGSGRSKRGQHSSARSLGNLDTVEEDFPLEQEVRDFKMRRLSDYVPTPGWLHSVLCYI

SEQ ID NO: 186273 - protein, 367 aa, Zea Mays
MFYSHQLLARKAPLGQIWMAATLHSKINRKRLDKLDIIKICEEILNPSVPMALRLSGILMGGVVIVYERKVKLLYTDVSRLLTEINEAWRIKPVTDPTVLPKGKTQAKYEAVTLPEINMVVEQPMFFSEPDGAKFRRMGLEDLDEQYVQVNLDDDDFSHADDRHQAKAVNITLVDNFESGLAETDLFNHFERFDIADDETTVNITPDEYPQVPSTLIPSPPRQEDIPQQEEPYYAAPSPVHGEPQQGGPEDQEEQKMKQPPKASKRKARWEVPRVIMDNNQMMIPGNIYQTWLKDASSLVSKRRKLNSNFNFIRSTKISDLMHIPPVALISHDNLFSELCYPKPLMQLWKDCTEVKSTKASSGHFII

SEQ ID NO: 186274 - protein, 674 aa, Zea Mays
MQAPLNSSALDVKTSDTTEIFSATINVAQTDAKNTTSQPLSKVQHGWGGIPGRPSMAEIVKMGRPQAKVGSRSVASSTALPTVGDSVISNTPNLVPEEYNRTVFASEAGHVAADKLPNGAVEVHSLPKDASAFDMLPSAEGTDVEAPSMSANAQGSSTPDANEDDIEKYANLEEGNTESLISPGQVSASGKDIQSEYTEVVSHVDEGSIEKTNDFQLNGLPFEHNQNLNGDVSTATTQFDHLTLHEGPKLSDDNPAVIIPDHLQVSNADCAHLTFGSFVSGTLDSSLTTKPLESHGDAAAVPDDDSIDQSDGSNEENLDITSVQQSEVTRADFLDVTSNTEYNLTSTPDYATSSAPLQDSASQSLQENRQFQNISPFSSFMQMQNGLLPPAIPPLREFDPAFSLLLTHPPMMHGTMSSSMSNTTVSTQPQENANPVGLPNPQLTQSQQSTSIASGPPLPQHLLHPYAQPTLPLGYASMIGYPSLPPSYAYLPPAAFQQPYMNSGLFHQAAAAVPTSSVKYPLPQYKSNIALASLPQPGSLLSSYVGGFGTASNMPGNFPLNQSTAAATTTLGFDGTVPSHFKDGNQFISLQQNENPAMWMHGASSRGMPPLAASTMYGYQGQSHQAGLRQGQLPSQFGSALGQSQPGLGPEHRNPSDSNLSGAAQANQMWPNTY

SEQ ID NO: 186275 - protein, 57 aa, Zea Mays
MRSGEALKYECVTVCTSYFQSYLRSRSMLTLKKRKTCRKEQKGQPKMLWRPQKNDKL

SEQ ID NO: 186276 - protein, 311 aa, Zea Mays
MEVFGPVTPGQVSFLLGLFPVLISWIYSEILEYKKSLSHGKVHSDANLDNGTIKEDEKSVLLEGGQLKSPSTKFRNLSTKANLLRFITMDESFLLENRAVLRAMAEFGVVLVYFYICDRTDIFPESKKSYNRDLFLFLYILLIIASTLTSLKKHHEKSAFSGKSILYLNRHQTEEWKGWMQVLFLMYHYFAASEIYNAIRVFIACYVWMTGFGNFSYYYIKKDFSIARFAQMMWRLNFFVAFCCIVLDNDLMLYYICPMHTLFTLMVYGSLGLFNKYNEAIKIHRHPRHTYPCYMSGISDLASIDTYGLLE

SEQ ID NO: 186277 - protein, 325 aa, Zea Mays
MPYSLEWREYCVNPFWLQVLFLMYHYFAASEIYNAIRVFIACYVWMTGFGNFSYYYIKKDFSIARFAQMMWRLNFFVAFCCIVLDNDLMLYYICPMHTLFTLMVYGSLGLFNKYNEVPSIMAIKIACCFLSVILIWEIPGVFESLWAPFTFLLGYKDPSPSKAHLPLLHEWHFRSGLDRYIWIIGMIYAYFHPNVERWMEKLEESETKVRLSIKGTIVTLSLTVGFLWYEYIYKLDKVTYNKYHPYTSWIPITVYICLRNCTQQLRNASLALFAWLGKITLETYISQIHIWLRSSMPNGQPKWLLCFIPDYPMLNFMLTTAIYLL

SEQ ID NO: 186278 - protein, 476 aa, Zea Mays
MENVMPAKLFMLHDEHMVVGHTRVKHSLPCADGDTPTPHPTIQSQPESPAAGARLRQSNGSAACSPHSDPSRCRRPTLGCSRGGRGGGVSERSTSDQVRGGPGCSSLLGNFFELGPYFVNPDGETLSRNPFAWNRRFGLLFIDSPLGTGFSAAPSPADIPTNQSVIAAHILAALQSFYALDPALRARPFFLTGESYAGKYIPAAGAHILDANRALPEALRVNLRGVAIGNGLTHPVAQVATHADSAYFLGLLNARQKRELEALQSEAVSLTRAQRWAAASDARGRVLSWLQNTTGLATLYDYAKQRDYATAAVGAFLNRAEAKAALGAREDVAWEECSDAVGVAMHADVMRNVLPQVESLLRSTARVLLYQGVRDLRDGVVSTEAWLGGVRWDGLRAFLDAERAVWRTAAEGGELAGYVQRSGSLTHVVVYAAGHLVPADNGRAAQEMIEGWVLGTGMFGRGCGDRVRDGVRSAAT

SEQ ID NO: 186279 - protein, 510 aa, Zea Mays
MILLAENKLHPALFSAGAEYKVLKSLADGLISITVKPQDLQCTFFRCTARELLACAVLRPVVNLANPRFINERIESFALSHANKLEKGTAESLDVVTTVKHREPHMPSVDEFSALIDHSSSGVELVQFRQGQSKTASDIQPGKSTNPYSLKLESSHAPLVSSSHPLESTSLASSSHVTSDNGFSLHTKSSNRATANGHGRECAQPLGISSERAHQALALEHLENMWTKGKNYKPENVEHVAKVSVGSASLGSTSVQQSVPCSTSVCYNQSNSERPTASSQSKDQHLVRHSTTPTYVTYPNGTPKSLSAEMAEHAGPEDFAVESESSYATEDDEFNNVTGLDSPVTRVWESKSKGNATLSHIHHPLESPGFHRAKKNRSHVGKLKMSRTSSGRKRSRSNAQKPPIWQEVERSSFSVGDSMDILNTSANDLKTHELDEDPEVESMARMFSSSNTSSLLLPSSDSAYSSNYCGANVLQDSYLKLRCEVVGASIVKSGSGMFCCVFYFRDRRQW

SEQ ID NO: 186280 - protein, 1133 aa, Zea Mays
METTAAGAPRAQTLRDLAEEGKKRGVLLLVFAFGLAFLMSLTSSSVWFNLPFAIALIVLFRYISLDYGLRRKSVTRTDHASHSLVKTKGTEVKKVIHQTETDGKIDWRSKVNSPPVEAAFEQFTRHLISEWVTDLWYSRVTPDKEGPEELIDVVNTVLGEISVRARNVNLINLLIRDLVDLICNNLELYHFCQAKIGREKFVGLPSERRDAELKMILLAENKLHPALFSAGAEYKVLKSLADGLISITVKPQDLQCTFFRCTARELLACAVLRPVVNLANPRFINERIESFALSHANKLEKGTAESLDVVTTVKHREPHMPSVDEFSALIDHSSSGVELVQFRQGQSKTASDIQPGKSTNPYSLKLESSHAPLVSSSHPLESTSLASSSHVTSDNGFSLHTKSSNRATANGHGRECAQPLGISSERAHQALALEHLENMWTKGKNYKPENVEHVAKVSVGSASLGSTSVQQSVPCSTSVCYNQSNSERPTASSQSKDQHLVRHSTTPTYVTYPNGTPKSLSAEMAEHAGPEDFAVESESSYATEDDEFNNVTGLDSPVTRVWESKSKGNATLSHIHHPLESPGFHRAKKNRSHVGKLKMSRTSSGRKRSRSNAQKPPIWQEVERSSFSVGDSMDILNTSANDLKTHELDEDPEVESMARMFSSSNTSSLLLPSSDSAYSSNYCGANVLQDSYLKLRCEVVGASIVKSGSGMFCCVFYFRDRRQWFRHFEDLHRRLKEYAQYNLHLPPKHFLSSGLEVSVVRERCKLLDIYLKNLLQIPIVSSCIEVWDFLSVDSQTYIFTDTLSVIQTLSVSLDERSNGKNIKALNSSGALNGNSISGGQSLHGHIDDTVHKDSDIACDGLRFRKGNVNKNLGNGVSHTTDSVSNTTANHYQDNSGSDPEQNDHSFSIDSLNPKKLRSTETNDTSQIPESGGFSVSPNDWMAPNLSVPLFHLVDVVFQLQDGGWIRRQAFWVAKQILQLGMGDTFDDWLVDKIQLLRKGRIIAFAVKRIEQILWPDGIFMTKHPKRNSPPPPPGAQSNGMGNYLSDEQRIEAAHRANFVRELIIDKAPSPLVSLVGRKDYERCAHDIYFFLQSPVCLKQLAFELLELLVLSSFPELDGTVRKWHEDKEQFCAQ

SEQ ID NO: 186281 - protein, 974 aa, Zea Mays
METTAAGAPRAQTLRDLAEEGKKRGVLLLVFAFGLAFLMSLTSSSVWFNLPFAIALIVLFRYISLDYGLRRKSVTRTDHASHSLVKTKGTEVKKVIHQTETDGKIDWRSKVNSPPVEAAFEQFTRHLISEWVTDLWYSRVTPDKEGPEELIDVVNTVLGEISVRARNVNLINLLIRDLVDLICNNLELYHFCQAKIGREKFVGLPSERRDAELKMILLAENKLHPALFSAGAEYKVLKSLADGLISITVKPQDLQCTFFRCTARELLACAVLRPVVNLANPRFINERIESFALSHANKLEKGTAESLDVVTTVKHREPHMPSVDEFSALIDHSSSGVELVQFRQGQSKTASDIQPGKSTNPYSLKLESSHAPLVSSSHPLESTSLASSSHVTSDNGFSLHTKSSNRATANGHGRECAQPLGISSERAHQALALEHLENMWTKGKNYKPENVEHVAKVSVGSASLGSTSVQQSVPCSTSVCYNQSNSERPTASSQSKDQHLVRHSTTPTYVTYPNGTPKSLSAEMAEHAGPEDFAVESESSYATEDDEFNNVTGLDSPVTRVWESKSKGNATLSHIHHPLESPGFHRAKKNRSHVGKLKMSRTSSGRKRSRSNAQKPPIWQEVERSSFSVGDSMDILNTSANDLKTHELDEDPEVESMARMFSSSNTSSLLLPSSDSAYSSNYCGANVLQDSYLKLRCEVVGASIVKSGSGMFCCVFYFRDRRQWFRHFEDLHRRLKEYAQYNLHLPPKHFLSSGLEVSVVRERCKLLDIYLKNLLQIPIVSSCIEVWDFLSVDSQTYIFTDTLSVIQTLSVSLDERSNGKNIKALNSSGALNGNSISGGQSLHGHIDDTVHKDSDIACDGLRFRKGNVNKNLGNGVSHTTDSVSNTTANHYQDNSGSDPEQNDHSFSIDSLNPKKLRSTETNDTSQIPESGGFSVSPNDWMAPNLSVPLFHLVDVVFQLQDGGWIRFSGLMEFS

SEQ ID NO: 186282 - protein, 87 aa, Zea Mays
MFTFYLWFVFAEHPIFFIYRGQHFLFLFFSCSVCFGSRDLGIRRPSSCGVIQFLPLEYGLQARPSHLALCIILCETRARMPHSSLSN

SEQ ID NO: 186283 - protein, 284 aa, Zea Mays
METTEPLQDIMCEFRAGKMSHEGTRVVPDTRKGLVRVGRGEEGLVHFQWLDRGQNIVEDDQIIFPDEAVFEKEPNADGDSQTCMQVNAYINRSLDAEADLRVPIEAEMSEDTADDDISSRAGNLVESMTADLAGEVTSAAGPVRLEDLQRILSAIQSSGAAADPDAGVGLGDILKPDLVLPLIEDLPIEQLASHLPEGGSWSPGDIVELLQSPPLRQQLDAFTHVLRTGQIDLAQFGVDPDKYKFTVVSFLEALEDSVGRGASEAGDKDAEVERGSGNDAMDES

SEQ ID NO: 186284 - protein, 187 aa, Zea Mays
MQEPNADGDSQTCMQVNAYINRSLDAEADLRVPIEAEMSEDTADDDISSRAGNLVESMTADLAGEVTSAAGPVRLEDLQRILSAIQSSGAAADPDAGVGLGDILKPDLVLPLIEDLPIEQLASHLPEVLRTGQIDLAQFGVDPDKYKFTVVSFLEALEDSVGRGASEAGDKDAEVERGSGNDAMDES

SEQ ID NO: 186285 - protein, 361 aa, Zea Mays
MTHHYPPTRITRGERHYCCRRQWLSALTEPMDDLTVGGLALFAAVADFIDDSAPAMPQPAAASTAHEPEPEPGSPCSVASDCSSVATADFEGFADLGSALVLDDLVSSASTSASSASGPRAAAAAPARSVFALDCVPRWGLQSVCGRRPEMEDAARVLPTFFHVPLWMLAGDAPVDGLDRASFRLPAHFFGVYDGHGGLQVANYCRERIHEVLAEELTKAEEAASDADLGGLDPNTQKHWEKAFVGCFSRVDAEVGGDAATEAKPVAPDTVGSTAVVALVCSSHVIVANCGDSRAVLCRGKQPVALSVDHKPNREDEYARIEAQGGKVINWNGYRVLGVLAMSRSIAFQSTSLKVDYNRSK

SEQ ID NO: 186286 - protein, 352 aa, Zea Mays
MTHHYPPTRITRGERHYCCRRQWLSALTEPMDDLTVGGLALFAAVADFIDDSAPAMPQPAAASTAHEPEPEPGSPCSVASDCSSVATADFEGFADLGSALVLDDLVSSASTSASSASGPRAAAAAPARSVFALDCVPRWGLQSVCGRRPEMEDAARVLPTFFHVPLWMLAGDAPVDGLDRASFRLPAHFFGVYDGHGGLQVANYCRERIHEVLAEELTKAEEAASDADLGGLDPNTQKHWEKAFVGCFSRVDAEVGGDAATEAKPVAPDTVGSTAVVALVCSSHVIVANCGDSRAVLCRGKQPVALSVDHKPNREDEYARIEAQGGKVINWNGYRVLGVLAMSRSIGVHRFN

SEQ ID NO: 186287 - protein, 82 aa, Zea Mays
MELLKLAALKLYPIPSLGRCACSRNMTVITEYNPERGVEAVPTSTPIQPAVDNESKGKPTGPRFCYSLFCYVLFGSQAWRMP

SEQ ID NO: 186288 - protein, 294 aa, Zea Mays
MTITLIIGSPRKLQSVSAARSYDEFGMYTLSGMHEGPASYSMGMGMGGSMSMSMGRGGRGYRRMRSSAPDLPSLLLDSRIIFLGMPIVPAVTELIAAQFLWLDYDDRTKPIYLYINSTGTMDENNELVASETDAYAIADFINRSKSKVYTINLSMAYGQAAMLLSLGVKGKRGVLPNSITKLHLPKVHKSGGAAIDMWIKAKELDTNTDYYLELLSKGVGKPKEELAEFLRGPRYFRAQEALDYGLADTILHSLDGSFKPKDLTAQLAKAQAMRQSGKRAAAGAGRWSTPTAPR

SEQ ID NO: 186289 - protein, 339 aa, Zea Mays
MALALRCPPAATSSRSPFLPSTSPAPAGKVPRRPPASWRCLAYYGDGGFRKNYDHIPKQFREENLKDGLMDNYKHVPQFLYGLSDAQMEMFMNDDNPYNRQSQKVTEESVSAARSYDEFGMYTLSGMHEGPASYSMGMGMGGSMSMSMGRGGRGYRRMRSSAPDLPSLLLDSRIIFLGMPIVPAVTELIAAQFLWLDYDDRTKPIYLYINSTGTMDENNELVASETDAYAIADFINRSKSKVYTINLSMAYGQAAMLLSLGVKGKRGVLPNSITKLHLPKVHKSGGAAIDMWIKELVNQRKSLLNSLGARGTSEHKRLLIMDLPIRYYTRWMVLSNQRT

SEQ ID NO: 186290 - protein, 290 aa, Zea Mays
MHGWLLVPAGPGEEPAGDEYAEGEGGDGDGDHLPVPLDRLHKALRPLGARQPLELLRHALLEATACLSLVLRRSCSICIGPLFLGAPLRQAFGRIRRLALCVGLRLGLLLRVGCRCRCCGGGLGLIFLCRRVGCRCRCCGGGGRLGLIFLCRRLLVLLLRLRFGALGSRHLLGGGSGIGIGILGLLGLLLVFLCGRGQALGHGEREDSKVEAAGDVVEVGGGWQLEDLVEAGVPGVGVGGGGVGALAADGEAAGAVDLHPEILFPEAFLQASKAKNGVMHAHTGPGLHCH

SEQ ID NO: 186291 - protein, 393 aa, Zea Mays
MALALRCPPAATSSRSPFLPSTSPAPAGKVPRRPPASWRCLAYYGDGGFRKNYDHIPKQFREENLKDGLMDNYKHVPQFLYGLSDAQMEMFMNDDNPYNRQSQKVTEESVSAARSYDEFGMYTLSGMHEGPASYSMGMGMGGSMSMSMGRGGRGYRRMRSSAPDLPSLLLDSRIIFLGMPIVPAVTELIAAQFLWLDYDDRTKPIYLYINSTGTMDENNELVASETDAYAIADFINRSKSKVYTINLSMAYGQAAMLLSLGVKGKRGVLPNSITKLHLPKVHKSGGAAIDMWIKAKELDTNTDYYLELLSKGVGKPKEELAEFLRGPRYFRAQEALDYGLADTILHSLDGSFKPKDLTAQLAKAQAMRQSGKRAAAGAGRWSTPTAPRYLWIW

SEQ ID NO: 186292 - protein, 382 aa, Zea Mays
MAAIHLRPLRSVAVSSARYRSLLHLLARPLSSSQSSHAYHPFPTPAAAAPNHVHHHHPTHHSQQQSAPPRNPPPLGPSPQWSPQPPPPRGYGPPPPQHPHVPPPPPRGYGPLSPGQHLPPSPHGYGPPLPPPPPPHGHGPPPPGQHVVPPLPPSHGHRPPPSCQHVPPPPPSHGHGPPPPGQYVPSALPRDHGPPPPHQQAPPPPPPPEPVAGPGELMGLCREGRVKDAVELLDKGACADPAAFYELAAACSNPKLLEELRKVHDFFLRSPFRGDLRVNNKLLKMYAKCAAMPHARRTFDNMPDRDMDSWHIVIDGYSVNGLGDEALRLFELMKEWTMALSLVWSTMLESLRFWGSQGTSMRPWSSLRSCRLSPMPWCGSRS

SEQ ID NO: 186293 - protein, 107 aa, Zea Mays
MSQIACFLLGYALDCGCAAVGDGGMAPRAGAASPGHRVVGEGREPGAGAVGHGAQDAVRRIRSRTHRHVKDSEKRVLARKALMQHVRYQELGKKLREILIRNISGLR

SEQ ID NO: 186294 - protein, 87 aa, Zea Mays
MLHAIRMIIYMEKGTLICYLRLADASPGWAILGGSMLMEFQYAFAKLHLREIDGREFSPFVKMQFSHVIDRRVSLSFGDVERTYELI

SEQ ID NO: 186295 - protein, 294 aa, Zea Mays
MNTDIQQRLRVSSMDEDDKMMVSMDEGDEMLDVYQGTEFKWCLVCKDNSNDSLNSSQNESHFFELTFNKKHKDKALRSYLPFILATAKAIKAQERTLMIHMTEYGNWSPIELHHPSTFDTLAMDKKLKQSIIDDLDRFMKRKDYYRKIGKAWKRGYLLYGPPGTGKSSLIAAMANHLRFDIYDLELTAVTSNSDLRRLLVNMDNRSILVIEDIDCTIELKQRQEAEGHDESDSTEQNKGEGKVTLSGLLNFVDGLWSTSGEERIIVFTTNYKERLDPALLRPGRMDMHIHMGGC

SEQ ID NO: 186296 - protein, 657 aa, Zea Mays
MYIKKVVIEGFKSYKEEISTEPFSPKVNVVVGANGSGKSNFFHAIRFVLSDMFQNLRSEDRGALLHEGAGHSVVSAFVEIVFDNSDNRIPVDKEEVRLRRTIASKKDEYYLDGKHVSKTEVMNLLESAGFSRSNPYYVVQQGKIASLTLMKDSERLDLLKEIGGTRVYEDRRKESLKIMTETANKRKQIDQVVHYLEERLRELDEEKEELKKYQQLDKQRRSLEYTILDHELNDARNELASMDDNRRKISESMSLADNEVVDVREMIKSFDKEIKVSTKGINDTKAQKEGVEKRRTEALKVVAKIELDLRDIKDRIVNEKRAKDEAARDLQSVRRESEKSKSELAEISKVHQAKLKEEEDISKSIMDREKRLSILYQKQGRATQFANKAARDKWLQKEIEDLKPVLLSNKKQEGLLQEEIQKLKDEINDLTNYIESRKSESSKLEETLAKRHNDYNDLRKQRDVLQEERKSYWKEESEVTAELDRLQEDLIKAQKSLDQATPGDIRRGLNSVSRIIKDHGITGVFGPVLELVDCEEKFFTAVEVTAANSLFHVVVENDDISTKIIQILTREKGGRVTFIPLNRVKVPDLSCPQSPDFVPLLKKLKYRSDHRRAFEQVFGRTVICRDLETATKVARSNGLDCITLDGREKRCYDRRLL

SEQ ID NO: 186297 - protein, 1204 aa, Zea Mays
MYIKKVVIEGFKSYKEEISTEPFSPKVNVVVGANGSGKSNFFHAIRFVLSDMFQNLRSEDRGALLHEGAGHSVVSAFVEIVFDNSDNRIPVDKEEVRLRRTIASKKDEYYLDGKHVSKTEVMNLLESAGFSRSNPYYVVQQGKIASLTLMKDSERLDLLKEIGGTRVYEDRRKESLKIMTETANKRKQIDQVVHYLEERLRELDEEKEELKKYQQLDKQRRSLEYTILDHELNDARNELASMDDNRRKISESMSLADNEVVDVREMIKSFDKEIKVSTKGINDTKAQKEGVEKRRTEALKVVAKIELDLRDIKDRIVNEKRAKDEAARDLQSVRRESEKSKSELAEISKVHQAKLKEEEDISKSIMDREKRLSILYQKQGRATQFANKAARDKWLQKEIEDLKPVLLSNKKQEGLLQEEIQKLKDEINDLTNYIESRKSESSKLEETLAKRHNDYNDLRKQRDVLQEERKSYWKEESEVTAELDRLQEDLIKAQKSLDQATPGDIRRGLNSVSRIIKDHGITGVFGPVLELVDCEEKFFTAVEVTAANSLFHVVVENDDISTKIIQILTREKGGRVTFIPLNRVKVPDLSCPQSPDFVPLLKKLKYRSDHRRAFEQVFGRTVICRDLETATKVARSNGLDCITLDGDQVGKKGAMTGGFYDSRRSKLKFVKIIRDNKTAIDRKTGHLESVVNKLKDIDKKITDLVTKQQQMDAERDHAKSELEQFKADIARAMKQRGSLEKALVKKEKSLNNICNQIEQVQSSIAMKNDEMGTELIDQLTSEERDLLSRLNPEITDLKERFLMCKNSRIEIEARKEELETNLSTNLIRRQKELEAIISSADSRTLPLEAEAKEQELKSSKRNLDELTSLLKANVDAINNFTRKMDDLKRKRDDLKAREAILEQTVQDGAKDLEQLMNSRNTYLAKQEECTKKIRDLGLLPADAFEAYKRKNKKQLHKILYDCNEQLKQFSHVNQKALDQYVNFTEQREQLQRRRAELDAGDVKIMELISVLDQRKDESIERTFKGVARHFREVFSELVQGGHGYLVMMKKKDGDAVDDDEEEDGPRDPGPDGRIEKYIGVKVKVSFTGKGETQSMKQLSGGQKTVVALTLIFAIQRCDPAPFYLFDEIDAALDPQYRTAVGNMIRRLADMADTQFIATTFRPEIAKVADKIYAVRHKNRVSNIDVVSKEEALDFIERDQTYNAS

SEQ ID NO: 186298 - protein, 252 aa, Zea Mays
MEDFYDIKASKIDDKQINLFGIFDGHGGSRAAEYLKEHLFENLMKHPEFMTNTKLALSETYRKTDSEFLDAERNTHRDDGSTASTAVMVADHLYVANVGDSRAVISKAGKAIALSEDHKPNRSDERNRIESAGGIVMWAGTWRVGGVLAMSRAFGNRLLKQFVIADPEIQEQEINEELEFLIIASDGLWDVVSNEDAVTLVKMEEEPEAAARKLTETAFSRGSGDNITCIVVKFQHDKPRSGGGDSPSSPRL

SEQ ID NO: 186299 - protein, 274 aa, Zea Mays
MPPRVDGTLNCGYSSFRGRRASMEDFYDIKASKIDDKQINLFGIFDGHGGSRAAEYLKEHLFENLMKHPEFMTNTKLALSETYRKTDSEFLDAERNTHRDDGSTASTAVMVADHLYVANVGDSRAVISKAGKAIALSEDHKPNRSDERNRIESAGGIVMWAGTWRVGGVLAMSRAFGNRLLKQFVIADPEIQEQEINEELEFLIIASDGLWDVVSNEDAVTLVKMEEEPEAAARKLTETAFSRGSGDNITCIVVKFQHDKPRSGGGDSPSSPRL

SEQ ID NO: 186300 - protein, 429 aa, Zea Mays
MMMEPGGVLPAHAHEEEEEGASEVEEEELVEAEASSAETVTWGAEVEVSSAPAAGVQEMNAEVEGGEMEVSPEPAVAVGGTELEPQQDDEDEVSSVVLARGERKQEAAPASAVLAVEAPMEMGQDEERAEKEKRGKERERQKERERVDEVGYMSGGWKSVDGTLNCGYSSFRGRRASMEDFYDIKASKIDDKQINLFGIFDGHGGSRAAEYLKEHLFENLMKHPEFMTNTKLALSETYRKTDSEFLDAERNTHRDDGSTASTAVMVADHLYVANVGDSRAVISKAGKAIALSEDHKPNRSDERNRIESAGGIVMWAGTWRVGGVLAMSRAFGNRLLKQFVIADPEIQEQEINEELEFLIIASDGLWDVVSNEDAVTLVKMEEEPEAAARKLTETAFSRGSGDNITCIVVKFQHDKPRSGGGDSPSSPRL

SEQ ID NO: 186301 - protein, 165 aa, Zea Mays
MVADHLYVANVGDSRAVISKAGKAIALSEDHKPNRSDERNRIESAGGIVMWAGTWRVGGVLAMSRAFGNRLLKQFVIADPEIQEQEINEELEFLIIASDGLWDVVSNEDAVTLVKMEEEPEAAARKLTETAFSRGSGDNITCIVVKFQHDKPRSGGGDSPSSPRL

SEQ ID NO: 186302 - protein, 192 aa, Zea Mays
MGRQLRQRHGHGHRRGYFYCRAADSSPKYHPGQSCRKIKRKELRSQTEEEEGNTEEVEGNDNAVENTEDGQERSDCTVCTDLPADVDGEVNQDGHGSSSNGRVEGRDDLAMVYQKDGEMERVLEKQAELIGQFKAQENAQREWEEKFSLRRDSVMDNVNLLNNKLNQAENACERRETARESEAERRSREEEI

SEQ ID NO: 186303 - protein, 185 aa, Zea Mays
MGRQLRQRHGHGHRRGYFYCRAADSSPKYHPGQSCRKIKRKELRSEQEVEGNDNAVENTEDGQERSDCTVCTDLPADVDGEVNQDGHGSSSNGRVEGRDDLAMVYQKDGEMERVLEKQAELIGQFKAQENAQREWEEKFSLRRDSVMDNVNLLNNKLNQAENASERRRYKRKRARDIKENEVELS

SEQ ID NO: 186304 - protein, 210 aa, Zea Mays
MASEDVVGKSRGDTAVTTIVNLAEEAKLAREGVKAPGHQILTICKSLVAGGVAGGVSRTAVAPLERLKILLQVQNPHSIKYNGTVQGLKYIWRTEGLRGLFKGNGTNCARIVPNSAVKFFSYEQASKGILWAYRQQTGEEDAQLTPLLRLGAGACAGIIAMSATYPMDMVRGRITVQTNLPTSTVVCFMHWVQSTVKKAFVLYTKGGFHL

SEQ ID NO: 186305 - protein, 195 aa, Zea Mays
MSATYPMDMVRGRITVQTDKSPYQYRGMFHALGTVYREEGFRALYKGWLPSVIGVVPYVGLNFAVYESLKDWLLQTNSFGLANDNELHVVTRLGCGAVAGTIGQTVAYPLDVIRRRMQMVGWSHADSIVTGQGKEALQYNGMIDAFRKTVRHEGVGALYKGLVPNSVKVVPSIAIAFVTYEVVKDVLGVEMRISD

SEQ ID NO: 186306 - protein, 163 aa, Zea Mays
MQVYLCASLLTVPHSITKKWHYLGIVFPNSGVWNSWSKGPAHGHLQRKTQAASTRSCTKILDEMMDNGFPLTTEPNILKEMITPPNIVNKMLNVVTGKSSTLGSKLPDAAASFVPWRRTTVKDASNEVYVNIVEELDAYVNREGVLVKCEAYGEVQVNCSLPG

SEQ ID NO: 186307 - protein, 368 aa, Zea Mays
MDIDASASVMCQLLSPEGDPLGSALYLPQNVGPPQLQEIVNQLLHNEEKLPYAFYVGDEELSVYLGAYMRQKNANVEVTLRIVCQPQALFRIRPVNRCSATIAGHTEAVIAVSFSPDGKSLASGSGDTTVRFWDLSTQTPLFTCKGHKNWVLCIAWSPDGKHLVSGSKSGELILWDPKTGNQLGTPLMGHRKWITAVSWEPVHLQSPCRRFVSASKDGDARIWDITTRKCVISLTGHTSSVTCVKWGGDGLIYTGSQDCLIKVWETSQGKLVKTLKGHGHWVNSLALSTEYVLRTGAYDHTGKTFSTAEEMKEAALARYKKMRGNAPERLVSGSDDFTMFLWEPTISKQPKARMTGHQKVMICLFLFA

SEQ ID NO: 186308 - protein, 175 aa, Zea Mays
MDIDASASVMCQLLSPEGDPLGSALYLPQNVGPPQLQEIVNQLLHNEEKLPYAFYVGDEELSVYLGAYMRQKNANVEVTLRIVCQPQALFRIRPVNRCSATIAGHTEAVIAVSFSPDGKSLASGSGDTTVRFWDLSTQTPLFTCKGTQEMDYCCIMGASSFAVSVPPLCKCKQGR

SEQ ID NO: 186309 - protein, 245 aa, Zea Mays
MKAARVRILDVFLLRIVEKEYDSESTKSSSQDCLIKVWETSQGKLVKTLKGHGHWVNSLALSTEYVLRTGAYDHTGKTFSTAEEMKEAALARYKKMRGNAPERLVSGSDDFTMFLWEPTISKQPKARMTGHQKLVNHVYFSPDGQWLASASFDKSVKLWNGITGKFVAAFRGHVADVYQISWSADSRLLLSGSKDSTLKIWDIRTHKLKMDLPGHADEVYTVDWSPDGEKVASGGKDRVLKLWMN

SEQ ID NO: 186310 - protein, 999 aa, Zea Mays
MALVLLLLLPIFLLSSSSCLVLAIPTLASQAATLLSLKDSFSPPLPPQLRSWTLANYASLCSSWPGVACSNRTVVSLDISGYNLSGTLPPAIADLAGLRFFSAAANSFSGDIPPAIAALRDLRHLNLSNNQFNGTLDALDFSAMHSLQVLDLYDNDLAGALPTLLPAAAGLRHLDLGGNFFSGTIPPSFGRFPAIQFLSLAGNSLSGDIPPDLANLSTLRHLFLGYFNRFDGGIPAELGRLTSLVHLDLANCGLQGPIPASLGDLTGLDTLYLQTNQLNGTIPPSLGNLTGLRFLDVSNNALTGEIPPELAALRELRLLNMFINRFRGGVPDFLGDLRSLQVLKLWQNNFTGAIPAALGRAAPLREVDLSTNRLTGEVPRWLCARGQLEILILLDNFLFGPVPEGLGACPTLTRVRLGQNYLTGPLPRGFLYLPALTTVELQGNYLTGRLEEDGSGGGGSSSSRLSLLNLSSNRFNGSLPASMGNFSWLQTLLLGGNQLGGQIPRQVGRLKRLLKLDLSGNKLTGAVPGEVGECTSLTYLDLSGNRLSGAIPVRLVQIKVLNYLNVSWNMLSGSIPRELGGMKSLTAADFSHNELSGRVPESGQFAYLNGSSFVGNPGLVVVNPKQQVMGGGPGILGGAGTQDERGSSSSSAVMGRLKLLLAAVGLLGFSVAFAAAAVATTRSAAMLRRRRRSSSWRWRMTAFQQVSFGCEDVVRCVKENCVVGRGGAGVVYRGTMPGGECVAVKRIVSAEGGGFQAEVETLGGIRHRHIVRLLAFCSGPEAKLLVYEYMVNGSLGEALHRAGADDGGGGVVLSWASRLRVATEAAKGLCYLHHDCSPPILHRDVKSNNILLDARMEAHVADFGLAKFLGGSGASECMSAVAGSYGYIAPEYAYTLKVDEKSDVYSFGVVLLELITGLKPVGEHLGDDAVDLVQWARARSSAGGGVLALLDPRLGGDVPVAEAAHVLFVSMLCVQEHSVERPTMREVVQMLQQARHQPS

SEQ ID NO: 186311 - protein, 910 aa, Zea Mays
MALVLLLLLPIFLLSSSSCLVLAIPTLASQAATLLSLKDSFSPPLPPQLRSWTLANYASLCSSWPGVACSNRTVVSLDISGYNLSGTLPPAIADLAGLRFFSAAANSFSGDIPPAIAALRDLRHLNLSNNQFNGTLDALDFSAMHSLQVLDLYDNDLAGALPTLLPAAAGLRHLDLGGNFFSGTIPPSFGRFPAIQFLSLAGNSLSGDIPPDLANLSTLRHLFLGYFNRFDGGIPAELGRLTSLVHLDLANCGLQGPIPASLGDLTGLDTLYLQTNQLNGTIPPSLGNLTGLRFLDVSNNALTGEIPPELAALRELRLLNMFINRFRGGVPDFLGDLRSLQVLKLWQNNFTGAIPAALGRAAPLREVDLSTNRLTGEVPRWLCARGQLEILILLDNFLFGPVPEGLGACPTLTRVRLGQNYLTGPLPRGFLYLPALTTVELQGNYLTGRLEEDGSGGGGSSSSRLSLLNLSSNRFNGSLPASMGNFSWLQTLLLGGNQLGGQIPRQVGRLKRLLKLDLSGNKLTGAVPGEVGECTSLTYLDLSGNRLSGAIPVRLVQIKVLNYLNVSWNMLSGSIPRELGGMKSLTAADFSHNELSGRVPESGQFAYLNGSSFVGNPGLVVVNPKQQVMGGGPGILGGAGTQDERGSSSSSAVMGRLKLLLAAVGLLGFSVAFAAAAVATTRSAAMLRRRRRSSSWRWRMTAFQQVSFGCEDVVRCVKENCVVGRGGAGVVYRGTMPGGECVAVKRIVSAEGGGFQAEVETLGGIRHRHIVRLLAFCSGPEAKLLVYEYMVNGSLGEALHRAGADDGGGGVVLSWASRLRVATEAAKGLCYLHHDCSPPILHRDVKSNNILLDARMEAHVADFGLAKFLGGSGASECMSAVAGSYGYIAPEKEGTKNGDPRKQANQKDIK

SEQ ID NO: 186312 - protein, 239 aa, Zea Mays
MDDVYGRIEVFPQHFVPSKEAMETPDGLSTSKNSLDSPPSSCKRSWTPRRVKGAASILHLLSIPRIRWSTSNEDDDKIELSRAEVETLRTEIAGAEERESHLKARLENIDEVLRYARLSGYLYIRSRWTQLPGEPPILDDADVDDWLPRFVVLQGQCLYYYLKCTDLSPQESTLLCDVVEVGQLPDFVPEDEKTRYAFYLLTRQGLRFECSSTSEIQDGAGDDKMMNTRSSQVEAGSSW

SEQ ID NO: 186313 - protein, 155 aa, Zea Mays
MRMMTRLENIDEVLRYARLSGYLYIRSRWTQLPGEPPILDDADVDDWLPRFVVLQGQCLYYYLKCTDLSPQESTLLCDVVEVGQLPDFVPEDEKTRYAFYLLTRQGLRFECSSTSEIQVDSWVRALSSDCKLQDGAGDDKMMNTRSSQVEAGSSW

SEQ ID NO: 186314 - protein, 233 aa, Zea Mays
METPDGLSTSKNSLDSPPSSCKRSWTPRRVKGAASILHLLSIPRIRWSTSNEDDDKIELSRAEVETLRTEIAGAEERESHLKARLENIDEVLRYARLSGYLYIRSRWTQLPGEPPILDDADVDDWLPRFVVLQGQCLYYYLKCTDLSPQESTLLCDVVEVGQLPDFVPEDEKTRYAFYLLTRQGLRFECSSTSEIQVDSWVRALSSDCKLQDGAGDDKMMNTRSSQVEAGSSW

SEQ ID NO: 186315 - protein, 101 aa, Zea Mays
MRRREPPTVRPLSSCASPVSTVGAETVQQCLRGELLELALDSRWSTAAVLSHCQCPTTAMHVLRQLPATILLRLQSSGTSLRRNLDSLLSSPLVATRQSSE

SEQ ID NO: 186316 - protein, 157 aa, Zea Mays
MVPSPLHSLSLCSECRSPWLGSALAGARRSPWSRMLSLSSMVFVVSSTYGSGHRSSRRDPFLLVLSMKPRPAPTSTISLAHLPAPSIRRQYSCQAILLSQFIGRRSPLHLSPSVLSTVRPVVSNLIVVSHLQSRQPLLDMCLVKLSQVLLLLPGIYN

SEQ ID NO: 186317 - protein, 1311 aa, Zea Mays
MKVKRKYVQVFNDAVEQICKAYNELPKTSEAANGALPDQSEKPSEHLVRSQDVGEIPGLGQMEGDSPTDYSHTSAKRPGTEEDVKDDGHEICDHSLAVYQKKTSLLEDPKHPMTKKSAASKSSLDIYMEQEHSPTSVRAEREAEEVKIEKESCPLDGFILEPNLEVVCALEVPKKSKSNKPLRNAERKENKRAGIGSPIERIVAEAASDVVLNMSADKESREFKKSKIMTKQSLTTDSEKMDYNKIVHGGPDEQLTGKSSAGFSSNKKSLPDSGQHKMDSSADTRPGKKPRLMDRAGETDKTVDKSEMKSNIDYGKHYAVKHERPTSMETCKNTILKTSTSDDRALRSGGVVSPISRLHSEVMEPACGSVTLSTVADSVKKGSSMKEDASRVDRQLVKPKRRACRFDEDEDEGQRTPLHRTSAKSLSTHIVPTEKAGIRGKFSSHVGNVFGKKLGPAREEKSRSVRMSPVKHEPIFSSPSQDKVHARHQVVEKRLITGLVETPAVIGNKMSLVDGKSSAQVKMPASSEVKKLRSSSSKPSHLTSGNSHSRNYPAPEKIPLLPQPEETKAKSKLATSVEHKVGTTLSTEQSGKRDHLKEERSSYVDKAVSSEPNPGSAKSIKHLIAAAQARRNLMASVHAKFDGSSTDNADITSTPYGLPGLSPSPVFRIPSPPRIAFPGSPGQRILKSPIEFDNGHGKSPKSRQASGSPSGGTDAAIARDALEGMIETLSRTKDSIGRATRHAIECSKYGIAGEIVELLIQKLQSEPNFHRRIDLLFLVDSITQCSHSQRGVARASYVPTVQAALPRLLGAAAPPGAGARENRRQCLKVLRLWLERKIMPEDILRKYMGDIEVPNDDTSTTLMLKRPSRAERSVDDPIREMDDMLVDEYGSNATFELSGILSSKVFEDDEDFPKNNGSSPFVSQARPVENDVIRKTEDTIAPVYVEEHIIIVENVTTDAAMEDALELPGNKQQTDGAVLIEHDSIQDPGSEQAIDQNDFPSLPDGPPPLPSDSPPPPPPLPPSPPPVTPPPPPPPPLSPASPPPPPPPPLPSGPPPQPAPPPLATQVTPLPSIPPPVPSSPPSLSYQPPAPEYFVTANGDQLTQMTGNILIQAIGNATTFIPSGPVNGQAAVNFVTSMQAEYGNNNIFMAPQASNGNYQFRPTGVPFQQGNFSAFPSAQTHPVQPHSHMAHMNPMGQQAVPPTLNPYAVQSFPNSQSHYPSEEHWRMASGNFSPDGQHNWLAGGGALPCSEGPYVQDGYSRSNIDRSSINPMNHQHTVLNHLPYGAPLPGHVPQMLPARSDVHTLNCWRPS

SEQ ID NO: 186318 - protein, 1098 aa, Zea Mays
MSADKESREFKKSKIMTKQSLTTDSEKMDYNKIVHGGPDEQLTGKSSAGFSSNKKSLPDSGQHKMDSSADTRPGKKPRLMDRAGETDKTVDKSEMKSNIDYGKHYAVKHERPTSMETCKNTILKTSTSDDRALRSGGVVSPISRLHSEVMEPACGSVTLSTVADSVKKGSSMKEDASRVDRQLVKPKRRACRFDEDEDEGQRTPLHRTSAKSLSTHIVPTEKAGIRGKFSSHVGNVFGKKLGPAREEKSRSVRMSPVKHEPIFSSPSQDKVHARHQVVEKRLITGLVETPAVIGNKMSLVDGKSSAQVKMPASSEVKKLRSSSSKPSHLTSGNSHSRNYPAPEKIPLLPQPEETKAKSKLATSVEHKVGTTLSTEQSGKRDHLKEERSSYVDKAVSSEPNPGSAKSIKHLIAAAQARRNLMASVHAKFDGSSTDNADITSTPYGLPGLSPSPVFRIPSPPRIAFPGSPGQRILKSPIEFDNGHGKSPKSRQASGSPSGGTDAAIARDALEGMIETLSRTKDSIGRATRHAIECSKYGIAGEIVELLIQKLQSEPNFHRRIDLLFLVDSITQCSHSQRGVARASYVPTVQAALPRLLGAAAPPGAGARENRRQCLKVLRLWLERKIMPEDILRKYMGDIEVPNDDTSTTLMLKRPSRAERSVDDPIREMDDMLVDEYGSNATFELSGILSSKVFEDDEDFPKNNGSSPFVSQARPVENDVIRKTEDTIAPVYVEEHIIIVENVTTDAAMEDALELPGNKQQTDGAVLIEHDSIQDPGSEQAIDQNDFPSLPDGPPPLPSDSPPPPPPLPPSPPPVTPPPPPPPPLSPASPPPPPPPPLPSGPPPQPAPPPLATQVTPLPSIPPPVPSSPPSLSYQPPAPEYFVTANGDQLTQMTGNILIQAIGNATTFIPSGPVNGQAAVNFVTSMQAEYGNNNIFMAPQASNGNYQFRPTGVPFQQGNFSAFPSAQTHPVQPHSHMAHMNPMGQQAVPPTLNPYAVQSFPNSQSHYPSEEHWRMASGNFSPDGQHNWLAGGGALPCSEGPYVQDGYSRSNIDRSSINPMNHQHTVLNHLPYGAPLPGHVPQMLPARSDVHTLNCWRPS

SEQ ID NO: 186319 - protein, 201 aa, Zea Mays
MLNKNVSYSTYSTPHEPLRHTHIPDKYSGCAFSLGFDSFTTMSLGPNICANMTPMERSISAKEPENSEDLPTVVRSSDEMDTRNSGDVRRDTVDTLPESKQSHESCASKFDSGEYQVILRKELTKSDVANSGRIVLPKKDAEAGLPPLVQGDPLILQMDDMVLPIIWKFKYRFWPNNKSRMYILEAAGEFVKTHGLQAGDT

SEQ ID NO: 186320 - protein, 571 aa, Zea Mays
MGVKNLWDILDSCKKKLPLQHLHMEEAEAQCALLNFSSLCDGCFTSDSDSFLFGAKTVYRDVFIGEGGYVICYEMEDIQNKLGFGRNSLISLAVLLGSDYSNGVHGFGPEAACRLVKSLGDDTVLGQILSDGVKPARKCKGKGSGANAGTVGGTCPKASTCEVGINQDSGSQFRDIINAYLEPKCHSPDSEAVQRACSQRPFLRSQLHQICEQYFAWSPVKTDEYILPKIAERELRRFSNLRSTSSDLGMKPSLNEIPVPCPVLAIVKQRKVQGSEYYEVSWRNIDGLQVSVVPGELVRSACPEKITEFLESKDAQKKQKRRARPKKSGQAAVKDVDAQLQELLLGIESESGSFPCTANGPQTAAIQMVAPLQEFVDLSSPSPPIRSCKIARSRKLSDSDTVTMDGIHLQHQSLQIGSMESNSALGLEPIDLSSPSPCAAHKPQAAPEAPPLCMEAERRALWDISNLVEKEPSCCKHEPGTNVQVEESPLFRHGTGMAGEADSSRRGDAQSREVVEAAMIDLSSPSPVKVDNSRRNGKKDCEAGSSSQSPEHERKARELRLFLDSIRDELY

SEQ ID NO: 186321 - protein, 536 aa, Zea Mays
MEEAEAQCALLNFSSLCDGCFTSDSDSFLFGAKTVYRDVFIGEGGYVICYEMEDIQNKLGFGRNSLISLAVLLGSDYSNGVHGFGPEAACRLVKSLGDDTVLGQILSDGVKPARKCKGKGSGANAGTVGGTCPKASTCEVGINQDSGSQFRDIINAYLEPKCHSPDSEAVQRACSQRPFLRSQLHQICEQYFAWSPVKTDEYILPKIAERELRRFSNLRSTSSDLGMKPSLNEQRKVQGSEYYEVSWRNIDGLQVSVVPGELVRSACPEKITEFLESKDAQKKQKRRARPKKSGQAAVKDVDAQLQELLLGIESESGSFPCTANGPQTAAIQMVAPLQEFVDLSSPSPPIRSCKIARSRKLSDSDTVTMDGIHLQHQSLQIGSMESNSALGLEPIDLSSPSPCAAHKPQAAPEAPPLCMEAERRALWDISNLVEKEPSCCKHEPGTNVQVEESPLFRHGTGMAGEADSSRRGDAQSREVVEAAMIDLSSPSPVKVDNSRRNGKKDCEAGSSSQSPEHERKARELRLFLDSIRDELY

SEQ ID NO: 186322 - protein, 567 aa, Zea Mays
MIKEAKHLGLALGIPCLDGMEEAEAQCALLNFSSLCDGCFTSDSDSFLFGAKTVYRDVFIGEGGYVICYEMEDIQNKLGFGRNSLISLAVLLGSDYSNGVHGFGPEAACRLVKSLGDDTVLGQILSDGVKPARKCKGKGSGANAGTVGGTCPKASTCEVGINQDSGSQFRDIINAYLEPKCHSPDSEAVQRACSQRPFLRSQLHQICEQYFAWSPVKTDEYILPKIAERELRRFSNLRSTSSDLGMKPSLNEIPVPCPVLAIVKQRKVQGSEYYEVSWRNIDGLQVSVVPGELVRSACPEKITEFLESKDAQKKQKRRARPKKSGQAAVKDVDAQLQELLLGIESESGSFPCTANGPQTAAIQMVAPLQEFVDLSSPSPPIRSCKIARSRKLSDSDTVTMDGIHLQHQSLQIGSMESNSALGLEPIDLSSPSPCAAHKPQAAPEAPPLCMEAERRALWDISNLVEKEPSCCKHEPGTNVQVEESPLFRHGTGMAGEADSSRRGDAQSREVVEAAMIDLSSPSPVKVDNSRRNGKKDCEAGSSSQSPEHERKARELRLFLDSIRDELY

SEQ ID NO: 186323 - protein, 552 aa, Zea Mays
MLLSMEEAEAQCALLNFSSLCDGCFTSDSDSFLFGAKTVYRDVFIGEGGYVICYEMEDIQNKLGFGRNSLISLAVLLGSDYSNGVHGFGPEAACRLVKSLGDDTVLGQILSDGVKPARKCKGKGSGANAGTVGGTCPKASTCEVGINQDSGSQFRDIINAYLEPKCHSPDSEAVQRACSQRPFLRSQLHQICEQYFAWSPVKTDEYILPKIAERELRRFSNLRSTSSDLGMKPSLNEIPVPCPVLAIVKQRKVQGSEYYEVSWRNIDGLQVSVVPGELVRSACPEKITEFLESKDAQKKQKRRARPKKSGQAAVKDVDAQLQELLLGIESESGSFPCTANGPQTAAIQMVAPLQEFVDLSSPSPPIRSCKIARSRKLSDSDTVTMDGIHLQHQSLQIGSMESNSALGLEPIDLSSPSPCAAHKPQAAPEAPPLCMEAERRALWDISNLVEKEPSCCKHEPGTNVQVEESPLFRHGTGMAGEADSSRRGDAQSREVVEAAMIDLSSPSPVKVDNSRRNGKKDCEAGSSSQSPEHERKARELRLFLDSIRDELY

SEQ ID NO: 186324 - protein, 493 aa, Zea Mays
MSPSGELLASISSVFTVAFVLLACVELGDAAAAAVGVYRLIQYDLAGAPLGSRAAVLNHHAAALPLPAGADLSRSALVAPLLDLPLSFLREYLVEKKHLGGLLILLPTNNDSVDDKGQFKGVLTELEKLLLHEQVPGWLPGFKGEGDSEQLPTIAIVANYDTFGAVPALSVGSDSNGSGVVALLEIARLFSRLYSNPKTRGKYNILFGLTSGGPYNYNGTSKWLRSFDQRVRESIDYAICLNNVGSWGNDLWMHVSKPPENPYIKQIFKEFSDVSKEMGVSVGIKHKKINVSNPRVAWEHEQFSRFRVTALTLSEMSTPPDFLESTGGLHDTRESTDAESVIRAARLVSESLARRIYGLKGRNIDVFAENSSLAINPHYIRSWLDLLSRTPRVAPFLQKNDPFIAALEKELSAHTTDVRVQSDALDGMFTFYDATKATLNVYQVAGVTFDLLFLLVLGSYLIVLFCFLVITTRGVDDLINIFRRPPSRKLKGA

SEQ ID NO: 186325 - protein, 466 aa, Zea Mays
MSPSGELLASISSVFTVAFVLLACVELGDAAAAAVGVYRLIQYDLAGAPLGSRAAVLNHHAAALPLPAGADLSRSALVAPLLDLPLSFLREYLVEKKHLGGLLILLPTNNDSVDDKGQFKGVLTELEKLLLHEQVPYPVYFALHDDNLDNLLADIHRIASTGQPASATTGGYKLVVSSAEPRKVSSPTISNIQGWLPGFKGEGDSEQLPTIAIVANYDTFGAVPALSVGSDSNGSGVVALLEIARLFSRLYSNPKTRGKYNILFGLTSGGPYNYNGTSKWLRSFDQRVRESIDYAICLNNVGSWGNDLWMHVSKPPENPYIKQIFKEFSDVSKEMGVSVGIKHKKINVSNPRVAWEHEQFSRFRVTALTLSEMSTPPDFLESTGGLHDTRESTDAESVIRAARLVSESLARRIYGLKGRNIDVFAENSSLAINPHYIRSWLDLLSRTPRVAPFLQKNDPFIAALEK

SEQ ID NO: 186326 - protein, 241 aa, Zea Mays
MHVSKPPENPYIKQIFKEFSDVSKEMGVSVGIKHKKINVSNPRVAWEHEQFSRFRVTALTLSEMSTPPDFLESTGGLHDTRESTDAESVIRAARLVSESLARRIYGLKGRNIDVFAENSSLAINPHYIRSWLDLLSRTPRVAPFLQKNDPFIAALEKELSAHTTDVRVQSDALDGMFTFYDATKATLNVYQVAGVTFDLLFLLVLGSYLIVLFCFLVITTRGVDDLINIFRRPPSRKLKGA

SEQ ID NO: 186327 - protein, 589 aa, Zea Mays
MSVAATPTTGQRRHLHLPPRLPPVSASLDPAASHPSKGAMSPSGELLASISSVFTVAFVLLACVELGDAAAAAVGVYRLIQYDLAGAPLGSRAAVLNHHAAALPLPAGADLSRSALVAPLLDLPLSFLREYLVEKKHLGGLLILLPTNNDSVDDKGQFKGVLTELEKLLLHEQVPYPVYFALHDDNLDNLLADIHRIASTGQPASATTGGYKLVVSSAEPRKVSSPTISNIQGWLPGFKGEGDSEQLPTIAIVANYDTFGAVPALSVGSDSNGSGVVALLEIARLFSRLYSNPKTRGKYNILFGLTSGGPYNYNGTSKWLRSFDQRVRESIDYAICLNNVGSWGNDLWMHVSKPPENPYIKQIFKEFSDVSKEMGVSVGIKHKKINVSNPRVAWEHEQFSRFRVTALTLSEMSTPPDFLESTGGLHDTRESTDAESVIRAARLVSESLARRIYGLKGRNIDVFAENSSLAINPHYIRSWLDLLSRTPRVAPFLQKNDPFIAALEKELSAHTTDVRVQSDALDGMFTFYDATKATLNVYQVAGVTFDLLFLLVLGSYLIVLFCFLVITTRGVDDLINIFRRPPSRKLKGA

SEQ ID NO: 186328 - protein, 587 aa, Zea Mays
MVVTVLFQSGVLGRVSLLSPWHCFQRSEAHGICIAVAATPTTGQRRHLHLPPRLPPVSASLDPAASHPSKGAMSPSGELLASISSVFTVAFVLLACVELGDAAAAAVGVYRLIQYDLAGAPLGSRAAVLNHHAAALPLPAGADLSRSALVAPLLDLPLSFLREYLVEKKHLGGLLILLPTNNDSVDDKGQFKGVLTELEKLLLHEQVPYPVYFALHDDNLDNLLADIHRIASTGQPASATTGGYKLVVSSAEPRKVSSPTISNIQGWLPGFKGEGDSEQLPTIAIVANYDTFGAVPALSVGSDSNGSGVVALLEIARLFSRLYSNPKTRGKYNILFGLTSGGPYNYNGTSKWLRSFDQRVRESIDYAICLNNVGSWGNDLWMHVSKPPENPYIKQIFKEFSDVSKEMGVSVGIKHKKINVSNPRVAWEHEQFSRFRVTALTLSEMSTPPDFLESTGGLHDTRESTDAESVIRAARLVSESLARRIYGLKGRNIDVFAENSSLAINPHYIRSWLDLLSRTPRVAPFLQKNDPFIAALEKELSAHTTDVRVQSDALDGMFTFYDATKATLNVYQVLLLICCSFWCSAPT

SEQ ID NO: 186329 - protein, 230 aa, Zea Mays
MSIKYCDQHKDCERQRLYRRFCAALVGVIVLVLLIVLIVWLVLRPTKPRFFLNDVSIVCINVSSASYLTVTMQATLASRNTNDRVGIYYDRADVYAEYRAMQITVPTALPPFFQPPNDAAVWAPFLSASNVPLPPYLATALTQDETAGYLLVTIRVDGWIRWKAGAFITSHYHLRVRCPALLTVNDGQGSYGSNAECILDFLEVWWDKKKDYCFESTEFMRGTNPHTHKM

SEQ ID NO: 186330 - protein, 469 aa, Zea Mays
MAAPSAAPRHAVPARHGLLPGPHALSRRAPPDRPSLSPPRRARARARGQLRGVLRGRGAGARGVGVRRGVRGRGRRGHAQHRGVPARRRGAGREGRRWGRGQARRAPREVAHGQLQPHQPLHPLPAPRRGHPRLPGSRRVASHYPFAVLRARERAVRTTPHQPHSRRGLKRCCYYRNGTIDGQGHMWWELWRNRTLNHTRGHLIELVNSTNVLISSVTLSNSPFWTVHPVYCSNVVMKDLTILAPLDAPNTDGIDPDSSSEVCIEDCYIESGDDLVAVKSGWDQYGISFGKPSTNIVIQRVSGTTPTCSGVGFGSEMSGGISNVLVRDLHVWNSAQAVRLKTDVGRGGYITNITIASVAMEKVKVPIRFSRGADDHPDDRYDPAALPRISNVLVSDVVGVHLQRAPMLEAVPGAVYEGICFRNFSFRGIRRQQDSRWHCESVYGEAHDVFPAPCEEFRRDGSSSWCGLL

SEQ ID NO: 186331 - protein, 97 aa, Zea Mays
MATVLGSPRAPAKVGIMGRSASSRGRLRAQATYNVKLITPEGEVELQVPDDVYILDQSDQSYLDDGQIAAGWVLTCHAYPTSDVVIETHKEEELTGA

SEQ ID NO: 186332 - protein, 397 aa, Zea Mays
MCHNALFDILISEKFAMLCDLLAATFHVSKPDDVIGLQIIDAKMRNGDYAQNHALLDHDIKQIWKKFEHVGQEMAGLASSLSVISQASHQKQASGVSEIDVAEHKIEETSLVGVARKALRELTPQCDSGYSTIPKRAGRSGSDGICKDCGRKADSKGRIICDRCEAAYHVSCLKLAIDEEAPAKWYCPSCVEPDVALKHKNHGRSHEGCDVCEWLVVKPEEPAEDVSEPELAVKTQESSVSSMGEDSEPDLSTTALANLCKNCGTCEDEDRKFMVCGHGLCSFKFYHVLCLKERQIASEKQKNLKCWYCPSCLCRRCFKDKDDEKIVLCDGCDEAYHIYCMDPPCESVPRGKWFCTRCSARRSVQGMQRYEKSILEKVKRAPGANGPKVQASAGPEK

SEQ ID NO: 186333 - protein, 67 aa, Zea Mays
MQTPSSSFRSCRRVRRKEGCREASCEHLRRSRARRRSWAPVEPVVVSQHRSAWAVLPPAESSARTRV

SEQ ID NO: 186334 - protein, 290 aa, Zea Mays
MESENEKLRKELATLLRVVQKRSCDIVDVVKSAFQPFNSPLVDELNRALVEIDDLAKDLEDVAVQTQWEVYERPCGLYMLIYIMFDLPLLHRMGSDWNQYQLAHISAGDLLRAEIAAGSENGKRAKEFMEKGQLVPDEIVVNERLRQPDAQENGWLLDGYPRSYSQAMALETLEIRPDTFILLDVPDELLVERVVGRRLDPVTGKIYHLKYSPPENEEIASRLTQRFDDTEEKVKLRLETYYQNIESLLSTYENIIVKVQGDATVDAVFAKIDELLGSILEKKNEMVSST

SEQ ID NO: 186335 - protein, 334 aa, Zea Mays
MSTVPREFAGLDPRSADFHPALTRCPVTCGFCCAGRLIRRAPWMNSRRSRSVKLVSARANGDGALEVDVPEEEGDARMSSSAANTVYCCIARGRSVIYRYSSKGGDPQAEATAALCLDRSPPHHRHYVHTSGRRSYGYLTADGHTFFAIIDPSVGSAGALQFLERVRDAFRSSAGVGGRQPHESLVPAVQRLVASLEKMPHAAFVLDGAGAGAGDGDGCTSSSKAPLLGKSGSRKEKRRSRDKLSSSAAGAGAGGCEDEHHGTRAVRIDVMPAEDVGGMSLERSGSQSRLRRQQSSRSLWMRHVKVIVAVDAVVCLVLLAAWLAVCKGFQCVSG

SEQ ID NO: 186336 - protein, 379 aa, Zea Mays
MWGGDSNAKQMLKSRGGTGVVGGLPAAGDEESDYFPPTPRKDYWWSTGLLKLVTATVIFMGGVVLGLSVSGSVARYYYNASHAELFFPATTYGCDPRDRDCGMGLAFRAFVHPPRLAHSMTDDELFWRASLVPRAEEFPFQRVPKVAFLFMARGPIPFAPLWDKFFRGHQGLYSVYVHTVPDYKLNVSKSSAFYGRQIPSEEVSWGSITLVDAEKRLLANALLDFSNERFVLLSESCIPVFNFPTVYEYLINSAHSFVESYNIDTPQCAGRYNRRMAPHIMADQWRKGSEWFELNRELAVQIVADYKYYSIFRKHCRPSCYPDEHYIPTYLHLFHGPLNANRTITWVDWSRGGPHPASYGATDITEDFIQAIRNNASRY

SEQ ID NO: 186337 - protein, 918 aa, Zea Mays
MVGAHLAAPTPRCPSLFPVSDSTHLPFPLAAGDPEPGAAHMAGRDERWGARGGPGDTHASTSRAPAGTAGESEGASPDSLRNTPSNIARLEDAIGHCAARRKYLAHTKSPSDGKDVRWYFCNLPLADKVLSSSVPRTEIVGKGDYFRFSERDSLALEASFLEREEVLLAYWWREYAECSAGPRGSLVESDDSAYLYKVEEERVGVPVKGGLYEVDLMRRHCFPVYWNGENRRVLRGHWFARKGGVDWIPLREDVSEQLELAYNCQVWHRRKFQPSGLFAARVDLQGSTLDLHALFTGEDDTWEAWLVFDTGPKLGSNTIKLRRGFSPSESASTKPSQDELRQTKEEEMDDYCSQVPVGHLVFMVHGIGQRLEKANLVDDVVDFRRVTANLAERYLTSYQRSTQRVLFIPCQWRKGLKLSGESTVEKLTLDGVKGLRVALGATVHDVLYYMSPIYCQHIIDSVSNQLNKLYMKFLKRNPGYSGKVSLYGHSLGSVLSYDILCHQESLLAPFPTEYLNMETSDRSQGAKSANEVALHDSVVAEQNEKENRIENHQTVYTEEGTTSGVSTKDAEASHISRSAEDVHEEVLDKEKMIISLEEEVKRLKAKLDQLEQHKHLVTESTSGVEYHGGKNGNHALNFGELFTAQGSINQPYSPQIKYTKLNFKVDTFFAVGSPLGVFLSLRNVRIGIGKGRDYWKDKNIIEEMPCCRQMFNIFHPFDPVAYRVEPLVCEDYQKKRPVIVPYHRGGKRIHVGVQEFTEDISARSQAIACQLKSLKVKAVAALLALSRNDTEEDGESANEEGRSYGSIMMERLTGSPDGRIDHVLQEKTFQHSYLSALGAHTNYWRDHDTALFILKHLYRDIPEDPPSDVVERMHIKLFYERDPVEEETPVTFSDHAAIKEFCRKVRAYSTKMEDDANC

SEQ ID NO: 186338 - protein, 952 aa, Zea Mays
MVGAHLAAPTPRCPSLFPVSDSTHLPFPLAAGDPEPGAAHMAGRDERWGARGGPGDTHASTSRAPAGTAGESEGASPDSLRNTPSNIARLEDAIGHCAARRKYLAHTKSPSDGKDVRWYFCNLPLADKVLSSSVPRTEIVGKGDYFRFSERDSLALEASFLEREEVLLAYWWREYAECSAGPRGSLVESDDSAYLYKVEEERVGVPVKGGLYEVDLMRRHCFPVYWNGENRRVLRGHWFARKGGVDWIPLREDVSEQLELAYNCQVWHRRKFQPSGLFAARVDLQGSTLDLHALFTGEDDTWEAWLVFDTGPKLGSNTIKLRRGFSPSESASTKPSQDELRQTKEEEMDDYCSQVPVGHLVFMVHGIGQRLEKANLVDDVVDFRRVTANLAERYLTSYQRSTQRVLFIPCQWRKGLKLSGESTVEKLTLDGVKGLRVALGATVHDVLYYMSPIYCQHIIDSVSNQLNKLYMKFLKRNPGYSGKVSLYGHSLGSVLSYDILCHQESLLAPFPTEYLNMETSDRSQGAKSANEVALHDSGSTRTDMSHMDSIVPSCVLEDSLNNPETGVPRGAVVAEQNEKENRIENHQTVYTEEGTTSGVSTKDAEASHISRSAEDVHEEVLDKEKMIISLEEEVKRLKAKLDQLEQHKHLVTESTSGVEYHGGKNGNHALNFGELFTAQGSINQPYSPQIKYTKLNFKVDTFFAVGSPLGVFLSLRNVRIGIGKGRDYWKDKNIIEEMPCCRQMFNIFHPFDPVAYRVEPLVCEDYQKKRPVIVPYHRGGKRIHVGVQEFTEDISARSQAIACQLKSLKVKAVAALLALSRNDTEEDGESANEEGRSYGSIMMERLTGSPDGRIDHVLQEKTFQHSYLSALGAHTNYWRDHDTALFILKHLYRDIPEDPPSDVVERMHIKLFYERDPVEEETPVTFSDHAAIKEFCRKVRAYSTKMEDDANC

SEQ ID NO: 186339 - protein, 787 aa, Zea Mays
MVGAHLAAPTPRCPSLFPVSDSTHLPFPLAAGDPEPGAAHMAGRDERWGARGGPGDTHASTSRAPAGTAGESEGASPDSLRNTPSNIARLEDAIGHCAARRKYLAHTKSPSDGKDVRWYFCNLPLADKVLSSSVPRTEIVGKGDYFRFSERDSLALEASFLEREEVLLAYWWREYAECSAGPRGSLVESDDSAYLYKVEEERVGVPVKGGLYEVDLMRRHCFPVYWNGENRRVLRGHWFARKGGVDWIPLREDVSEQLELAYNCQVWHRRKFQPSGLFAARVDLQGSTLDLHALFTGEDDTWEAWLVFDTGPKLGSNTIKLRRGFSPSESASTKPSQDELRQTKEEEMDDYCSQVPVGHLVFMVHGIGQRLEKANLVDDVVDFRRVTANLAERYLTSYQRSTQRVLFIPCQWRKGLKLSGESTVEKLTLDGVKGLRVALGATVHDVLYYMSPIYCQHIIDSVSNQLNKLYMKFLKRNPGYSGKVSLYGHSLGSVLSYDILCHQESLLAPFPTEYLNMETSDRSQGAKSANEVALHDSGAKDHDTYTLGHSCTGNENSAVDEGSTRTDMSHMDSIVPSCVLEDSLNNPETGVPRGAVVAEQNEKENRIENHQTVYTEEGTTSGVSTKDAEASHISRSAEDVHEEVLDKEKMIISLEEEVKRLKAKLDQLEQHKHLVTESTSGVEYHGGKNGNHALNFGELFTAQGSINQPYSPQIKYTKLNFKVDTFFAVGSPLGVFLSLRNVRIGIGKGRDYWKDKNIIEEMPCCRQMFNIFHPFDPVAYRWAFIQS

SEQ ID NO: 186340 - protein, 571 aa, Zea Mays
MRRHCFPVYWNGENRRVLRGHWFARKGGVDWIPLREDVSEQLELAYNCQVWHRRKFQPSGLFAARVDLQGSTLDLHALFTGEDDTWEAWLVFDTGPKLGSNTIKLRRGFSPSESASTKPSQDELRQTKEEEMDDYCSQVPVGHLVFMVHGIGQRLEKANLVDDVVDFRRVTANLAERYLTSYQRSTQRVLFIPCQWRKGLKLSGESTVEKLTLDGVKGLRVALGATVHDVLYYMSPIYCQHIIDSVSNQLNKLYMKFLKRNPGYSGKVSLYGHSLGSVLSYDILCHQESLLAPFPTEYLNMETSDRSQGAKSANEVALHDSGAKDHDTYTLGHSCTGNENSAVDEGSTRTDMSHMDSIVPSCVLEDSLNNPETGVPRGAVVAEQNEKENRIENHQTVYTEEGTTSGVSTKDAEASHISRSAEDVHEEVLDKEKMIISLEEEVKRLKAKLDQLEQHKHLVTESTSGVEYHGGKNGNHALNFGELFTAQGSINQPYSPQIKYTKLNFKVDTFFAVGSPLGVFLSLRNVRIGIGKGRDYWKDKNIIEEMPCCRQMFNIFHPFDPVAYRWAFIQS

SEQ ID NO: 186341 - protein, 911 aa, Zea Mays
MVGAHLAAPTPRCPSLFPVSDSTHLPFPLAAGDPEPGAAHMAGRDERWGARGGPGDTHASTSRAPAGTAGESEGASPDSLRNTPSNIARLEDAIGHCAARRKYLAHTKSPSDGKDVRWYFCNLPLADKVLSSSVPRTEIVGKGDYFRFSERDSLALEASFLEREEVLLAYWWREYAECSAGPRGSLVESDDSAYLYKVEEERVGVPVKGGLYEVDLMRRHCFPVYWNGENRRVLRGHWFARKGGVDWIPLREDVSEQLELAYNCQVWHRRKFQPSGLFAARVDLQGSTLDLHALFTGEDDTWEAWLVFDTGPKLGSNTIKLRRGFSPSESASTKPSQDELRQTKEEEMDDYCSQVPVGHLVFMVHGIGQRLEKANLVDDVVDFRRVTANLAERYLTSYQRSTQRVLFIPCQWRKGLKLSGESTVEKLTLDGVKGLRVALGATVHDVLYYMSPIYCQHIIDSVSNQLNKLYMKFLKRNPGYSGKVSLYGHSLGSVLSYDILCHQESLLAPFPTEYLNMETSDRSQGAKSANEVALHDSGAKDHDTYTLGHSCTGNENSAVDEGSTRTDMSHMDSIVPSCVLEDSLNNPETGVPRGAVVAEQNEKENRIENHQTVYTEEGTTSGVSTKDAEASHISRSAEDVHEEVLDKEKMIISLEEEVDTFFAVGSPLGVFLSLRNVRIGIGKGRDYWKDKNIIEEMPCCRQMFNIFHPFDPVAYRVEPLVCEDYQKKRPVIVPYHRGGKRIHVGVQEFTEDISARSQAIACQLKSLKVKAVAALLALSRNDTEEDGESANEEGRSYGSIMMERLTGSPDGRIDHVLQEKTFQHSYLSALGAHTNYWRDHDTALFILKHLYRDIPEDPPSDVVERMHIKLFYERDPVEEETPVTFSDHAAIKEFCRKVRAYSTKMEDDANC

SEQ ID NO: 186342 - protein, 851 aa, Zea Mays
MVGAHLAAPTPRCPSLFPVSDSTHLPFPLAAGDPEPGAAHMAGRDERWGARGGPGDTHASTSRAPAGTAGESEGASPDSLRNTPSNIARLEDAIGHCAARRKYLAHTKSPSDGKDVRWYFCNLPLADKVLSSSVPRTEIVGKGDYFRFSERDSLALEASFLEREEVLLAYWWREYAECSAGPRGSLVESDDSAYLYKVEEERVGVPVKGGLYEVDLMRRHCFPVYWNGENRRVLRGHWFARKGGVDWIPLREDVSEQLELAYNCQVWHRRKFQPSGLFAARVDLQGSTLDLHALFTGEDDTWEAWLVFDTGPKLGSNTIKLRRGFSPSESASTKPSQDELRQTKEEEMDDYCSQVPVGHLVFMVHGIGQRLEKANLVDDVVDFRRVTANLAERYLTSYQRSTQRVLFIPCQWRKGLKLSGESTVEKLTLDGVKGLRVALGATVHDVLYYMSPIYCQHIIDSVSNQLNKLYMKFLKRNPGYSGKVSLYGHSLGSVLSYDILCHQESLLAPFPTEYLNMETSDRSQGAKSANEVALHDSGAKDHDTYTLGHSCTGNENSAVDEGSTRTDMSHMDSIVPSCVLEDSLNNPETGVPRGAVVAEQNEKENRIENHQTVYTEEGTTSGVSTKDAEASHISRSAEDVHEEVLDKEKMIISLEEEVKRLKAKLDQLEQHKHLVTESTSGVEYHGGKNGNHALNFGELFTAQGSINQPYSPQIKYTKLNFKVDTFFAVGSPLGVFLSLRNVRIGIGKGRDYWKDKNIIEEMPCCRQMFNIFHPFDPVAYRVEPLVCEDYQKKRPVIVPYHRGGKRIHVGVQEFTEDISARSQAIACQLKSLKVKAVAALLALSRNDTEGW

SEQ ID NO: 186343 - protein, 332 aa, Zea Mays
MRRHCFPVYWNGENRRVLRGHWFARKGGVDWIPLREDVSEQLELAYNCQVWHRRKFQPSGLFAARVDLQGSTLDLHALFTGEDDTWEAWLVFDTGPKLGSNTIKLRRGFSPSESASTKPSQDELRQTKEEEMDDYCSQVPVGHLVFMVHGIGQRLEKANLVDDVVDFRRVTANLAERYLTSYQRSTQRVLFIPCQWRKGLKLSGESTVEKLTLDGVKGLRVALGATVHDVLYYMSPIYCQHIIDSVSNQLNKLYMKFLKRNPGYSGKVSLYGHSLGSVLSYDILCHQESLLAPFPTEYLNMETSDRSQGAKSANEVALHDSALSHHVCSRIH

SEQ ID NO: 186344 - protein, 939 aa, Zea Mays
MGSQESEQAKVLPGTDCPQQPPASRTWQRRFDDEGKNVAMFSMTMSDLVELVAVYDLLRKWMDNCYRGVPVGGIGSGSIGRSYRGYFQQFQIFPVTNEEKPVLANQFSAFVSRPNGNKYSTVLSAPTADLLKGVGKAGIGSWDWRLKEDRCTYHALFPRSWTVYDGEPDPEIKITCRQISPFIPHNYRESSFPAAVFTFTVNNSGSSPADVTLLFTWANSVGGKSELTGNHVNSKMTEHDGVRGVLLHHRTAGGQPPVTFAIASRETDGVRVSVCPSFTIASGGPSSSGEPTAAAMWDEIKKHGAFGHAGAGNGNAARAAASKAGSSVGAAVAASTAVPAGATRVVSFSLAWACPEVKFPAGSTYYRRYTRFYGTDADAAAEHLAHDALLEHMNWESQIEEWQKPILHDQRLPEWYPVALFNELYYLNAGGTIWTVEEMLTDGQAPKRAGFASSLTATEPFSIDTLLPVAAGGSAVDGVVRAVASATERSHSAAAFGAALLRGGEDNVGQFLYLEGMEYNMYNTYDVHFYASFALLSLFPRLELSLQRDFARAVLLHDPRPRRTLDGRTVARKVLGAVPHDVGLNDPWVELNAYMLHDAARWKDLNPKFVLQVYRDAVATGDAAFAEAVWPAVYVAMAYMDQFDRDGDGMVENEGVPDQTYDMWSVSGVSAYTGGVWVAALQAAAGMARVVGDRPAEAYFRARRDRAARVYDAELWTGAYFRYDNSGGGGASESIMADQLAGQWYARACGLEPVVEDAKARSALATVLDYNVMRVKGGAIGAVNGMRPDGAVDASSTQSKEVWPGVTYAVAAAMVHEGMTEAAFRTAKGAHDAAWGNDGFGYAFQTPEAWTEDGGYRSLHYMRPLGIWAMQWALSPPELHRDLRTPEARSSEEPSPADAALGQAQFDKVASMLRLPEEQQPKGYLWAIYNLVRQIVLPA

SEQ ID NO: 186345 - protein, 952 aa, Zea Mays
MGSQESEQAKVLPGTDCPQQPPASRTWQRRFDDEGKNVAMFSMTMSDLVELMPLMVKILKLQVEENAEGRVAVYDLLRKWMDNCYRGVPVGGIGSGSIGRSYRGYFQQFQIFPVTNEEKPVLANQFSAFVSRPNGNKYSTVLSAPTADLLKGVGKAGIGSWDWRLKEDRCTYHALFPRSWTVYDGEPDPEIKITCRQISPFIPHNYRESSFPAAVFTFTVNNSGSSPADVTLLFTWANSVGGKSELTGNHVNSKMTEHDGVRGVLLHHRTAGGQPPVTFAIASRETDGVRVSVCPSFTIASGGPSSSGEPTAAAMWDEIKKHGAFGHAGAGNGNAARAAASKAGSSVGAAVAASTAVPAGATRVVSFSLAWACPEVKFPAGSTYYRRYTRFYGTDADAAAEHLAHDALLEHMNWESQIEEWQKPILHDQRLPEWYPVALFNELYYLNAGGTIWTDGQAPKRAGFASSLTATEPFSIDTLLPVAAGGSAVDGVVRAVASATERSHSAAAFGAALLRGGEDNVGQFLYLEGMEYNMYNTYDVHFYASFALLSLFPRLELSLQRDFARAVLLHDPRPRRTLDGRTVARKVLGAVPHDVGLNDPWVELNAYMLHDAARWKDLNPKFVLQVYRDAVATGDAAFAEAVWPAVYVAMAYMDQFDRDGDGMVENEGVPDQTYDMWSVSGVSAYTGGVWVAALQAAAGMARVVGDRPAEAYFRARRDRAARVYDAELWTGAYFRYDNSGGGGASESIMADQLAGQWYARACGLEPVVEDAKARSALATVLDYNVMRVKGGAIGAVNGMRPDGAVDASSTQSKEVWPGVTYAVAAAMVHEGMTEAAFRTAKGAHDAAWGNDGFGYAFQTPEAWTEDGGYRSLHYMRPLGIWAMQWALSPPELHRDLRTPEARSSEEPSPADAALGQAQFDKVASMLRLPEEQQPKGYLWAIYNLVRQIVLPA

SEQ ID NO: 186346 - protein, 418 aa, Zea Mays
MPPYTGQPPHMNSMPANPFPVPGPQQPVPSNQQHPPQFRANSSIGPFFGQPPGIVSQQMPPSSSMPPPVRPLQIPHASGGWPPFSPVTSQSHRPLQAPPTFMAVRPPISVSPLGATPPQGPIALTPPNMPTMYRGQHPPVPNFTGSAPLVSRPPGGGAQSFPTAAPQGPSSVAFPGGPSLRPPYPPAPDQARGPPPAFSPVGSTPGMVPPPIASSGLPAPRPANTSCIQTQVVAPLRPPLPAAGDFTFRPAIPPAHAPEFAAPGSQMGAIHGRTHHPGPFSSHPGDQKNPSQGFQGPFDGSRPMYTTNQARMHAPPPPHFHGAFPRNASPLEFPAGFRGAWPSVQAPPMPAPSHPSSFPPFQLRPPPPPQQDMSGAGGTRWPGGNQIYNPFAPTAAAAAQRAEADPEYEDLMASVGMK

SEQ ID NO: 186347 - protein, 549 aa, Zea Mays
MGCVSSRQFHGGDDRGDGKPRRRPSSNSLKRLVSSSSSKRHEELEEEYEEGVAVAATSSSAGRRAGNDASTARLIRKPPALVVEAVPALLEEAATLAVGVVDAEREVSATTGNRKRPPADVQVNGVAEQEPRSGGVRAEGEAKLRTKDMPNGVQGEHVAAGWPRWLTEVAAEAVRGWQPRRAESFEKLDKIGQGTYSSVYKARDLENGKIVALKKVRFANMDPESVRFMAREIHILRRLDHPNVIKLEGLVTSRMSSSLYLVFEYMEHDLAGLAATPGLKFSEPQVKCYMQQLLSGLDHCHNRGVLHRDIKGANLLLDNNGILKIADFGLATFFNPNQKQHLTSRVVTLWYRPPELLLGSTNYGAAVDLWSAGCILAELLSGKPIMPGRTEVEQLHKIFKLCGSPSEEFWANLKLSRATIFKPQHPYRRCVNDVYKDFPTTALTLLDYLLAVEPGNRGTAASALDSEFFTTKPYACDPSNLPKYPPSKEYDAKLRDEEARRQRAAAKGQEAEAGRRKQLPAPDAPPSSGEFQKQHLQVHSKGGCFWISN

SEQ ID NO: 186348 - protein, 746 aa, Zea Mays
MGCVSSRQFHGGDDRGDGKPRRRPSSNSLKRLVSSSSSKRHEELEEEYEEGVAVAATSSSAGRRAGNDASTARLIRKPPALVVEAVPALLEEAATLAVGVVDAEREVSATTGNRKRPPADVQVNGVAEQEPRSGGVRAEGEAKLRTKDMPNGVQGEHVAAGWPRWLTEVAAEAVRGWQPRRAESFEKLDKIGQGTYSSVYKARDLENGKIVALKKVRFANMDPESVRFMAREIHILRRLDHPNVIKLEGLVTSRMSSSLYLVFEYMEHDLAGLAATPGLKFSEPQVKCYMQQLLSGLDHCHNRGVLHRDIKGANLLLDNNGILKIADFGLATFFNPNQKQHLTSRVVTLWYRPPELLLGSTNYGAAVDLWSAGCILAELLSGKPIMPGRTEVEQLHKIFKLCGSPSEEFWANLKLSRATIFKPQHPYRRCVNDVYKDFPTTALTLLDYLLAVEPGNRGTAASALDSEFFTTKPYACDPSNLPKYPPSKEYDAKLRDEEARRQRAAAKGQEAEAGRRKQLPAPDGNSGLQHRRVQVNSKNSTYKFTPKEDVSGFPIDPSARAADNGYPQRVPLMQAGRSSSTLGRSSGMDPKAQRFHTSQIVTITTEMSNQSTASGQRGNAPKMSNLGESARRQYLREHRSSSRYSQLTAADPSDRPEWNHQFQERPSSSHRKDDAAVNGTKKNRIHYSGPLMPHGANMDEILREHERQIQQAVRRARLDKGKGKHNGERDQSEALLYTTGNVRADR

SEQ ID NO: 186349 - protein, 473 aa, Zea Mays
MGCVSSRQFHGGDDRGDGKPRRRPSSNSLKRLVSSSSSKRHEELEEEYEEGVAVAATSSSAGRRAGNDASTARLIRKPPALVVEAVPALLEEAATLAVGVVDAEREVSATTGNRKRPPADVQVNGVAEQEPRSGGVRAEGEAKLRTKDMPNGVQGEHVAAGWPRWLTEVAAEAVRGWQPRRAESFEKLDKIGQGTYSSVYKARDLENGKIVALKKVRFANMDPESVRFMAREIHILRRLDHPNVIKLEGLVTSRMSSSLYLVFEYMEHDLAGLAATPGLKFSEPQVKCYMQQLLSGLDHCHNRGVLHRDIKGANLLLDNNGILKIADFGLATFFNPNQKQHLTSRVVTLWYRPPELLLGSTNYGAAVDLWSAGCILAELLSGKPIMPGRTEVEQLHKIFKLCGSPSEEFWANLKLSRATIFKPQHPYRRCVNDVYKDFPTTALTLLDYLLAVEPGNRGTAASALDSEFVVFFL

SEQ ID NO: 186350 - protein, 173 aa, Zea Mays
MEKAIETVQTNFNTVRTGRASPAMLDRIEVEYYGTPVNLKSIAQISTPDATSLLIQPYDKSSLKLIEKTIVAANLGVTPSNDGEVIRVTVPPLTSDRRKELAKTVAKLAEDGKVAIRNIRRDAIKAYDKLQKEKKLSEDNVKDLSADLQKVTDEYMKNIDSIQKQKEQELMKI

SEQ ID NO: 186351 - protein, 52 aa, Zea Mays
MGIGEHFEGVKQHWASNFAFLDYFKKLYEMDKQGANLRFIYWWEDKVSGQKS

SEQ ID NO: 186352 - protein, 154 aa, Zea Mays
MGIGEHFEGVKQHWASNFAFLDYFKKVYGRAEPPPQVGPTPTSTSSSPPTPVYGPQLKALRESRKFALAGALVGAAHLGGVALKYSKAPHGVLLATGFGAITGAVLGSEVADHWYQLYEMDKQGANLRFIYWWEDKARRAEPHRVMPILLSTPA

SEQ ID NO: 186353 - protein, 280 aa, Zea Mays
MTFKSQEEAKVEAYPNLNDNSNANDSSQKRKPSNNKQQPPAKKRKENPPKSTMPSDDQGSNVQSGHSGAVTDVEVGGASREKVMASIEMKVDSDSRTGKSSSNEPKPSFYNDNCTVFVSNIDLKANEDDLRRFFSDIGGATAIRLLRDRFTKKSRGLAYVDFLDNKHLEAAIKKNKQKLLGKKVSIARSDPSKGKKSREAGQTSQDNLPPSGGDDAKATGSSGPDNEVPKGDAKTIGKNTLFAPRALVKPLGWTNKDEKKPDVAGELKSNEEFRNLLLKK

SEQ ID NO: 186354 - protein, 836 aa, Zea Mays
MATEEELPEAAAAPAPAGGGGGDDAEMPDAAVPSGSHSDSSDSDSDDEAATAAAELRIQALEKTLQEQPLDYETHVQYIQCLRKAGNIEKLRVAREEMNKYFPLTPKMWQEWAKDEISLSSSEESFGDIEKIYGHGVQEYLSIKLWRDYLDYVEEHDHSVSQCTPSGLSKMRNLFESAITAGGLHVTEGSKLWAAYREYEMAILITIADANDEEREKQVQRIRMLFHRQLSVPLADMESTLAEYKSWEAEQGNANDPGADFDGVPSNVVSAYKKANDMYNERKQYEDQLSNAGTFEGDKLQQFMKYIKFEEASGDPARVQVLYERAVSELPVSSDIWMGYTSYLDRTLKVPSVVRSVYYRATRNCTWVGELWVHYLLSLERIRASEEELQHVFERAIQCTFSTIQEYFNIYLTRVHGLRRRISDGLDFQLIRQTLTDAAEFLSSQLSTKELLRLYAYWAKLELSLGKDLSAARGVWENAIKKSGSVFEVWEQYILMEIKMDHVHEARSLYKRCYSKRFAGSGSEICYSWIRFEEENGTLDDYDLAVKKVTPRLKELMTFKSQEEAKVEAYPNLNDNSNANDSSQKRKPSNNKQQPPAKKRKENPPKSTMPSDDQGSNVQSGHSGAVTDVEVGGASREKVMASIEMKVDSDSRTGKSSSNEPKPSFYNDNCTVFVSNIDLKANEDDLRRFFSDIGGATAIRLLRDRFTKKSRGLAYVDFLDNKHLEAAIKKNKQKLLGKKVSIARSDPSKGKKSREAGQTSQDNLPPSGGDDAKATGSSGPDNEVPKGDAKTIGKNTLFAPRALVKPLGWTNKDEKKPDVAGELKSNEEFRNLLLKK

SEQ ID NO: 186355 - protein, 200 aa, Zea Mays
MCFCPLQCGISPFVRVFCVMASYVGVTEENLAALFINCGQVVDCRMCGDPNSVLRFAFIEFTDEEGARAALNLSGTVLGYYPVRVLPSKTAIAPVNPTFLPRSDDEREMCARTIYCTNIDKKVTQADLKLFFESICGEVFRLRLLGDYHHSTRIAFVEFVMAESATAALNCSGVILGSLPIRVSPSKTPVRPRAPRQLMH

SEQ ID NO: 186356 - protein, 218 aa, Zea Mays
MRSRERMMFCHERDGSGSTGWGVAYATTHAVGSTRGMGVAAPRVTEENLAALFINCGQVVDCRMCGDPNSVLRFAFIEFTDEEGARAALNLSGTVLGYYPVRVLPSKTAIAPVNPTFLPRSDDEREMCARTIYCTNIDKKVTQADLKLFFESICGEVFRLRLLGDYHHSTRIAFVEFVMAESATAALNCSGVILGSLPIRVSPSKTPVRPRAPRQLMH

SEQ ID NO: 186357 - protein, 291 aa, Zea Mays
MAVVEAAAADHAAPPLQEEAPGAGAGAGADAGEREMRDLEDLLSKLNPMAEEFVPPSLASPAALTPAPLSPAAYGFYPAGAGFAVASPGHGGVVGFPAVADAHAARGRKKGGAGGGFSGHGHPARRRTNSRTSMAQRDEIIRRTVYVSDIDHQVTEENLAALFINCGQVVDCRMCGDPNSVLRFAFIEFTDEEGARAALNLSGTVLGYYPVRVLPSKTAIAPVNPTFLPRSDDEREMCARTIYCTNIDKKVTQADLKLFFESICGEVFRLRLLGDYHHSTRIAFVEFVMVS

SEQ ID NO: 186358 - protein, 2088 aa, Zea Mays
MLKLDENVPKRIHSLIEKLDADVWIQVPCKDIPYSQQPTSPTSVMSKISRCNLIAEDLYFINGMETVIGVVDQLISIGNESKMYKGNASQFLDHRSFCEGNPDPNECTNLTISIKDLMILLGQSKAKGLALERIATANMEFDVSAVLVGEKPERIDFDVVSLTLQSPGGYTLISIVSDGPLSPVFFKFTKHHTGQDEILLSVPLFEIWLYLQDWNTIINHSHSYIKTEVNSMPVEHAAALSQFPEMVSSPLIASEFGSPDDFNLVVTCETISGVLHIPIWGKEENHTSNHMGVTPASFPMEVGTHETDDIQYCEPKGCKFVTLTFDTKHFVVMSGDSCINFRCDLERLKVLLEMIQENKGTSVPFVHISKVKSSGYVRQSERNLEHLSVDLQAEYMDVSFSHQIFNFWHNMELKFPAASSASSFYSVAFKAGLRKGSLLLSDGRWSSHGPVIETLLKNLTVQFSQMKDRTEVSAFVDLLVNYNNIDKVMWEPFVEPSRFQLNMLRKCGDCGLDISPSTDVCLSSSKQLNLNISEPLIEALLRLNQMITDSLDPSNGSGIWEDPGILRLNHDDVRTRRYAPYFLSNDTSLPFRFKVYRGAVNSDDIGSFSVIDENSVPAGYAVPIYVEETPDEFFFQHREARSSDHLIEKRMSALSHYMISIEFDGTSGPSKPMSMDLVGIYFFEVNFSSSKKPILGEESLGAFSSNAKGNDGLIVPVVLDVSLQNYSKRIRVYSTVILYNATSMPLELRFDIPFGLASKVIGPIPPNKEIPLPVHLSEAGQIRWHPVGRTYLWSETRSLSSLLSRENRVGFMKSSVCYPSHPSNDPFRCCVSVEEYNVPSSVSTKKKQLCSERLNTQVSGSSTPNTFKQNLTRTHFIRHVKLNTPLLIKNYLPVYISLAIDNGGSARVISLKEVGSASILFVDPSNDLGITIDIQDYRSLNIKFPRAESFSTTAKLNGFKFSITESITFYSNLSNFPLNVMLEKSMDARSGARELYLSVPFLLYNCTDLLLTVTESSSERSGPTLVIPPSFELDGYARHMLEKGGLSLVNPSVQCFTGKMPQIYLMDGHCSSSDISCTRNSESVKKDLDNSVKAYMFAPDGHTPATELSVKLNASPPNNGTETTRRNWSNPFLLVPASGSTNVTIPQSSTSGAFLVAVASIPVSTELFGRTRAIAFRPRYVICNACSNDLFFRQKGTRFSKHLSSGQHSFLHWSDTARDLLVSIRIDGPGWQWSGSFFPDHLGDAQLKMRNSASGLSYMVRVEVQNADLDLNSNRFSGKNNINTGTVLILLSDDKTGFVPYRIDNFSMEKLRIYQQRCESIETIVYPYTSCQYAWDEPCYPHRLTVEIPGERSLGTFNLDILNDDVHVSLPSTSEKAARQFCISIHAEGAIKVLSVLDSNCHNKETNEKDFLGSKEPKVVDHKLELDMNFAEVIKLHLPFIGISLISSCPQELLFASAKEMTVVAMQSLDQQRFTVQIQSMQIDNQFPDSPHPVMLSFEGSHKGKSMNFFKSKDTKLKSANDILSSTSEPVLQFAAAKWRTKDVSFVSYQYINISLAPLRLELEERLVLSMIEFFRSVSSRINIGHLEKSIELSIGGATDMLREYEKISKNISDKLLVQDSELLPSVVPVGAPWQQIHLLARKQKKVYIELFQLTPVKLTFSFTSTPWLNRNEGGSDPSVGFNNATAIQRGLMALLDVEGVPVYLGEIIVENLMASWQSVQDILMRHYSRQILHELYKVLGSAGVIGNPMGFARNVGFGLKDFISASRKGKLQSPVELLNGIAQGSKTLIGSTVYAVSSATSHFSKTAYKGLVAFTYDEQAASKMEERERQLGLHGEGVLNGFLEGLTGLLQSPIRGAEKHGLPGVISGLAMGTAGLVARPMASILEATGRTAQSIRNRSNPHESNYLRVRFPRPVARDRPLFPYSWEEAIGESLLAQADSGRLKEETFVMCKTLKGAGKFLVLTEKLLLLVSSPYLVDLGSPRFIGVPPDPQWSIDTEMHLKSVVHLDRSQEVVNIVGSNGQTSPRDKRGGTRNRVMSSAFVPLFHLSIELPNEEDAEGTVQVLQALIEKGKARRWDKNILHRSNIS

SEQ ID NO: 186359 - protein, 2761 aa, Zea Mays
MSANRKKLIWDLRIYHFVIRIPSQNCERKELAMVIDAGDVFIQSKDTIDDISRTQESNSFLDHISKSLPSYFSDDLLLGIQLDELYNQFELGLTGFQVKVLLPDRHNVSSTLIKLDASIALRLCVFLDEPVLKQLEVGFIVSSIDAYLSQTMYSTIVNLPRMKETNLFKNSVFDNTKTHVPKKLALNVSVSLKLAKLGLHVDLDGNFEESSGLIVGIEDIDIRYAICELSDLSLAMKTVNVTFRYWKDKSDSHVLCLSGNLTRCPENSVETCLDLHYRTHKHDDQIHHVYRLILCDVDLHVNPSVIGQIRMFLRKLDSGPSIGSDVESTMIGQSSMKSGAANGILPMFFLSNLCGADGTVFAGVSVDHFPFLVADHSCGYNFGCLGTQNVEAQESLYSKNEHCHDTSGLNGYHASDLTSNTYGKTQRSDCSSGSSNDPKNASRTVLDLSLISVRIHFPESCGTLVTITIPESISTLTYFDASSWDLLLSANNLTLASPWTPPNVNELVWGTASHRNASVLNVRVKKDLPALSTEVCVGIQNVCCVLPSKLLAMFVGFFLLDDWNRIAEQEFLVADNNLEGLRESHDCVTYKFDISDCVVFFPVEEQGLSCLKLEVPHFFCEFIANGSSVEFAKRIPKEFFSSECIVSRRVDVICIYARNASISLLIVSDQTDFMLKLDENVPKRIHSLIEKLDADVWIQVPCKDIPYSQQPTSPTSVMSKISRCNLIAEDLYFINGMETVIGVVDQLISIGNESKMYKGNASQFLDHRSFCEGNPDPNECTNLTISIKDLMILLGQSKAKGLALERIATANMEFDVSAVLVGEKPERIDFDVVSLTLQSPGGYTLISIVSDGPLSPVFFKFTKHHTGQDEILLSVPLFEIWLYLQDWNTIINHSHSYIKTEVNSMPVEHAAALSQFPEMVSSPLIASEFGSPDDFNLVVTCETISGVLHIPIWGKEENHTSNHMGVTPASFPMEVGTHETDDIQYCEPKGCKFVTLTFDTKHFVVMSGDSCINFRCDLERLKVLLEMIQENKGTSVPFVHISKVKSSGYVRQSERNLEHLSVDLQAEYMDVSFSHQIFNFWHNMELKFPAASSASSFYSVAFKAGLRKGSLLLSDGRWSSHGPVIETLLKNLTVQFSQMKDRTEVSAFVDLLVNYNNIDKVMWEPFVEPSRFQLNMLRKCGDCGLDISPSTDVCLSSSKQLNLNISEPLIEALLRLNQMITDSLDPSNGSGIWEDPGILRLNHDDVRTRRYAPYFLSNDTSLPFRFKVYRGAVNSDDIGSFSVIDENSVPAGYAVPIYVEETPDEFFFQHREARSSDHLIEKRMSALSHYMISIEFDGTSGPSKPMSMDLVGIYFFEVNFSSSKKPILGEESLGAFSSNAKGNDGLIVPVVLDVSLQNYSKRIRVYSTVILYNATSMPLELRFDIPFGLASKVIGPIPPNKEIPLPVHLSEAGQIRWHPVGRTYLWSETRSLSSLLSRENRVGFMKSSVCYPSHPSNDPFRCCVSVEEYNVPSSVSTKKKQLCSERLNTQVSGSSTPNTFKQNLTRTHFIRHVKLNTPLLIKNYLPVYISLAIDNGGSARVISLKEVGSASILFVDPSNDLGITIDIQDYRSLNIKFPRAESFSTTAKLNGFKFSITESITFYSNLSNFPLNVMLEKSMDARSGARELYLSVPFLLYNCTDLLLTVTESSSERSGPTLVIPPSFELDGYARHMLEKGGLSLVNPSVQCFTGKMPQIYLMDGHCSSSDISCTRNSESVKKDLDNSVKAYMFAPDGHTPATELSVKLNASPPNNGTETTRRNWSNPFLLVPASGSTNVTIPQSSTSGAFLVAVASIPVSTELFGRTRAIAFRPRYVICNACSNDLFFRQKGTRFSKHLSSGQHSFLHWSDTARDLLVSIRIDGPGWQWSGSFFPDHLGDAQLKMRNSASGLSYMVRVEVQNADLDLNSNRFSGKNNINTGTVLILLSDDKTGFVPYRIDNFSMEKLRIYQQRCESIETIVYPYTSCQYAWDEPCYPHRLTVEIPGERSLGTFNLDILNDDVHVSLPSTSEKAARQFCISIHAEGAIKVLSVLDSNCHNKETNEKDFLGSKEPKVVDHKLELDMNFAEVIKLHLPFIGISLISSCPQELLFASAKEMTVVAMQSLDQQRFTVQIQSMQIDNQFPDSPHPVMLSFEGSHKGKSMNFFKSKDTKLKSANDILSSTSEPVLQFAAAKWRTKDVSFVSYQYINISLAPLRLELEERLVLSMIEFFRSVSSRINIGHLEKSIELSIGGATDMLREYEKISKNISDKLLVQDSELLPSVVPVGAPWQQIHLLARKQKKVYIELFQLTPVKLTFSFTSTPWLNRNEGGSDPSVGFNNATAIQRGLMALLDVEGVPVYLGEIIVENLMASWQSVQDILMRHYSRQILHELYKVLGSAGVIGNPMGFARNVGFGLKDFISASRKGKLQSPVELLNGIAQGSKTLIGSTVYAVSSATSHFSKTAYKGLVAFTYDEQAASKMEERERQLGLHGEGVLNGFLEGLTGLLQSPIRGAEKHGLPGVISGLAMGTAGLVARPMASILEATGRTAQSIRNRSNPHESNYLRVRFPRPVARDRPLFPYSWEEAIGESLLAQADSGRLKEETFVMCKTLKGAGKFLVLTEKLLLLVSSPYLVDLGSPRFIGVPPDPQWSIDTEMHLKSVVHLDRSQEVVNIVGSNGQTSPRDKRGGTRNRVMSSAFVPLFHLSIELPNEEDAEGTVQVLQALIEKGKARRWDKNILHRSNIS

SEQ ID NO: 186360 - protein, 3216 aa, Zea Mays
MAYTASSLMTRSRQDEVNKIIEISNVGIYCHQLEEEQDLCHVGALENDHSRDYLVNPFCVTVSVLANKAAKLDGTPQYNMTAELTALALSVDEIQLQQILNLCDYFTICALRTKYGRYRPSQSSLSKRCKGWYRMWWQYAQNSVLADVRRRLKKTSWRYLKQRLNHQLRYVKLYRMKLELLQKGQIVSEDILQELENMDRECDIDDILNYRTIAEQQLQESLVKSSIDTHSPGSPRSDEQLAGASQGWLNWLSLGMLGVGGTADSSSFAGVISEDIIKDIYEGTEFRPVSSAENCLKKENYYSLFVRLSISQIVTTVTSRRFGTKLVDTMFSGLGMECKIWDDAATILAWLDSLRVINPLNKTKILWAEKCSTGDGLGAPVVSIQVDFPKSNERSEASTRVVVQEFNAIYEPEFFVNVLYIYNVFSAFQFQHDRVLSSLNRFNNLGTRLVSKLKYMSANRKKLIWDLRIYHFVIRIPSQNCERKELAMVIDAGDVFIQSKDTIDDISRTQESNSFLDHISKSLPSYFSDDLLLGIQLDELYNQFELGLTGFQVKVLLPDRHNVSSTLIKLDASIALRLCVFLDEPVLKQLEVGFIVSSIDAYLSQTMYSTIVNLPRMKETNLFKNSVFDNTKTHVPKKLALNVSVSLKLAKLGLHVDLDGNFEESSGLIVGIEDIDIRYAICELSDLSLAMKTVNVTFRYWKDKSDSHVLCLSGNLTRCPENSVETCLDLHYRTHKHDDQIHHVYRLILCDVDLHVNPSVIGQIRMFLRKLDSGPSIGSDVESTMIGQSSMKSGAANGILPMFFLSNLCGADGTVFAGVSVDHFPFLVADHSCGYNFGCLGTQNVEAQESLYSKNEHCHDTSGLNGYHASDLTSNTYGKTQRSDCSSGSSNDPKNASRTVLDLSLISVRIHFPESCGTLVTITIPESISTLTYFDASSWDLLLSANNLTLASPWTPPNVNELVWGTASHRNASVLNVRVKKDLPALSTEVCVGIQNVCCVLPSKLLAMFVGFFLLDDWNRIAEQEFLVADNNLEGLRESHDCVTYKFDISDCVVFFPVEEQGLSCLKLEVPHFFCEFIANGSSVEFAKRIPKEFFSSECIVSRRVDVICIYARNASISLLIVSDQTDFMLKLDENVPKRIHSLIEKLDADVWIQVPCKDIPYSQQPTSPTSVMSKISRCNLIAEDLYFINGMETVIGVVDQLISIGNESKMYKGNASQFLDHRSFCEGNPDPNECTNLTISIKDLMILLGQSKAKGLALERIATANMEFDVSAVLVGEKPERIDFDVVSLTLQSPGGYTLISIVSDGPLSPVFFKFTKHHTGQDEILLSVPLFEIWLYLQDWNTIINHSHSYIKTEVNSMPVEHAAALSQFPEMVSSPLIASEFGSPDDFNLVVTCETISGVLHIPIWGKEENHTSNHMGVTPASFPMEVGTHETDDIQYCEPKGCKFVTLTFDTKHFVVMSGDSCINFRCDLERLKVLLEMIQENKGTSVPFVHISKVKSSGYVRQSERNLEHLSVDLQAEYMDVSFSHQIFNFWHNMELKFPAASSASSFYSVAFKAGLRKGSLLLSDGRWSSHGPVIETLLKNLTVQFSQMKDRTEVSAFVDLLVNYNNIDKVMWEPFVEPSRFQLNMLRKCGDCGLDISPSTDVCLSSSKQLNLNISEPLIEALLRLNQMITDSLDPSNGSGIWEDPGILRLNHDDVRTRRYAPYFLSNDTSLPFRFKVYRGAVNSDDIGSFSVIDENSVPAGYAVPIYVEETPDEFFFQHREARSSDHLIEKRMSALSHYMISIEFDGTSGPSKPMSMDLVGIYFFEVNFSSSKKPILGEESLGAFSSNAKGNDGLIVPVVLDVSLQNYSKRIRVYSTVILYNATSMPLELRFDIPFGLASKVIGPIPPNKEIPLPVHLSEAGQIRWHPVGRTYLWSETRSLSSLLSRENRVGFMKSSVCYPSHPSNDPFRCCVSVEEYNVPSSVSTKKKQLCSERLNTQVSGSSTPNTFKQNLTRTHFIRHVKLNTPLLIKNYLPVYISLAIDNGGSARVISLKEVGSASILFVDPSNDLGITIDIQDYRSLNIKFPRAESFSTTAKLNGFKFSITESITFYSNLSNFPLNVMLEKSMDARSGARELYLSVPFLLYNCTDLLLTVTESSSERSGPTLVIPPSFELDGYARHMLEKGGLSLVNPSVQCFTGKMPQIYLMDGHCSSSDISCTRNSESVKKDLDNSVKAYMFAPDGHTPATELSVKLNASPPNNGTETTRRNWSNPFLLVPASGSTNVTIPQSSTSGAFLVAVASIPVSTELFGRTRAIAFRPRYVICNACSNDLFFRQKGTRFSKHLSSGQHSFLHWSDTARDLLVSIRIDGPGWQWSGSFFPDHLGDAQLKMRNSASGLSYMVRVEVQNADLDLNSNRFSGKNNINTGTVLILLSDDKTGFVPYRIDNFSMEKLRIYQQRCESIETIVYPYTSCQYAWDEPCYPHRLTVEIPGERSLGTFNLDILNDDVHVSLPSTSEKAARQFCISIHAEGAIKVLSVLDSNCHNKETNEKDFLGSKEPKVVDHKLELDMNFAEVIKLHLPFIGISLISSCPQELLFASAKEMTVVAMQSLDQQRFTVQIQSMQIDNQFPDSPHPVMLSFEGSHKGKSMNFFKSKDTKLKSANDILSSTSEPVLQFAAAKWRTKDVSFVSYQYINISLAPLRLELEERLVLSMIEFFRSVSSRINIGHLEKSIELSIGGATDMLREYEKISKNISDKLLVQDSELLPSVVPVGAPWQQIHLLARKQKKVYIELFQLTPVKLTFSFTSTPWLNRNEGGSDPSVGFNNATAIQRGLMALLDVEGVPVYLGEIIVENLMASWQSVQDILMRHYSRQILHELYKVLGSAGVIGNPMGFARNVGFGLKDFISASRKGKLQSPVELLNGIAQGSKTLIGSTVYAVSSATSHFSKTAYKGLVAFTYDEQAASKMEERERQLGLHGEGVLNGFLEGLTGLLQSPIRGAEKHGLPGVISGLAMGTAGLVARPMASILEATGRTAQSIRNRSNPHESNYLRVRFPRPVARDRPLFPYSWEEAIGESLLAQADSGRLKEETFVMCKTLKGAGKFLVLTEKLLLLVSSPYLVDLGSPRFIGVPPDPQWSIDTEMHLKSVVHLDRSQEVVNIVGSNGQTSPRDKRGGTRNRVMSSAFVPLFHLSIELPNEEDAEGTVQVLQALIEKGKARRWDKNILHRSNIS

SEQ ID NO: 186361 - protein, 3411 aa, Zea Mays
MFEGVVSQVLYGLLRRYVKGIQKEQLKIGIWKEEILLENVELILEAFDYLQLPFALKNGRIGKLSIRIPWKKLGWDPIIIVIEDVYVCACPREDSEWSSDSLDKRELAGKLAKLNAIELAKFSRRVTDNQTGQSFLSYISAKILDSIQVSMRNVHIVYMDTHNGQGNFVFGLEFTSLSIQTDTQKQSFTISLMTRSRQDEVNKIIEISNVGIYCHQLEEEQDLCHVGALENDHSRDYLVNPFCVTVSVLANKAAKLDGTPQYNMTAELTALALSVDEIQLQQILNLCDYFTICALRTKYGRYRPSQSSLSKRCKGWYRMWWQYAQNSVLADVRRRLKKTSWRYLKQRLNHQLRYVKLYRMKLELLQKGQIVSEDILQELENMDRECDIDDILNYRTIAEQQLQVVDGSVRRTLRESLVKSSIDTHSPGSPRSDEQLAGASQGWLNWLSLGMLGVGGTADSSSFAGVISEDIIKDIYEGTEFRPVSSAENCLKKENYYSLFVRLSISQIVTTVTSRRFGTKLVDTMFSGLGMECKIWDDAATILAWLDSLRVINPLNKTKILWAEKCSTGDGLGAPVVSIQVDFPKSNERSEASTRVVVQEFNAIYEPEFFVNVLYIYNVFSAFQFQHDRVLSSLNRFNNLGTRLVSKLKYMSANRKKLIWDLRIYHFVIRIPSQNCERKELAMVIDAGDVFIQSKDTIDDISRTQESNSFLDHISKSLPSYFSDDLLLGIQLDELYNQFELGLTGFQVKVLLPDRHNVSSTLIKLDASIALRLCVFLDEPVLKQLEVGFIVSSIDAYLSQTMYSTIVNLPRMKETNLFKNSVFDNTKTHVPKKLALNVSVSLKLAKLGLHVDLDGNFEESSGLIVGIEDIDIRYAICELSDLSLAMKTVNVTFRYWKDKSDSHVLCLSGNLTRCPENSVETCLDLHYRTHKHDDQIHHVYRLILCDVDLHVNPSVIGQIRMFLRKLDSGPSIGSDVESTMIGQSSMKSGAANGILPMFFLSNLCGADGTVFAGVSVDHFPFLVADHSCGYNFGCLGTQNVEAQESLYSKNEHCHDTSGLNGYHASDLTSNTYGKTQRSDCSSGSSNDPKNASRTVLDLSLISVRIHFPESCGTLVTITIPESISTLTYFDASSWDLLLSANNLTLASPWTPPNVNELVWGTASHRNASVLNVRVKKDLPALSTEVCVGIQNVCCVLPSKLLAMFVGFFLLDDWNRIAEQEFLVADNNLEGLRESHDCVTYKFDISDCVVFFPVEEQGLSCLKLEVPHFFCEFIANGSSVEFAKRIPKEFFSSECIVSRRVDVICIYARNASISLLIVSDQTDFMLKLDENVPKRIHSLIEKLDADVWIQVPCKDIPYSQQPTSPTSVMSKISRCNLIAEDLYFINGMETVIGVVDQLISIGNESKMYKGNASQFLDHRSFCEGNPDPNECTNLTISIKDLMILLGQSKAKGLALERIATANMEFDVSAVLVGEKPERIDFDVVSLTLQSPGGYTLISIVSDGPLSPVFFKFTKHHTGQDEILLSVPLFEIWLYLQDWNTIINHSHSYIKTEVNSMPVEHAAALSQFPEMVSSPLIASEFGSPDDFNLVVTCETISGVLHIPIWGKEENHTSNHMGVTPASFPMEVGTHETDDIQYCEPKGCKFVTLTFDTKHFVVMSGDSCINFRCDLERLKVLLEMIQENKGTSVPFVHISKVKSSGYVRQSERNLEHLSVDLQAEYMDVSFSHQIFNFWHNMELKFPAASSASSFYSVAFKAGLRKGSLLLSDGRWSSHGPVIETLLKNLTVQFSQMKDRTEVSAFVDLLVNYNNIDKVMWEPFVEPSRFQLNMLRKCGDCGLDISPSTDVCLSSSKQLNLNISEPLIEALLRLNQMITDSLDPSNGSGIWEDPGILRLNHDDVRTRRYAPYFLSNDTSLPFRFKVYRGAVNSDDIGSFSVIDENSVPAGYAVPIYVEETPDEFFFQHREARSSDHLIEKRMSALSHYMISIEFDGTSGPSKPMSMDLVGIYFFEVNFSSSKKPILGEESLGAFSSNAKGNDGLIVPVVLDVSLQNYSKRIRVYSTVILYNATSMPLELRFDIPFGLASKVIGPIPPNKEIPLPVHLSEAGQIRWHPVGRTYLWSETRSLSSLLSRENRVGFMKSSVCYPSHPSNDPFRCCVSVEEYNVPSSVSTKKKQLCSERLNTQVSGSSTPNTFKQNLTRTHFIRHVKLNTPLLIKNYLPVYISLAIDNGGSARVISLKEVGSASILFVDPSNDLGITIDIQDYRSLNIKFPRAESFSTTAKLNGFKFSITESITFYSNLSNFPLNVMLEKSMDARSGARELYLSVPFLLYNCTDLLLTVTESSSERSGPTLVIPPSFELDGYARHMLEKGGLSLVNPSVQCFTGKMPQIYLMDGHCSSSDISCTRNSESVKKDLDNSVKAYMFAPDGHTPATELSVKLNASPPNNGTETTRRNWSNPFLLVPASGSTNVTIPQSSTSGAFLVAVASIPVSTELFGRTRAIAFRPRYVICNACSNDLFFRQKGTRFSKHLSSGQHSFLHWSDTARDLLVSIRIDGPGWQWSGSFFPDHLGDAQLKMRNSASGLSYMVRVEVQNADLDLNSNRFSGKNNINTGTVLILLSDDKTGFVPYRIDNFSMEKLRIYQQRCESIETIVYPYTSCQYAWDEPCYPHRLTVEIPGERSLGTFNLDILNDDVHVSLPSTSEKAARQFCISIHAEGAIKVLSVLDSNCHNKETNEKDFLGSKEPKVVDHKLELDMNFAEVIKLHLPFIGISLISSCPQELLFASAKEMTVVAMQSLDQQRFTVQIQSMQIDNQFPDSPHPVMLSFEGSHKGKSMNFFKSKDTKLKSANDILSSTSEPVLQFAAAKWRTKDVSFVSYQYINISLAPLRLELEERLVLSMIEFFRSVSSRINIGHLEKSIELSIGGATDMLREYEKISKNISDKLLVQDSELLPSVVPVGAPWQQIHLLARKQKKVYIELFQLTPVKLTFSFTSTPWLNRNEGGSDPSVGFNNATAIQRGLMALLDVEGVPVYLGEIIVENLMASWQSVQDILMRHYSRQILHELYKVLGSAGVIGNPMGFARNVGFGLKDFISASRKGKLQSPVELLNGIAQGSKTLIGSTVYAVSSATSHFSKTAYKGLVAFTYDEQAASKMEERERQLGLHGEGVLNGFLEGLTGLLQSPIRGAEKHGLPGVISGLAMGTAGLVARPMASILEATGRTAQSIRNRSNPHESNYLRVRFPRPVARDRPLFPYSWEEAIGESLLAQADSGRLKEETFVMCKTLKGAGKFLVLTEKLLLLVSSPYLVDLGSPRFIGVPPDPQWSIDTEMHLKSVVHLDRSQEVVNIVGSNGQTSPRDKRGGTRNRVMSSAFVPLFHLSIELPNEEDAEGTVQVLQALIEKGKARRWDKNILHRSNIS

SEQ ID NO: 186362 - protein, 3427 aa, Zea Mays
MFEGVVSQVLYGLLRRYVKGIQKEQLKIGIWKEEILLENVELILEAFDYLQLPFALKNGRIGKLSIRIPWKKLGWDPIIIVIEDVYVCACPREDSEWSSDSLDKRELAGKLAKLNAIELAKFSRRVTDNQTGQSFLSYISAKILDSIQVSMRNVHIVYMDTHNGQGNFVFGLEFTSLSIQTDTQKQSFTISLMTRSRQDEVNKIIEISNVGIYCHQLEEEQDLCHVGALENDHSRDYLVNPFCVTVSVLANKAAKLDGTPQYNMTAELTALALSVDEIQLQQILNLCDYFTICALRTKYGRYRPSQSSLSKRCKGWYRMWWQYAQNSVLADVRRRLKKTSWRYLKQRLNHQLRYVKLYRMKLELLQKGQIVSEDILQELENMDRECDIDDILNYRTIAEQQLQESLVKSSIDTHSPGSPRSDEQLAGASQGWLNWLSLGMLGVGGTADSSSFAGVISEDIIKDIYEGTEFRPVSSAENCLKKENYYSLFVRLSISQIVTTVTSRRFGTKLVDTMFSGLGMECKIWDDAATILAWLDSLRVINPLNKTKILWAEKCSTGDGLGAPVVSIQVDFPKSNERSEASTRVVVQEFNAIYEPEFFVNVLYIYNVFSAFQFQHDRRQPVGRWSSGGCGMRGGDMRQLWLGGEVLSSLNRFNNLGTRLVSKLKYMSANRKKLIWDLRIYHFVIRIPSQNCERKELAMVIDAGDVFIQSKDTIDDISRTQESNSFLDHISKSLPSYFSDDLLLGIQLDELYNQFELGLTGFQVKVLLPDRHNVSSTLIKLDASIALRLCVFLDEPVLKQLEVGFIVSSIDAYLSQTMYSTIVNLPRMKETNLFKNSVFDNTKTHVPKKLALNVSVSLKLAKLGLHVDLDGNFEESSGLIVGIEDIDIRYAICELSDLSLAMKTVNVTFRYWKDKSDSHVLCLSGNLTRCPENSVETCLDLHYRTHKHDDQIHHVYRLILCDVDLHVNPSVIGQIRMFLRKLDSGPSIGSDVESTMIGQSSMKSGAANGILPMFFLSNLCGADGTVFAGVSVDHFPFLVADHSCGYNFGCLGTQNVEAQESLYSKNEHCHDTSGLNGYHASDLTSNTYGKTQRSDCSSGSSNDPKNASRTVLDLSLISVRIHFPESCGTLVTITIPESISTLTYFDASSWDLLLSANNLTLASPWTPPNVNELVWGTASHRNASVLNVRVKKDLPALSTEVCVGIQNVCCVLPSKLLAMFVGFFLLDDWNRIAEQEFLVADNNLEGLRESHDCVTYKFDISDCVVFFPVEEQGLSCLKLEVPHFFCEFIANGSSVEFAKRIPKEFFSSECIVSRRVDVICIYARNASISLLIVSDQTDFMLKLDENVPKRIHSLIEKLDADVWIQVPCKDIPYSQQPTSPTSVMSKISRCNLIAEDLYFINGMETVIGVVDQLISIGNESKMYKGNASQFLDHRSFCEGNPDPNECTNLTISIKDLMILLGQSKAKGLALERIATANMEFDVSAVLVGEKPERIDFDVVSLTLQSPGGYTLISIVSDGPLSPVFFKFTKHHTGQDEILLSVPLFEIWLYLQDWNTIINHSHSYIKTEVNSMPVEHAAALSQFPEMVSSPLIASEFGSPDDFNLVVTCETISGVLHIPIWGKEENHTSNHMGVTPASFPMEVGTHETDDIQYCEPKGCKFVTLTFDTKHFVVMSGDSCINFRCDLERLKVLLEMIQENKGTSVPFVHISKVKSSGYVRQSERNLEHLSVDLQAEYMDVSFSHQIFNFWHNMELKFPAASSASSFYSVAFKAGLRKGSLLLSDGRWSSHGPVIETLLKNLTVQFSQMKDRTEVSAFVDLLVNYNNIDKVMWEPFVEPSRFQLNMLRKCGDCGLDISPSTDVCLSSSKQLNLNISEPLIEALLRLNQMITDSLDPSNGSGIWEDPGILRLNHDDVRTRRYAPYFLSNDTSLPFRFKVYRGAVNSDDIGSFSVIDENSVPAGYAVPIYVEETPDEFFFQHREARSSDHLIEKRMSALSHYMISIEFDGTSGPSKPMSMDLVGIYFFEVNFSSSKKPILGEESLGAFSSNAKGNDGLIVPVVLDVSLQNYSKRIRVYSTVILYNATSMPLELRFDIPFGLASKVIGPIPPNKEIPLPVHLSEAGQIRWHPVGRTYLWSETRSLSSLLSRENRVGFMKSSVCYPSHPSNDPFRCCVSVEEYNVPSSVSTKKKQLCSERLNTQVSGSSTPNTFKQNLTRTHFIRHVKLNTPLLIKNYLPVYISLAIDNGGSARVISLKEVGSASILFVDPSNDLGITIDIQDYRSLNIKFPRAESFSTTAKLNGFKFSITESITFYSNLSNFPLNVMLEKSMDARSGARELYLSVPFLLYNCTDLLLTVTESSSERSGPTLVIPPSFELDGYARHMLEKGGLSLVNPSVQCFTGKMPQIYLMDGHCSSSDISCTRNSESVKKDLDNSVKAYMFAPDGHTPATELSVKLNASPPNNGTETTRRNWSNPFLLVPASGSTNVTIPQSSTSGAFLVAVASIPVSTELFGRTRAIAFRPRYVICNACSNDLFFRQKGTRFSKHLSSGQHSFLHWSDTARDLLVSIRIDGPGWQWSGSFFPDHLGDAQLKMRNSASGLSYMVRVEVQNADLDLNSNRFSGKNNINTGTVLILLSDDKTGFVPYRIDNFSMEKLRIYQQRCESIETIVYPYTSCQYAWDEPCYPHRLTVEIPGERSLGTFNLDILNDDVHVSLPSTSEKAARQFCISIHAEGAIKVLSVLDSNCHNKETNEKDFLGSKEPKVVDHKLELDMNFAEVIKLHLPFIGISLISSCPQELLFASAKEMTVVAMQSLDQQRFTVQIQSMQIDNQFPDSPHPVMLSFEGSHKGKSMNFFKSKDTKLKSANDILSSTSEPVLQFAAAKWRTKDVSFVSYQYINISLAPLRLELEERLVLSMIEFFRSVSSRINIGHLEKSIELSIGGATDMLREYEKISKNISDKLLVQDSELLPSVVPVGAPWQQIHLLARKQKKVYIELFQLTPVKLTFSFTSTPWLNRNEGGSDPSVGFNNATAIQRGLMALLDVEGVPVYLGEIIVENLMASWQSVQDILMRHYSRQILHELYKVLGSAGVIGNPMGFARNVGFGLKDFISASRKGKLQSPVELLNGIAQGSKTLIGSTVYAVSSATSHFSKTAYKGLVAFTYDEQAASKMEERERQLGLHGEGVLNGFLEGLTGLLQSPIRGAEKHGLPGVISGLAMGTAGLVARPMASILEATGRTAQSIRNRSNPHESNYLRVRFPRPVARDRPLFPYSWEEAIGESLLAQADSGRLKEETFVMCKTLKGAGKFLVLTEKLLLLVSSPYLVDLGSPRFIGVPPDPQWSIDTEMHLKSVVHLDRSQEVVNIVGSNGQTSPRDKRGGTRNRVMSSAFVPLFHLSIELPNEEDAEGTVQVLQALIEKGKARRWDKNILHRSNIS

SEQ ID NO: 186363 - protein, 3388 aa, Zea Mays
MFEGVVSQVLYGLLRRYVKGIQKEQLKIGIWKEEILLENVELILEAFDYLQLPFALKNGRIGKLSIRIPWKKLGWDPIIIVIEDWSSDSLDKRELAGKLAKLNAIELAKFSRRVTDNQTGQSFLSYISAKILDSIQVSMRNVHIVYMDTHNGQGNFVFGLEFTSLSIQTDTQKQSFTISLMTRSRQDEVNKIIEISNVGIYCHQLEEEQDLCHVGALENDHSRDYLVNPFCVTVSVLANKAAKLDGTPQYNMTAELTALALSVDEIQLQQILNLCDYFTICALRTKYGRYRPSQSSLSKRCKGWYRMWWQYAQNSVLADVRRRLKKTSWRYLKQRLNHQLRYVKLYRMKLELLQKGQIVSEDILQELENMDRECDIDDILNYRTIAEQQLQESLVKSSIDTHSPGSPRSDEQLAGASQGWLNWLSLGMLGVGGTADSSSFAGVISEDIIKDIYEGTEFRPVSSAENCLKKENYYSLFVRLSISQIVTTVTSRRFGTKLVDTMFSGLGMECKIWDDAATILAWLDSLRVINPLNKTKILWAEKCSTGDGLGAPVVSIQVDFPKSNERSEASTRVVVQEFNAIYEPEFFVNVLYIYNVFSAFQFQHDRVLSSLNRFNNLGTRLVSKLKYMSANRKKLIWDLRIYHFVIRIPSQNCERKELAMVIDAGDVFIQSKDTIDDISRTQESNSFLDHISKSLPSYFSDDLLLGIQLDELYNQFELGLTGFQVKVLLPDRHNVSSTLIKLDASIALRLCVFLDEPVLKQLEVGFIVSSIDAYLSQTMYSTIVNLPRMKETNLFKNSVFDNTKTHVPKKLALNVSVSLKLAKLGLHVDLDGNFEESSGLIVGIEDIDIRYAICELSDLSLAMKTVNVTFRYWKDKSDSHVLCLSGNLTRCPENSVETCLDLHYRTHKHDDQIHHVYRLILCDVDLHVNPSVIGQIRMFLRKLDSGPSIGSDVESTMIGQSSMKSGAANGILPMFFLSNLCGADGTVFAGVSVDHFPFLVADHSCGYNFGCLGTQNVEAQESLYSKNEHCHDTSGLNGYHASDLTSNTYGKTQRSDCSSGSSNDPKNASRTVLDLSLISVRIHFPESCGTLVTITIPESISTLTYFDASSWDLLLSANNLTLASPWTPPNVNELVWGTASHRNASVLNVRVKKDLPALSTEVCVGIQNVCCVLPSKLLAMFVGFFLLDDWNRIAEQEFLVADNNLEGLRESHDCVTYKFDISDCVVFFPVEEQGLSCLKLEVPHFFCEFIANGSSVEFAKRIPKEFFSSECIVSRRVDVICIYARNASISLLIVSDQTDFMLKLDENVPKRIHSLIEKLDADVWIQVPCKDIPYSQQPTSPTSVMSKISRCNLIAEDLYFINGMETVIGVVDQLISIGNESKMYKGNASQFLDHRSFCEGNPDPNECTNLTISIKDLMILLGQSKAKGLALERIATANMEFDVSAVLVGEKPERIDFDVVSLTLQSPGGYTLISIVSDGPLSPVFFKFTKHHTGQDEILLSVPLFEIWLYLQDWNTIINHSHSYIKTEVNSMPVEHAAALSQFPEMVSSPLIASEFGSPDDFNLVVTCETISGVLHIPIWGKEENHTSNHMGVTPASFPMEVGTHETDDIQYCEPKGCKFVTLTFDTKHFVVMSGDSCINFRCDLERLKVLLEMIQENKGTSVPFVHISKVKSSGYVRQSERNLEHLSVDLQAEYMDVSFSHQIFNFWHNMELKFPAASSASSFYSVAFKAGLRKGSLLLSDGRWSSHGPVIETLLKNLTVQFSQMKDRTEVSAFVDLLVNYNNIDKVMWEPFVEPSRFQLNMLRKCGDCGLDISPSTDVCLSSSKQLNLNISEPLIEALLRLNQMITDSLDPSNGSGIWEDPGILRLNHDDVRTRRYAPYFLSNDTSLPFRFKVYRGAVNSDDIGSFSVIDENSVPAGYAVPIYVEETPDEFFFQHREARSSDHLIEKRMSALSHYMISIEFDGTSGPSKPMSMDLVGIYFFEVNFSSSKKPILGEESLGAFSSNAKGNDGLIVPVVLDVSLQNYSKRIRVYSTVILYNATSMPLELRFDIPFGLASKVIGPIPPNKEIPLPVHLSEAGQIRWHPVGRTYLWSETRSLSSLLSRENRVGFMKSSVCYPSHPSNDPFRCCVSVEEYNVPSSVSTKKKQLCSERLNTQVSGSSTPNTFKQNLTRTHFIRHVKLNTPLLIKNYLPVYISLAIDNGGSARVISLKEVGSASILFVDPSNDLGITIDIQDYRSLNIKFPRAESFSTTAKLNGFKFSITESITFYSNLSNFPLNVMLEKSMDARSGARELYLSVPFLLYNCTDLLLTVTESSSERSGPTLVIPPSFELDGYARHMLEKGGLSLVNPSVQCFTGKMPQIYLMDGHCSSSDISCTRNSESVKKDLDNSVKAYMFAPDGHTPATELSVKLNASPPNNGTETTRRNWSNPFLLVPASGSTNVTIPQSSTSGAFLVAVASIPVSTELFGRTRAIAFRPRYVICNACSNDLFFRQKGTRFSKHLSSGQHSFLHWSDTARDLLVSIRIDGPGWQWSGSFFPDHLGDAQLKMRNSASGLSYMVRVEVQNADLDLNSNRFSGKNNINTGTVLILLSDDKTGFVPYRIDNFSMEKLRIYQQRCESIETIVYPYTSCQYAWDEPCYPHRLTVEIPGERSLGTFNLDILNDDVHVSLPSTSEKAARQFCISIHAEGAIKVLSVLDSNCHNKETNEKDFLGSKEPKVVDHKLELDMNFAEVIKLHLPFIGISLISSCPQELLFASAKEMTVVAMQSLDQQRFTVQIQSMQIDNQFPDSPHPVMLSFEGSHKGKSMNFFKSKDTKLKSANDILSSTSEPVLQFAAAKWRTKDVSFVSYQYINISLAPLRLELEERLVLSMIEFFRSVSSRINIGHLEKSIELSIGGATDMLREYEKISKNISDKLLVQDSELLPSVVPVGAPWQQIHLLARKQKKVYIELFQLTPVKLTFSFTSTPWLNRNEGGSDPSVGFNNATAIQRGLMALLDVEGVPVYLGEIIVENLMASWQSVQDILMRHYSRQILHELYKVLGSAGVIGNPMGFARNVGFGLKDFISASRKGKLQSPVELLNGIAQGSKTLIGSTVYAVSSATSHFSKTAYKGLVAFTYDEQAASKMEERERQLGLHGEGVLNGFLEGLTGLLQSPIRGAEKHGLPGVISGLAMGTAGLVARPMASILEATGRTAQSIRNRSNPHESNYLRVRFPRPVARDRPLFPYSWEEAIGESLLAQADSGRLKEETFVMCKTLKGAGKFLVLTEKLLLLVSSPYLVDLGSPRFIGVPPDPQWSIDTEMHLKSVVHLDRSQEVVNIVGSNGQTSPRDKRGGTRNRVMSSAFVPLFHLSIELPNEEDAEGTVQVLQALIEKGKARRWDKNILHRSNIS

SEQ ID NO: 186364 - protein, 184 aa, Zea Mays
MVLLDEEGNNIHATTYPPFIEKFRPLIKEGSVYNMTYFRVRASNSLYKPVLNDIMITFTNWAKLEQDIEIPPAFPTLTYSLTHIEQIHSRINHKDYYTVTSVSNVSPHRSKGQQASSLKRNISICSARGASVNVVLWGAQATLFPGERIYEDGQNSPQIMLFVGTLVKKYADGLCLTGSSPCKV

SEQ ID NO: 186365 - protein, 451 aa, Zea Mays
MQVVQIAEKSYLSAPHHAELIERRWGGSTHITVEEVKRRIADLLKEYIRNGDTAEACRCIRELAVPFFHHEVVKRALTLGMESPAAEALIVKLLKEASEECLVSSSQMMKGFHRVAESLDDLILDIPSAKSEFQLLVSKAISEGWLDSSYVNSGVNGSVEDDEHEKLARYKREAVSIIHEYFFSDDTTEVIRSVKELGYPEYNPIFVKKLITIAMDRKNREKEMASVLLPSLSMELFSSEDIAKGFVMLLESAEDTALDILDASDELGLFLARAVIDDVLAPLNLDEISSKLPPNCSGAETLNMARSLASARHAGERLLRCWGGGTGWAVEDAKDKITKLLEEYESGGDVGEACNCIRELGMSFFNHEVVKKALVMAMEKKNERTLNLLQECFGEGIITINQMTKGFSRVRDGLDDLALDIPDAREKFLSYVQRAKKSGWLLPGFGVASSA

SEQ ID NO: 186366 - protein, 78 aa, Zea Mays
MKRRRRRRADAMAAIKARILRCSEAKADHHNQGRRFKRGYLAPGCGAVDSAVFYLACLVCTPPRPSSSAVSIILASRN

SEQ ID NO: 186367 - protein, 193 aa, Zea Mays
MSESCDQVKAIINCFFLYLFIINNFVEWWVLAGCFLGAMYEQSCNFDTTKPSGIREGEPVLHARGDGTCSYCDIANHKYSPAIDMWSIGCIFAEILTGKPLFPGKNVVHQLDLMTDLLGTPSTDTISQIRNEKTRRYLSSMRRKQPIPFSEKFPNADHSALKLLQRLLAFDPKDRPTAEEALVDPYNSKALQK

SEQ ID NO: 186368 - protein, 125 aa, Zea Mays
MRRRASNQPRSSLEGVLQDAGANSRPASQVVVAQTRQIVSPACNRGATWRSSSSPASSPVTAPPAPTVSFFRATRGVGVYVHAYLLGDVHAAPPPWVNHSIGWGTMKMTHTPLIRKCVAPIIWPR

SEQ ID NO: 186369 - protein, 143 aa, Zea Mays
MRIFPSCSPTPHSTDATPLIFLFYYFHQPGVTRISLPFSTYSAHLLAGPSGHPLTHLASTSDLEQLVRGARMWKSSPSLRPTDHNRSQQTLSGILSTTSVVPGHAAWMLHFDVISCMWVLVILRGCGWGRGTSAFLSVVPDKA

SEQ ID NO: 186370 - protein, 871 aa, Zea Mays
MTDAFIGSLSFKVYFPHLKILSDDVQDGDSTQPAGKGRLLKDSAKPPDDTDFLEGTFIKINSDKQKATRNKKSGKNNKKKKKGKSKGKGKGRKQSHASEMQTGSPTQQPSSTCANATGGETSASSSSRVAVRVPLLEYSSSSSSCRVTAKLVITSAVNSASSGNEKELSASSSSDDFKSFESTTSYTTAASRSSANDYYTGGNAWNCTMGDYAGSLSDARSEPSLSASDYSTDSRGFRRKTTSGEGNRPNVHHQSFSLLAVGPGCSQEALLCSGYSSNGGDFQEVVSRKAAQKMKRMQRSTPATTSSSTMAASGPIVARAHFPRAPFREVITIGHYINDDTFYARKPNQKKGKYQKARSFSNMSSKTGYTTDHGDNVSAGSNRMLLITTVHQAKPRSGHHVTLEAIEETSSPSCLPNPKAGELKAMAPVGDGIIKDTDSKTPSSSDKLSSLLGHLDNSSCVDSREGQKKAMAAPVDGDTEDARAPPSSDKTSSLDNLDNPSYVGKEEQEEVVAPVGVGTEADRDSTAPTSDKTSLLGYMVNSSCVDRDEEQQNKAKFSTDASSSELDKIIEAVNNAYGVQQAASDVYMISAGIHADIENFLHAATPVIGQTSCTKGNMSLQDLRLWNVWSWYEEPECCGIEVQMQGKTNSSWPELSTYFVPLLSAVQLFGQPAGKSQSHGSGLVFEYFESENPFSRPPIFTKIKQLRHGVNLSAGNPIFGDPKQLESVKLSDLHPASWFCVAWYPICQIPAAAGSCQASFLTYHSLGKLVPQICSTDNKADAYDRMICPIVGLLAYKDQGEKWFQLREQQLRIKPRPPSGTDHAELLNKRLRALRQCASIMSKAVVPRAPSGEAMNYHSDYEFFLSRSSLQ

SEQ ID NO: 186371 - protein, 265 aa, Zea Mays
MGKIKIGINGFGRIGRLVARVALQSEDVELVAVNDPFITTDYMGGAKKVVISAPSKDAPMFVVGVNEDKYTSDVNIVSNASCTTNCLAPLAKVIHDNFGIIEGLMTTVHAITATQKTVDGPSAKDWRGGRAASFNIIPSSTGAAKAVGKVLPELNGKLTGMSFRVPTVDVSVVDLTVRIEKGASYEEIKKAIKAASEGPLKGIMGYVEEDLVSTDFTGDSRSSIFDAKAGIALNDHFIKLVSWYDNEWGYSNRVVDLIRHMFKTQ

SEQ ID NO: 186372 - protein, 257 aa, Zea Mays
MGKIKIGINGFGRIGRLVARVALQSEDVELVAVNDPFITTDYMTYMFKYDTVHGQWKHSDKYTSDVNIVSNASCTTNCLAPLAKVIHDNFGIIEGLMTTVHAITATQKTVDGPSAKDWRGGRAASFNIIPSSTGAAKAVGKVLPELNGKLTGMSFRVPTVDVSVVDLTVRIEKGASYEEIKKAIKAASEGPLKGIMGYVEEDLVSTDFTGDSRSSIFDAKAGIALNDHFIKLVSWYDNEWGYSNRVVDLIRHMFKTQ

SEQ ID NO: 186373 - protein, 127 aa, Zea Mays
MAGRSAPTLPPLNNRTPTPHPNPLAPASPPHPRVPLPRLVRPYRTINVPPHRPCPPHARHSHPRWLAPLLLPVPSPASALNVAGQPWSKARGFAGFTKRALVAAGAAVVSSIPVNPLDVAKICLPEE

SEQ ID NO: 186374 - protein, 756 aa, Zea Mays
MMGKTNRFSKGHQLGFVPDYRHGVEAMGESKGLGSPPRIDSGSSCAPPKRKCVSVNSEEGEGASGFSMPRAREVFSLPRMTRLDKKDLEMKLRHELAQVRDVQSRLFLRGSAVSMNGAAVASVPAGDVQPKKKVEKLKRSDSVQTDRGAPPPAATVVAAPVASSVNYTSSFKQCANLLKSIMSHVWAGPFLVPVDIVKLNIPDYFQIVKQPMDLGTIQKKLKAGMYSTPREFAADVRLTFSNAMNYNPVNNDVHLMAKTLSKNFETRWKLIEKKLPKPDDKPQPVEKPPVREPTEKNSTKGVAVEKEDITKKKPSKKSVPKQDIFQEGYSADNPVLQPKKRKTSPLIQDASLVEDVVPTGKRMMTSEQKYDISARLQSFGAFIPDHVVEFIRSRVDDCDADEEEMELDIDVLGDDTLFELQQLLDDYDRVNPSRNLTKEDPHEAESRSQYELINPSVCNDGNELIDEDVDIGENDPPILALPPVVLEDETADRNSKHSTSSSSSSDSESSSSDSDSSSSSGSDADAKAPQQNSGSKEKVLPVDGVDQEKDSLSTLNLPEQSTNPISVSADGGNVSEKQVSPDKQIRAALLRSRFADTILKAREKALDQTTKKDPEKLRREREELERVQREERARLQAEAKAAEDVRKRAEAAAAAEAAAEAKRQRELEREAARKALQEMEKTVDINEGSHFLKDLEMLGSVTGEQIPNLVGETSPGFQMGSNTLEKLGLYMKNDEDDEDGDFTDEPVADVEEGEID

SEQ ID NO: 186375 - protein, 756 aa, Zea Mays
MMGKTNRFSKGHQLGFVPDYRHGVEAMGESKGLGSPPRIDSGSSCAPPKRKCVSVNSEEGEGASGFSMPRAREVFSLPRMTRLDKKDLEMKLRHELAQVRDVQSRLFLRGSAVSMNGAAVASVPAGDVQPKKKVEKLKRSDSVQTDRGAPPPAATVVAAPVASSVNYTSSFKQCANLLKSIMSHVWAGPFLVPVDIVKLNIPDYFQIVKQPMDLGTIQKKLKAGMYSTPREFAADVRLTFSNAMNYNPVNNDVHLMAKTLSKNFETRWKLIEKKLPKPDDKPQPVEKPPVREPTEKNSTKGVAVEKEDITKKKPSKKSVPKQDIFQEGYSADNPVLQPKKRKTSPLIQDASLVEDVVPTGKRMMTSEQKYDISARLQSFGAFIPDHVVEFIRSRVDDCDADEEEMELDIDVLGDDTLFELQQLLDDYDRVNPSRNLTKEDPHEAESRSQYELINPSVCNDGNELIDEDVDIGENDPPILALPPVVLEDETADRNSKHSTSSSSSSDSESSSSDSSSSSGSDADAKAPQQNSGSKEKVLPVDGVDQEKDSLSTLNLPEQSTNPISVSADGEGGNVSEKQVSPDKQIRAALLRSRFADTILKAREKALDQTTKKDPEKLRREREELERVQREERARLQAEAKAAEDVRKRAEAAAAAEAAAEAKRQRELEREAARKALQEMEKTVDINEGSHFLKDLEMLGSVTGEQIPNLVGETSPGFQMGSNTLEKLGLYMKNDEDDEDGDFTDEPVADVEEGEID

SEQ ID NO: 186376 - protein, 758 aa, Zea Mays
MMGKTNRFSKGHQLGFVPDYRHGVEAMGESKGLGSPPRIDSGSSCAPPKRKCVSVNSEEGEGASGFSMPRAREVFSLPRMTRLDKKDLEMKLRHELAQVRDVQSRLFLRGSAVSMNGAAVASVPAGDVQPKKKVEKLKRSDSVQTDRGAPPPAATVVAAPVASSVNYTSSFKQCANLLKSIMSHVWAGPFLVPVDIVKLNIPDYFQIVKQPMDLGTIQKKLKAGMYSTPREFAADVRLTFSNAMNYNPVNNDVHLMAKTLSKNFETRWKLIEKKLPKPDDKPQPVEKPPVREPTEKNSTKGVAVEKEDITKKKPSKKSVPKQDIFQEGYSADNPVLQPKKRKTSPLIQDASLVEDVVPTGKRMMTSEQKYDISARLQSFGAFIPDHVVEFIRSRVDDCDADEEEMELDIDVLGDDTLFELQQLLDDYDRVNPSRNLTKEDPHEAESRSQYELINPSVCNDGNELIDEDVDIGENDPPILALPPVVLEDETADRNSKHSTSSSSSSDSESSSSDSDSSSSSGSDADAKAPQQNSGSKEKVLPVDGVDQEKDSLSTLNLPEQSTNPISVSADGEGGNVSEKQVSPDKQIRAALLRSRFADTILKAREKALDQTTKKDPEKLRREREELERVQREERARLQAEAKAAEDVRKRAEAAAAAEAAAEAKRQRELEREAARKALQEMEKTVDINEGSHFLKDLEMLGSVTGEQIPNLVGETSPGFQMGSNTLEKLGLYMKNDEDDEDGDFTDEPVADVEEGEID

SEQ ID NO: 186377 - protein, 92 aa, Zea Mays
MPMGPGVNCSPVKMLRRGTAPIRGWGIATLCTAFSATANSPSVLLATEFVIDDLSTVARGWFAERHRRVQTRRRLHLRLPRQRVRRLRPLDP

SEQ ID NO: 186378 - protein, 433 aa, Zea Mays
MDATARPAIVIDNGTGKLGFSGNSEPSFTLPTVVAANESFLDQTELLSSANWIAQYNAGIMADLDFFIGDEALSRLRSSGLYTLRRPIRHGQVHDWDTMERFWQQCIFNYLRCNPEEHYFLLTDSPVSTPESRECTGEIMFETFNVPGLYISVQSVLSLSAGYAYLKSISDDDSDTVSDMTGVVVDIGDGAPQIVPVVNGYVIGSSIKSFPFSGSDVTQFVSQLLQERGELLPPEDSLDISRKVKEMYCYTCSDIVKEFKKHDRKPDKYIKHWSAVKPKTGVPYTIDIGYERFLGPEIFFNPEIYSADFSTPLPELIDNCVQSAPIDTRRALYKNIVLSGGSTMFKDFHKRLQTDIKKIVDDRVAATNARHRVEVRPIEVNVVAHPIQSYAVWFGGSLAASNPDFFEFCHTKEDYEEHGASICRTSPVFKGMY

SEQ ID NO: 186379 - protein, 311 aa, Zea Mays
MVHDWDTMERFWQQCIFNYLRCNPEEHYFLLTDSPVSTPESRECTGEIMFETFNVPGLYISVQSVLSLSAGYAYLKSISDDDSDTVSDMTGVVVDIGDGAPQIVPVVNGYVIGSSIKSFPFSGSDVTQFVSQLLQEFKKHDRKPDKYIKHWSAVKPKTGVPYTIDIGYERFLGPEIFFNPEIYSADFSTPLPELIDNCVQSAPIDTRRALYKNIVLSGGSTMFKDFHKRLQTDIKKIVDDRVAATNARHRVEVRPIEVNVVAHPIQSYAVWFGGSLAASNPDFFEFCHTKEDYEEHGASICRTSPVFKGMY

SEQ ID NO: 186380 - protein, 364 aa, Zea Mays
MDATARPAIVIDNGTGYSKLGFSGNSEPSFTLPTVVAANESFLDQTELLSSANWIAQYNAGIMADLDFFIGDEALSRLRSSGLYTLRRPIRHGQVHDWDTMERFWQQCIFNYLRCNPEEHYFLLTDSPVSTPESRECTGEIMFETFNVPGLYISVQSVLSLSAGYAYLKSISDDDSDTVSDMTGVVVDIGDGAPQIVPVVNGYVIGSSIKSFPFSGSDVTQFVSQLLQIFFNPEIYSADFSTPLPELIDNCVQSAPIDTRRALYKNIVLSGGSTMFKDFHKRLQTDIKKIVDDRVAATNARHRVEVRPIEVNVVAHPIQSYAVWFGGSLAASNPDFFEFCHTKEDYEEHGASICRTSPVFKGMY

SEQ ID NO: 186381 - protein, 237 aa, Zea Mays
MDATARPAIVIDNGTGYSKLGFSGNSEPSFTLPTVVAANESFLDQTELLSSANWIAQYNAGIMADLDFFIGDEALSRLRSSGLYTLRRPIRHGQVHDWDTMERFWQQCIFNYLRCNPEEHYFLLTDSPVSTPESRECTGEIMFETFNVPGLYISVQSVLSLSAGYAYLKSISDDDSDTVSDMTGVVVDIGDGAPQIVPVVNGYVIGSSIKSFPFSGSDVTQFVSQLLQVHHALQFLL

SEQ ID NO: 186382 - protein, 132 aa, Zea Mays
MNDKVKDIMYHIYTTTKESLKSISPPEMKLLKYLLNIEEPEERFGALATAFSPGDGREAKDEDALYTELHKWIKMLLDSYHLNKEETDFMDARKMSDPVIIQRLTLLKEMIEEEYMKRYIHPEEEEEPMDDS

SEQ ID NO: 186383 - protein, 145 aa, Zea Mays
MATNLGVFCRAPRPSPASTAAAPSQSLSPSSASVHIPHSTQRGRLAAAPPLPRCVASPTIANVKDQTEAEVAMGYTMTEICDKFIEFFMYMKPETKDWRKLLVFREEWQRYRGHFYKRCQVRIHIEADPSLKQKLVVLARKVKKE

SEQ ID NO: 186384 - protein, 259 aa, Zea Mays
MELFTELRENPADINAIVARRRKDFTGDFFRHLNFLVNAYNGLDERDGIVRLGAKCLSAIHAYDCTLEQLDIESAQLKFDDILNSSSLDGACDKIKSLAKAKELDSSLILLINRAWAAAKESTTMNDKVKDIMYHIYTTTKESLKSISPPEMKLLKYLLNIEEPEERFGALATAFSPGDGREAKDEDALYTTPSELHKWIKMLLDSYHLNKEETDFMDARKMSDPVIIQRLTLLKEMIEEEYMKRYIHPEEEEEPMDDS

SEQ ID NO: 186385 - protein, 224 aa, Zea Mays
MKLKEHMQGDTDAENEAYERYTQNVGLLEEAFCPMEEDADVDPEAEATSSSEEERMDLLVSAAKARLKSDNEAANSFRERVATILDQKLKDLRGSQSASEGDEPSGPSLDDRLTPTPMKFSTAQKMGRATELNELLGKLTGARSEDDLKPCRDLAEQLFGKEDGSSVGNSNRVDTETEPGDQESAAAVARRYSVPTLCSRMEVGEDFASEMNDEFCSLTQVAQL

SEQ ID NO: 186386 - protein, 386 aa, Zea Mays
MKPAAAAVAKVVAGDSPPSAASPAPAPAVANSNGTPQKPPPIPAAAFDMPKPNLRGLNKPKCILCGNIARSRCPFQCCKSCCYKAQNPCHIHVLKQTNTLPDKPSPATAPATTEQQSNNLPATSSASRLAALQKLPQHFLKFLQTKKSVTKKDVAGINKWRFMKLKEHMQGDTDAENEAYERYTQNVGLLEEAFCPMEEDADVDPEAEATSSSEEERMDLLVSAAKARLKSDNEAANSFRERVATILDQKLKDLRGSQSASEGDEPSGPSLDDRLTPTPMKFSTAQKMGRATELNELLGKLTGARSEDDLKPCRDLAEQLFGKEDGSSVGNSNRVDTETEPGDQESAAAVARRYSVPTLCSRMEVGEDFASEMNDEFCSLTQVAQL

SEQ ID NO: 186387 - protein, 98 aa, Zea Mays
MCSLNTRKQINSIETLLPAVHSGLLPDPATIIKKKWTEQVVWILCSPILCPVLAKFSLLPRERGRANRLAGERLVWLGNLAIVPKHDTPLVSRCLCTS

SEQ ID NO: 186388 - protein, 573 aa, Zea Mays
MAAPRHRQGHIAQCLGRILACRGSATAAVAAGPGGRRLTGAEFVDGVRSLAAGLADRGVRPGHVVAAVALNSVEYVQLFLAVTYAGAIIAPLNYRWSFEEAAQAVELVRPTAFAFDGAFSSWALRLMEGDRFPSIGLYLLLGDPCRTGRAAAAVPITDVTGSLGGATAAAAMEPVSAPDDIALICFTSGTTGRPKGVAISHTSLIIQSLAKIAIVGYGEDDVYLHTAPLCHIGGVSSCMAVLMAGGCHVLAPKFDARSAFAAIQEHGVTCFITVPAIMADLLSYARKEEMAPGCGRTTVTKILNGGGGLPLHLVNAASQSFPRAAIFSAYGMTEACSSLTFMALTTPKLQEPEPEPETQPCGHHGGVCVGKPAPHVEIRIGMDDDGTTAGSSPTGNVLTRGLHTMVGYWANGKADSSECDRNGWLDTGDTGWVDEEGNLWLLGRHKGRIKTGGENVYPEEVESVLSQHPGVARAVVVGVPDSRLGERVVACVSVKDGWNWVDARAEHEHRGGGEEVSPQILHGHCRTKELSRFKVPRSYYQWRQPFPVTTTGKIRREELKRELLAAIRLPSNL

SEQ ID NO: 186389 - protein, 242 aa, Zea Mays
MTEACSSLTFMALTTPKLQEPEPEPETQPCGHHGGVCVGKPAPHVEIRIGMDDDGTTAGSSPTGNVLTRGLHTMVGYWANGKADSSECDRNGWLDTGDTGWVDEEGNLWLLGRHKGRIKTGGENVYPEEVESVLSQHPGVARAVVVGVPDSRLGERVVACVSVKDGWNWVDARAEHEHRGGGEEVSPQILHGHCRTKELSRFKVPRSYYQWRQPFPVTTTGKIRREELKRELLAAIRLPSNL

SEQ ID NO: 186390 - protein, 648 aa, Zea Mays
MPRTWYCTSGLPSDISVVVGEQSFHLHKFPLLSKSGLLEKRIREKIDNRDDSCAIDLSDIPGGAKAFELAAKFCYGVKFEMTASNVVHLRCAADYLEMTEEISEGNLIAETESFLTQTVLKSWKDSVKALQTCDNVLDVAERLQIVKRCVDSIATRSCSDPDLFGWPVAHYGGPMQSPGGSLLWNGISTGARPRNSSPDWWYDDVSCLSLPLYKKLISAMEYRGISQGVIVGSLNHYAKRRLPGLNRRKSIGDASNCLSMTSLTSIPSEDDQKYLLEEIDRLLPFQRGVTSCKLLFGLLRTAIFLKASPSCVSNLERRIGMQLDKASLEDLLIPNVSDSVETLYDVECVQRIVDHFLSMDQETGGASPGIGEDGQMLASPSLMPITMVAKLIDGYLAEVAPDMNLKLPKFRSLAAAIPDYARPIDDGLYRAIDIYLKAHPYLPESDKEELCRVMDCQKLSLEACTHAAQNERLPLRVILQVLFFEQLQLRSSIAECLMISEPLDGGGGFSRQLGGLPVSGEHLRGAGWPLAARENQTLREGMDSMKQRVSELEKECFAMKEDIERLGRSRSAGKSRFPFALAAKPHVCGTKDKEAAPESSKSETSKSKAAAATRSDDKLAVVKGGAAAAGDGGPQLKHRKHKTSLSAC

SEQ ID NO: 186391 - protein, 568 aa, Zea Mays
MTASNVVHLRCAADYLEMTEEISEGNLIAETESFLTQTVLKSWKDSVKALQTCDNVLDVAERLQIVKRCVDSIATRSCSDPDLFGWPVAHYGGPMQSPGGSLLWNGISTGARPRNSSPDWWYDDVSCLSLPLYKKLISAMEYRGISQGVIVGSLNHYAKRRLPGLNRRKSIGDASNCLSMTSLTSIPSEDDQKYLLEEIDRLLPFQRGVTSCKLLFGLLRTAIFLKASPSCVSNLERRIGMQLDKASLEDLLIPNVSDSVETLYDVECVQRIVDHFLSMDQETGGASPGIGEDGQMLASPSLMPITMVAKLIDGYLAEVAPDMNLKLPKFRSLAAAIPDYARPIDDGLYRAIDIYLKAHPYLPESDKEELCRVMDCQKLSLEACTHAAQNERLPLRVILQVLFFEQLQLRSSIAECLMISEPLDGGGGFSRQLGGLPVSGEHLRGAGWPLAARENQTLREGMDSMKQRVSELEKECFAMKEDIERLGRSRSAGKSRFPFALAAKPHVCGTKDKEAAPESSKSETSKSKAAAATRSDDKLAVVKGGAAAAGDGGPQLKHRKHKTSLSAC

SEQ ID NO: 186392 - protein, 660 aa, Zea Mays
MSSGSKGRSGTCRFCCRYCTSGLPSDISVVVGEQSFHLHKFPLLSKSGLLEKRIREKIDNRDDSCAIDLSDIPGGAKAFELAAKFCYGVKFEMTASNVVHLRCAADYLEMTEEISEGNLIAETESFLTQTVLKSWKDSVKALQTCDNVLDVAERLQIVKRCVDSIATRSCSDPDLFGWPVAHYGGPMQSPGGSLLWNGISTGARPRNSSPDWWYDDVSCLSLPLYKKLISAMEYRGISQGVIVGSLNHYAKRRLPGLNRRKSIGDASNCLSMTSLTSIPSEDDQKYLLEEIDRLLPFQRGVTSCKLLFGLLRTAIFLKASPSCVSNLERRIGMQLDKASLEDLLIPNVSDSVETLYDVECVQRIVDHFLSMDQETGGASPGIGEDGQMLASPSLMPITMVAKLIDGYLAEVAPDMNLKLPKFRSLAAAIPDYARPIDDGLYRAIDIYLKAHPYLPESDKEELCRVMDCQKLSLEACTHAAQNERLPLRVILQVLFFEQLQLRSSIAECLMISEPLDGGGGFSRQLGGLPVSGEHLRGAGWPLAARENQTLREGMDSMKQRVSELEKECFAMKEDIERLGRSRSAGKSRFPFALAAKPHVCGTKDKEAAPESSKSETSKSKAAAATRSDDKLAVVKGGAAAAGDGGPQLKHRKHKTSLSAC

SEQ ID NO: 186393 - protein, 120 aa, Zea Mays
MGRAQPWGTQEPMDPGRAYELGAMEGAGGAAACLQGVGRHEEELWHAMEGSRELCSSSAFSGQRGQSSHAPALGENGGQVGLPRGKPELAGGNAAGARAGHGDLLLGKSRARAERVAARC

SEQ ID NO: 186394 - protein, 63 aa, Zea Mays
MLSLSFIANEWATKNKLMLSLSFIANEWSTETQKMQIMCLGMKLMLPESHNQPLEAAAAAEIR

SEQ ID NO: 186395 - protein, 58 aa, Zea Mays
MSTSYLTSSLKAFSSALMFQGPFVLCFFIIPFSTLFFWLGRAPRSAPLFLVILQELAG

SEQ ID NO: 186396 - protein, 98 aa, Zea Mays
MSCTLFRRRSDDAVGDLSLWFPFRLGHLGSKKKKKKLLKKGYHPPLILRQTIAFILISADPSKTPLITKGGINFSTVCTQIFLKNISSSPSILISSLR

SEQ ID NO: 186397 - protein, 59 aa, Zea Mays
MCHTLVWGLELKQVIFTNIGLRTGVEAGYSFDESGRAVQGKFAMLEQSQEPRGCSHRSC

SEQ ID NO: 186398 - protein, 87 aa, Zea Mays
MHTSGGGLVVNCLSRSLEQLNLLLLSSGIDLGSRSLSSPGPSNATRSSARNSAPKSSPFNRKMQVTPSHLPLMVDTFHCISLHDRSI

SEQ ID NO: 186399 - protein, 88 aa, Zea Mays
MHTSGGGLVVNCLSRSLEQLNLLLLSSGIDLAGSRSLSSPGPSNATRSSARNSAPKSSPFNRKMQVTPSHLPLMVDTFHCISLHDRSI

SEQ ID NO: 186400 - protein, 93 aa, Zea Mays
MEGGVRYCCRTTLLLNNKSYAYKWWRPGGKLFIKIARAVKFTPIIFWDRFGIKVVVVSRSIKCDKVERTQFSSEVISFQQKDASNTKSLAFDG

SEQ ID NO: 186401 - protein, 64 aa, Zea Mays
MHTSGGGLVVNCLSRSLEQLNLLLLSSGIDLAGSRSLSSPGPSNATRSSARNSAPKSSPFNRSI

SEQ ID NO: 186402 - protein, 74 aa, Zea Mays
MTRRSSKATLSRVSAMHLLVHDLLEVVRMNVPHIGMGVGVEAGESSPRQICHVGAVTGAKGLQSQVLLARMEQS

SEQ ID NO: 186403 - protein, 91 aa, Zea Mays
MNQFVLLGPASGKQQQVMPPPPWSVVTTYNRVIKRHGCEHRIEISIFTTRATIKVYWILASLPPWEQGETTGGSTPISYSQFATFGVVTEW

SEQ ID NO: 186404 - protein, 62 aa, Zea Mays
MARYGPRHTLGQLRTRRAPHRSALCSAFAAFHHQVALGCSLPRRFSYALLHVTTPTAFLHSG

SEQ ID NO: 186405 - protein, 72 aa, Zea Mays
MNQFVLLGPASGKQQQVMPPPPWSVVTTYNRVIKRHGCEHRIEISIFTTRATIKYFALYPSVSKLSNFFIPS

SEQ ID NO: 186406 - protein, 73 aa, Zea Mays
MLPMIRGGGPGMARYGPRHTLGQLRTRRAPHRSALCSAFAAFHHQVALGCSLPRRFSYALLHVTTPTAFLHSG

SEQ ID NO: 186407 - protein, 76 aa, Zea Mays
MMQRLGLSQLRSMMASIPSGRMNDDAPQEFGSLYGGDDIEGSVDEMISKGNEDQRHLPKLSNLHQKVGLYLGSTCR

SEQ ID NO: 186408 - protein, 90 aa, Zea Mays
MRYKLKKKYFNGVPANQVRTTSPISFMIDDQWKLLMEMWSTSKHKDTCMKNKVSCEQVKFPQGTGSQSYIAKAYSMEMHCSKKKGFSETV

SEQ ID NO: 186409 - protein, 118 aa, Zea Mays
MRYKLKKKYFNGVPANQVRTTSPISFMIDDQWKLLMEMWSTSKHKDTCMKNKVSCEQVKFPQGTGSQSYIAKAYSMVDMESMAAAPVEDGHHQRCSNLSLNYKLRGKKKMDYEMKSKA

SEQ ID NO: 186410 - protein, 84 aa, Zea Mays
MRYKLKKKYFNGVPANQVRTTSPISFMIDDQWKLLMEMWSTSKHKDTCMKNKVSCEQVKFPQGTGSQSYIAKAYSMVRKLPCHI

SEQ ID NO: 186411 - protein, 76 aa, Zea Mays
MKNKVSCEQVKFPQGTGSQSYIAKAYSMVDMESMAAAPVEDGHHVKSSIEQRCSNLSLNYKLRGKKKMDYEMKSKA

SEQ ID NO: 186412 - protein, 267 aa, Zea Mays
MVIEMKLLTTTKQQKAHVYKYRQREQASSGVAQQRRKRENGEGGADRQAPRARLAIHDSRTNSIKHGGATGGWRRCGGGGGGGRRRRPAWAEERRRGGVAAVGGAGGDGVDPGGDGDQLRLLGLLVGAEIVAGGVPGGAQLPGDGVGPGQGGGLVVGPRAAPHAAPRRARGLRRHGACRLRRPVLLPHRGGVVHGRRRPLPSGMAYDPLRTHLERRAAEQLDIFKEMVSLRVFERIFSELLYCEHWTTHYVFLQDYKFILFFSWLYC

SEQ ID NO: 186413 - protein, 110 aa, Zea Mays
MIYLVLALGWEVASIVRKGVIKNMRRNIVDGNSFAFLCDNIDELEHSVQENLPRVSVVMPLKGFGEHNLQNWRTQITSLYGGPLEFLFIVESKYDPAYHVVSRLITEYKI

SEQ ID NO: 186414 - protein, 53 aa, Zea Mays
MNRIGIGKLFAGLGELVRFLRGPVVLVPRLVDPSARSRVIRRSSWYLESQVPG

SEQ ID NO: 186415 - protein, 117 aa, Zea Mays
MSSLTTKVFGVPQPGWYRVYYIINNIQELVTALTQEHPVVLMFWADWNQPSKATYWDLAIAKKDEAVFCQLDFDKFKDVVEKFRVKALPTFLLIKEGEEQRRVVGAKHLCSPPSGAR

SEQ ID NO: 186416 - protein, 258 aa, Zea Mays
MSSPLPSVSSVSPKEILVHKAEEFRKLKQGTQRVQEYASVFTKMMRYAPDETSTDKKKQYWFKQGLHRALRTHLATHDFPSLCHMVSKAIVVERERLDYEDSVGFRRKRTGPPNRLGPSQRPQTGLHQSSRGTPCPSASVPSPSYGNTSYQNPSYPKPAASHQAVSVARPAAPAPSSGSSFIFTCFACRNPGHRAADCPSRRQPVYLRPRQYQTPAKSPATGGTPQASQVRVPPPAARGRLNNLTTEDAADASDVALG

SEQ ID NO: 186417 - protein, 264 aa, Zea Mays
MSSPLPSVSSVSPKEILVHKAEEFRKLKQGTQRVQEYASVFTKMMRYAPDETSTDKKKQYWFKQGLHRALRTHLATHDFPSLCHMVSKAIVVERERLDYEDSVGFRRKRTGPPNRLGPSQRPQTGLHQSSRGTPCPSASVPSPSYGNTSYQNPSYPKPAASHQAVSVARPAAPAPSSGSSFIFTCFACRNPGHRAADCPSRRQPVYLRPRQYQTPAKSPATGGTPQASQVRVPPPAARGRLNNLTTEDAADASDVALEARSRET

SEQ ID NO: 186418 - protein, 69 aa, Zea Mays
MKLNSFCTFMSSRVLETTLIAEALSFTVCIEVGDTISSSRFGYVEGLLVVRTLRRWKSTVLDWWGRQRP

SEQ ID NO: 186419 - protein, 104 aa, Zea Mays
MHVFCVALLCVKEQSVQQPMMRKMVQMLNELPNPAAGKEMRFPTATIFPLHNRILQQQMDLLKRRVTKSPKSSSKRDLCYVSFSLLTTDLIKLGFSHCYVSLSW

SEQ ID NO: 186420 - protein, 290 aa, Zea Mays
MVESRRPVSPTRSTSAMAPCSQSRPPRIHSFACTGEEPRVVRLHLHGRRQGQLPRATAQAGEAGWPHRLRQHAVERLHRAPGRRAHAQVHPLLPRLRARPQHGARRRRARRDLPAPSFMWCCVSEENATSNFAAIDASLGDATGEGVAARGLATRGARAASSAVALGFSGEAEKPREEGKLMLSSADEGPGDDDAVEEPTPRTVQLRILGGIWADRIGGALAWSSLLSSRSRDRSILHHDIRAQEDYVSKLTGHKSEDYGASQCMSAIAGSYGYIAPDCYLVDLQECIYP

SEQ ID NO: 186421 - protein, 298 aa, Zea Mays
MVESRRPVSPTRSTSAMAPCSQSRPPRIHSFACTGEEPRVVRLHLHGRRQGQLPRATAQAGEAGWPHRLRQHAVERLHRAPGRRAHAQVHPLLPRLRARPQHGARRRRARRDLPAPSFMWCCVSEENATSNFAAIDASLGDATGEGVAARGLATRGARAASSAVALGFSGEAEKPREEGKLMLSSADEGPGDDDAVEEPTPRTVQLRILGGIWADRIGGALAWSSLLSSRSRDRSILHHDIRAQEDYVSKLTGHKSEDYGASQCMSAIAGSYGYIAPGMHIPLRSMRRACLHLWCRAS

SEQ ID NO: 186422 - protein, 58 aa, Zea Mays
MECNWKGTMLLVSRRLSVTPSAPDSGGDGKSCVSLHGTPGREGEEEQSHDLTFFPHLT

SEQ ID NO: 186423 - protein, 139 aa, Zea Mays
MSFVRLLAISWSHTSLLCIIPHTPPRTCWPHRPALLLAGAPLPCFSLSHGRPPPFLQQAMAAVLSLSFLSWLWTSADPSLPWRPLFPFPTVSWILDAGAAFPWCCPLLWRSSLFQTTTPLSPTPVVHHVLNKMSQRAAP

SEQ ID NO: 186424 - protein, 147 aa, Zea Mays
MPSLLTSPSSAVLGRRARRPSSLRRPPSFPWQELRSAPADLGTRRGSKQRLLPQDRLTVSRELLSLTSPTDKQVRPSPNPLSSARMDSSLLTPACAVSPVSSSHSNSALRRLAVLSSPVDSSNPDVFTSCAPPRFAQPLRDVVHPVR

SEQ ID NO: 186425 - protein, 378 aa, Zea Mays
MGWTESCTTDAYSSGTAAAVSASPSGTCGSRIWSNSWGAWFIWNGASGSGRQLLQHHAQGSFPGSDSSASPEVAAQQAGDDVVKAKKPKAPFYFRYVELKNVMDIGFTLKNHGGVTLTITEWQDSRDMTPAYHLDELWIHITGVPHAWRHFLCFWALGNVIGATLEVDLLTYRKKGVIRVLVGMMNRDKLPLVTDLVFGTAGFDITFTPEAEDFVPTSLPSAGNNPPSHEDGGLGKGNNQEDAYDPASKKLKNQRIRVDVLGATSPSSPRSSTLTPKTLVGMSSSRSSLGLPAPHYTGQRIFGRTTSPVHHAALNFQQEPSVTTGDVQIADPDLIPLACAIERTGLPHPEAQCVVTVADLQFVQSLLDAGQRSPPCLD

SEQ ID NO: 186426 - protein, 136 aa, Zea Mays
MKPAQVYEFMKQFYGGADKVPFSRMDCNNEIGQERNKYLQSNDVQTLLEYLKNKQTEDTTFFYAIQIDPNDGRIANLFWADGQSILDYVCFGDVVSFDTTFQTNKFEMSFAPLLGTNHHKQTVIFGCAMLFNETIE

SEQ ID NO: 186427 - protein, 54 aa, Zea Mays
MNSYMYDIQNLLSGLTQEQLFMLLILYGDSVQRGLHKEVQMESKQMLKPLAIFL

SEQ ID NO: 186428 - protein, 163 aa, Zea Mays
MTPEKVSVSIAMSPPILLIDYSRAKPLNGAAVVRVEAPSFMKNHAPIDLVTLININQSMSWPAASQTEMPSRLDLLKNAMKFIIRQLGDDDRVAIVAFNDQVIKEYTTGILEISGSGRMAIEKKVDGLVAKGDTAFKPSLEHAVKLPSLRYDLKLRAAKAWYK

SEQ ID NO: 186429 - protein, 157 aa, Zea Mays
MTPEKVSVSIAMSPPILLIDYSRAKPLNGAAVVRVEAPSFMKNHAPIDLVTLININQSMSWPAASQTEMPSRLDLLKNAMKFIIRQLGDDDRVAIVAFNDQVIKEYTTGILEISGSGRMAIEKKVDGLVAKGDTAFKPSLEHAVKVMYGHICSHYFS

SEQ ID NO: 186430 - protein, 165 aa, Zea Mays
MGELVLRSMHQHLLQEPKVVGVQCRLDRGWWGRPGDVSQIAFGLLQQRCEDEVLEVAQRDHELVTEPAQQPRALDLAPTGDPHCGLLSRITPHLELHRRLNLPGQGHVPCGEIYEALELRNGGSDYFVKGVLKILLKEVLAGRRTSTWWAYFAGCRDTVQGRNQC

SEQ ID NO: 186431 - protein, 148 aa, Zea Mays
MVVSIGLDVKPGSTVKCEPGYRFMLHLSQKLAIGTLSVDKNPPIQFDLVFDKEFELSHTSKTTIVFFIGYKVEQPFKEDGYPFLFSIELVLFQVEVIRTFFVSLTSYLPSSTMDLDSEDEDEELNVPVVKENGKAGGKIQKSQEKAVP

SEQ ID NO: 186432 - protein, 167 aa, Zea Mays
MAKLVGRYRKVKKRQFLEFFKKKDIFNNDLGGPYAFLEKSQEKAVPAASKSSPASKKSKDDDDSDEDETDDSNEDETDDSDEGEGLSPKEGDDDDLSDEDDTSDDEEEDTSTPKKHEAGKKRAAESSMLKTPLSDKKAKVATPSAQKTVQVAFSTWPWGPSAIIFFL

SEQ ID NO: 186433 - protein, 272 aa, Zea Mays
MVVSIGLDVKPGSTVKCEPGYRFMLHLSQKLAIGTLSVDKNPPIQFDLVFDKEFELSHTSKTTIVFFIGYKVEQPFKEDGYPFLFSIELVLFQVEVIRTFFVSLTSYLPSSTMDLDSEDEDEELNVPVVKENDIFNNDLGGPYAFLEKSQEKAVPAASKSSPASKKSKDDDDSDEDETDDSNEDETDDSDEGEGLSPKEGDDDDLSDEDDTSDDEEEDTSTPKKHEAGKKRAAESSMLKTPLSDKKAKVATPSAQKTGVPLNGLRKLSSKIV

SEQ ID NO: 186434 - protein, 278 aa, Zea Mays
MWKTTGKRSTWGTADGDRLEQRLGADKVKVLEQAFMEEADNALPHPMEDAYLEACHTNNMEWKMCIYGADCSEISLVQVRGSVNCLKRNAIEMEGYIRPLDVDQHSDGVADDHPNDSLFSPTYHHHKEVYMVVSIGLDVKPGSTVKCEPGYRFMLHLSQKLAIGTLSVDKNPPIQFDLVFDKEFELSHTSKTTIVFFIGYKVEQPFKEDGYPFLFSIELVLFQVEVIRTFFVSLTSYLPSSTMDLDSEDEDEELNVPVVKENGKAGGKIQKSQEKAVP

SEQ ID NO: 186435 - protein, 219 aa, Zea Mays
MYVKIDDQKLAIGTLSVDKNPPIQFDLVFDKEFELSHTSKTTIVFFIGYKVEQPFKEDGMDLDSEDEDEELNVPVVKENDIFNNDLGGPYAFLEKSQEKAVPAASKSSPASKKSKDDDDSDEDETDDSNEDETDDSDEGEGLSPKEGDDDDLSDEDDTSDDEEEDTSTPKKHEAGKKRAAESSMLKTPLSDKKAKVATPSAQKTGVPLNGLRKLSSKIV

SEQ ID NO: 186436 - protein, 776 aa, Zea Mays
MLMNFRDWISYRLGSSLLSARPFALSPGADDGASEGDAHDTVTANTFSSNDMRASEVTANSGSGAIYSGIVQQDDDNKKSDPLMKVEALQIKFLRLVYRTGVSPSADVVAQVLYRLQLANLIKASESDARRTNLAINKARVIAAQQEAPGGPDLDVSMQILLLGKSGVGKSATINSIFDERKVATDALVPATHRIKKIEGTIKGIRVTVIDTPGLVSHYHGQRRNMKILNSVKHFIKRSPPDIILYFERLDHINSRYSDYPLLKLMTDILGSPMWFNTVLVMTHCSSSPPEGPDGYPLEYDTYTRYCKNVVQRHIQAAVSNTQLDNPFVLIDNHPMCRRNTKGERVLPNGQVWVSELLLLCGATKLLTEANSLLKFQDSFLLSQANTRLPSLPHLLSSLLKPHSSSSSDAIDSQLTEMSDEEDEYDQLPPFRILKKSEYENLTNEQKSAYLDELDYRETLYLKKQWKEGIRRKKLTEAQSDEVGDDYDESASPEIVHMSDMDIPLSFDSDYPVHRYRHIITDDQLFRPVLDPQGWDHDIGFDAINFEASQELKKNVSAAITGQMRKDKEDMYIHSECSVSYNAQRGCSLMGGMDMQTASKDLVCTVHGDAKFHNLPWNSIGGGISVTKFGNKYFAGAKLEDSVTIGRRVKLVANAGRMSGCGQVAHGGGVEITARGKDYPVREGSVTAAVSALSFEKETVIGANLQSDFRVGRGSKISVSANLNSRNLGNLSVRTSTSDHAEIALITVVSLIQFILRRRSAADNKDEQQIGTNLDD

SEQ ID NO: 186437 - protein, 96 aa, Zea Mays
MSVELILWLFSFVSVMVLIGLTAYQLICLSDLEYDYINPYDSSSRINAVVLIEYSLQGALCASFLLTLHWFPFLVMTPVTYYHVKLIKYNAPWHWN

SEQ ID NO: 186438 - protein, 74 aa, Zea Mays
MTPVTYYHVKLYLARKHLVDVTEIFRQLSDEKKYRMIKLAFYFCLFIITIYRLVMTAVMLFIDEDINLAETRSI

SEQ ID NO: 186439 - protein, 441 aa, Zea Mays
MAPSSPQLKEPSSAVKQASTGPAALPERTKRKTSPSLPEASGATQQPAKRKPPPFQRAWSPGDEVRILKALATYRREHGGRLPTPVELFGALDGSLEKEGVGAKELAIKQRSFKRRYDRDVMKNAPPADKHERRLYLLSKHVWGRVPPPRPPVAKVGSATQAKGAGAQASKADAQAQAQAKSADHQSGKEALKPKAKTLDEMRELYPYLVDEATILVEPAVLERVLLNIGDIDAQVLDKKIRKARKQLADAITESARINNMEVPTIFLFTSSKLQPEKLRVENENNLLVDHLEKMDDVDICAKQRLARVEREVKELRQTVIAYQSQAKGIICESAKGGLQSIVAENQTPANILQKKTEVPNDLIHKKNAAVTSKYHCAVPHNVPPNKPKMQGVMLPPSKAFPGMPRKIDKSPTPRKAVFILVQAAHDPAQQYVWLGRFWVS

SEQ ID NO: 186440 - protein, 89 aa, Zea Mays
MDSSIAKCRVDSLTAISLVIFFSGFSFPSILASSCESEVDSEAGHGCLVFEVAVQAALEVSFPVSREDPDDGWPRGGSLAGRSAILAGL

SEQ ID NO: 186441 - protein, 78 aa, Zea Mays
MSLHGKLKNSLCILLKFKYYYDGYTRICKTNIVRFSWEVLQCTYNIQDNDPVICTTKTFLFYFIKKHFNNKSLEFTNL

SEQ ID NO: 186442 - protein, 191 aa, Zea Mays
MYYPIDGGRTIIFTETKDSASELSGNTGVAVMLYEPRYKHSDSRLERESGVKFEHISAPQPTDVTQSTGSEAADAISSVSDSVIPIFRQQVEQLLSSSSLSAADLLAKALAKAVVCYNIPVIVFLHRWGHICSHWCYLQFDVGNVVMVTGGRNTGRVGVIKNWEKHKGIFEENIEWNSNLVVAKVWRLEFI

SEQ ID NO: 186443 - protein, 172 aa, Zea Mays
MEMPTIFLFTSSKLQPEKLRVENDNNLLVDHLEKMDDVDICAKQRLARVEHEVMELRQTVIAYQAQAKGIICESAKSGLQSIVAENQTPANVLQKKTEVPNGLIHKKNAAVTSKYYCAVPHNVPPNKPKMQGVMLPPFKVFPGMPRKIDKSPTPSKAVSILFFCYIISFSHI

SEQ ID NO: 186444 - protein, 206 aa, Zea Mays
MEMPTIFLFTSSKLQPEKLRVENDNNLLVDHLEKMDDVDICAKQRLARVEHEVMELRQTVIAYQAQAKGIICESAKSGLQSIVAENQTPANVLQKKTEVPNGLIHKKNAAVTSKYYCAVPHNVPPNKPKMQGVMLPPFKVFPVGGKEHDARDLVFIDKAKLLEREYVACHGKVRQHRVVGDDVSSVGEVRVEDLKIAPLRAGVLDP

SEQ ID NO: 186445 - protein, 464 aa, Zea Mays
MASSSPQLKEPSSAVKRASTGPTALPERNKRKTSPSLPEASGATQQPAKRKPPLFQRAWSPGDEVRILEALATYRREHGGRLPTPVELFGALDGSLEKEGVGAKELAIKQRSLKRRYDRDVMKNAPPADKHERRLYLLSKHVWGRVPPTRPPVAKVRSATQAKCAGAQASNAAAQAQAKSADRQSGKEALKPKAKTLDEMRELYPYLVDEATILVEPAVLERVLLNIEDIDAQVLDKKIRKARKQLAGAITESARINNMEMPTIFLFTSSKLQPEKLRVENDNNLLVDHLEKMDDVDICAKQRLARVEHEVMELRQTVIAYQAQAKGIICESAKSGLQSIVAENQTPANVLQKKTEVPNGLIHKKNAAVTSKYYCAVPHNVPPNKPKMQGVMLPPFKVFPVGGKEHDARDLVFIDKAKLLEREYVACHGKVRQHRVVGDDVSSVGEVRVEDLKIAPLRAGVLDP

SEQ ID NO: 186446 - protein, 107 aa, Zea Mays
MRPRTVRAIHTAVLDHGAAWTKMRCGKTYPARNVDDAGQNQQSTISLPHIFFYETHSRAMLQRKPGRRLYNLINIWPLTNLHQTTYVKTMLYVLRTWNMKSSKQRGT

SEQ ID NO: 186447 - protein, 70 aa, Zea Mays
MKRKESQRVLEIAGREADGGWRRASAVCGTAPAGLPIGSGRGPLSPAQAAKAPGALGAPGSRRRCGRYPR

SEQ ID NO: 186448 - protein, 711 aa, Zea Mays
MSNVVALKLMDGALIGRRYESSAAAVDSTDQLAEKHEYQAEVNRLMDLIVHSLYSNKEVFLRELVSNASDALDKLRYLSVTDPELLKDGPQLDIRIQSDKDNGVITITDSGIGMTKQELIDSLGTIASSGTAKFLKALKESQEAGMDNNLIGQFGVGFYSTFLVSEKVVVSTKSPKSDKQYVWEGQADSGSYTIREEKDPEKLIPRGTRLTLYLKMGHPLIIKVEVDEDPAEAKKGDDDIKTEPKKKTKTVVEKYWDWELSNETQPIWLRNPKEVSTEEYNEFYKKTFNEYLNPLASSHFTTEGEVEFRSILYVPATRKDDITDNRKTKNIRLYVKRVFISDDFDGELFPRYLSFVKGVVDSNDLPLNVSREILQESRIVRIMRKRLVRKAFDMVLGISCSENRDDYERFWENYGKILKLGAMEDKENHKRIAPLLRFFSSQSNDELISLDEYVENMKPEQKDIYFIAADSLSSAKNTPFLERLTEKEYEVLLFVDPMDEMAIQNLSSYKDKKFVDISREDLDLGDSNEEREEIKQQFSQTCDWIKNRLGDKVARVDISNRLRSSPCVLVAAKFGWSANMERLMRAQTMGDTTTLDFMRSRKVFEINPEHEIIKALNAACRNNPDDPEALKALDVLFETAMISSGLSPDNPAELSGKIYEMITTAIAGKWSSQSQAQPDNTTLQHAAPGRSDEPLEGEVVEPEPVEADQHK

SEQ ID NO: 186449 - protein, 707 aa, Zea Mays
MDLIVHSLYSNKEVFLRELVSNASDALDKLRYLSVTDPELLKDGPQLDIRIQSDKDNGVITITDSGIGMTKQELIDSLGTIASSGTAKFLKALKESQEAGMDNNLIGQFGVGFYSTFLVSEKVVVSTKSPKSDKQYVWEGQADSGSYTIREEKDPEKLIPRGTRLTLYLKHDDKGFAHPERIQKLLKNYSQFVSFPIYTWQEKGFTKEVEVDEDPAEAKKGDDDIKTEPKKKTKTVVEKYWDWELSNETQPIWLRNPKEVSTEEYNEFYKKTFNEYLNPLASSHFTTEGEVEFRSILYVPATRKDDITDNRKTKNIRLYVKRVFISDDFDGELFPRYLSFVKGVVDSNDLPLNVSREILQESRIVRIMRKRLVRKAFDMVLGISCSENRDDYERFWENYGKILKLGAMEDKENHKRIAPLLRFFSSQSNDELISLDEYVENMKPEQKDIYFIAADSLSSAKNTPFLERLTEKEYEVLLFVDPMDEMAIQNLSSYKDKKFVDISREDLDLGDSNEEREEIKQQFSQTCDWIKNRLGDKVARVDISNRLRSSPCVLVAAKFGWSANMERLMRAQTMGDTTTLDFMRSRKVFEINPEHEIIKALNAACRNNPDDPEALKALDVLFETAMISSGLSPDNPAELSGKIYEMITTAIAGKWSSQSQAQPDNTTLQHAAPGRSDEPLEGEVVEPEPVEADQHKDDISARIVLIT

SEQ ID NO: 186450 - protein, 483 aa, Zea Mays
MSNVVALKLMDGALIGRRYESSAAAVDSTDQLAEKHEYQAEVNRLMDLIVHSLYSNKEVFLRELVSNASDALDKLRYLSVTDPELLKDGPQLDIRIQSDKDNGVITITDSGIGMTKQELIDSLGTIASSGTAKFLKALKESQEAGMDNNLIGQFGVGFYSTFLVSEKVVVSTKSPKSDKQYVWEGQADSGSYTIREEKDPEKLIPRGTRLTLYLKHDDKGFAHPERIQKLLKNYSQFVSFPIYTWQEKGFTKEVEVDEDPAEAKKGDDDIKTEPKKKTKTVVEKYWDWELSNETQPIWLRNPKEVSTEEYNEFYKKTFNEYLNPLASSHFTTEGEVEFRSILYVPATRKDDITDNRKTKNIRLYVKRVFISDDFDGELFPRYLSFVKGVVDSNDLPLNVSREILQESRIVRIMRKRLVRKAFDMVLGISCSENRDVCFHISLWGLRKVLGELWKNFKAGCHGRQRKSQENCSFVALLLFSKQR

SEQ ID NO: 186451 - protein, 526 aa, Zea Mays
MSNVVALKLMDGALIGRRYESSAAAVDSTDQLAEKHEYQAEVNRLMDLIVHSLYSNKEVFLRELVSDALDKLRYLSVTDPELLKDGPQLDIRIQSDKDNGVITITDSGIGMTKQELIDSLGTIASSGTAKFLKALKESQEAGMDNNLIGQFGVGFYSTFLVSEKVVVSTKSPKSDKQYVWEGQADSGSYTIREEKDPEKLIPRGTRLTLYLKHDDKGFAHPERIQKLLKNYSQFVSFPIYTWQEKGFTKEVEVDEDPAEAKKGDDDIKTEPKKKTKTVVEKYWDWELSNETQPIWLRNPKEVSTEEYNEFYKKTFNEYLNPLASSHFTTEGEVEFRSILYVPATRKDDITDNRKTKNIRLYVKRVFISDDFDGELFPRYLSFVKGVVDSNDLPLNVSREILQESRIVRIMRKRLVRKAFDMVLGISCSENRDDYERFWENYGKILKLGAMEDKENHKRIAPLLRFFSSQSNDELISLDEYVENMKPEQKDIYFIAADSLSSAKNTPFLERLTEKEYEVIAMRKERR

SEQ ID NO: 186452 - protein, 752 aa, Zea Mays
MSNVVALKLMDGALIGRRYESSAAAVDSTDQLAEKHEYQAEVNRLMDLIVHSLYSNKEVFLRELVSNASDALDKLRYLSVTDPELLKDGPQLDIRIQSDKDNGVITITDSGIGMTKQELIDSLGTIASSGTAKFLKALKESQEAGMDNNLIGQFGVGFYSTFLVSEKVVVSTKSPKSDKQYVWEGQADSGSYTIREEKDPEKLIPRGTRLTLYLKHDDKGFAHPERIQKLLKNYSQFVSFPIYTWQEKGFTKEVEVDEDPAEAKKGDDDIKTEPKKKTKTVVEKYWDWELSNETQPIWLRNPKEVSTEEYNEFYKKTFNEYLNPLASSHFTTEGEVEFRSILYVPATRKDDITDNRKTKNIRLYVKRVFISDDFDGELFPRYLSFVKGVVDSNDLPLNVSREILQESRIVRIMRKRLVRKAFDMVLGISCSENRDDYERFWENYGKILKLGAMEDKENHKRIAPLLRFFSSQSNDELISLDEYVENMKPEQKDIYFIAADSLSSAKNTPFLERLTEKEYEVLLFVDPMDEMAIQNLSSYKDKKFVDISREDLDLGDSNEEREEIKQQFSQTCDWIKNRLGDKVARVDISNRLRSSPCVLVAAKFGWSANMERLMRAQTMGDTTTLDFMRSRKVFEINPEHEIIKALNAACRNNPDDPEALKALDVLFETAMISSGLSPDNPAELSGKIYEMITTAIAGKWSSQSQAQPDNTTLQHAAPGRSDEPLEGEVVEPEPVEADQHKDDISARIVLIT

SEQ ID NO: 186453 - protein, 307 aa, Zea Mays
MDYERFWENYGKILKLGAMEDKENHKRIAPLLRFFSSQSNDELISLDEYVENMKPEQKDIYFIAADSLSSAKNTPFLERLTEKEYEVLLFVDPMDEMAIQNLSSYKDKKFVDISREDLDLGDSNEEREEIKQQFSQTCDWIKNRLGDKVARVDISNRLRSSPCVLVAAKFGWSANMERLMRAQTMGDTTTLDFMRSRKVFEINPEHEIIKALNAACRNNPDDPEALKALDVLFETAMISSGLSPDNPAELSGKIYEMITTAIAGKWSSQSQAQPDNTTLQHAAPGRSDEPLEGEVVEPEPVEADQHK

SEQ ID NO: 186454 - protein, 175 aa, Zea Mays
MADREHRTVFVTVGTTCFDALVMAVDSPEVKKALLQKGYSNLLIQMGRGTYVPLKVSGDATLQVDHFTFSPSIADNMRTASLVISHAALAGSGSIFETLRLGKPLIVVVNEDLMDNHQSELAEELAERKHLFCARPQTLGETIRAMDLETLVPYEPGDAKPVVTLINRFLGFPVD

SEQ ID NO: 186455 - protein, 170 aa, Zea Mays
MADREHRTVFVTVGTTCFDALVMAVDSPEVKKALLQKGYSNLLIQMGRGTYVPLKVSGDATLQVDHFTFSPSIADNMRTASLVISHAGSIFETLRLGKPLIVVVNEDLMDNHQSELAEELAERKHLFCARPQTLGETIRAMDLETLVPYEPGDAKPVVTLINRFLGFPVD

SEQ ID NO: 186456 - protein, 151 aa, Zea Mays
MADREHRTVFVTVGTTCFDALVMAVDSPEVKKALLQKGYSNLLIQMGRGTYVPLKVSGDATLQVDHFTFSPSIADNMRTASLVISHADLMDNHQSELAEELAERKHLFCARPQTLGETIRAMDLETLVPYEPGDAKPVVTLINRFLGFPVD

SEQ ID NO: 186457 - protein, 123 aa, Zea Mays
MATSFQGTTTKCTACDKTVYLVDKLTADNRIYHKACFRCHHCKGTLKLANYNSFEGVLYCRPHFDQLFKRTGSLDKSFEGTPKVVKPERNVGNENATKVSSAFAGTREKCVGCSKTVYPTERH

SEQ ID NO: 186458 - protein, 116 aa, Zea Mays
MHCDCVIMPVKCTSGLPSAMLYMLSHRLPNFPVKSHKFVFVSEQNIYFMNTCSLVAFAWRLLPHFIVFFKAMFHSATTVLNSAAAFFFSLHIIKHPHGDSHMYHVLLADSLSSFGI

SEQ ID NO: 186459 - protein, 74 aa, Zea Mays
MGHSNVWNSHPKNYGPGSRVCGMLLIVALYLAELVHFDSRVCANPHGLIRKYGLMCCRQCFRSNAKDIGFIKYR

SEQ ID NO: 186460 - protein, 56 aa, Zea Mays
MKFGFSIVEKKRAAAFFCVFLRNNFCELVTVQSLKIHVCDKKCRCSNFRNLFLCSF

SEQ ID NO: 186461 - protein, 63 aa, Zea Mays
MSIFSAPGTRPHHPEPWKPWPRRKPERERKCGAAAEELFTEPPSAPCVESGAIYRPRGKASTT

SEQ ID NO: 186462 - protein, 75 aa, Zea Mays
MVGRAIFARRVAAPTVGRGHRTIRCAPDSVRCANGPGAATVICVRFGRQSCTGPSTGPVRWHTGLSGAPLDRRQG

SEQ ID NO: 186463 - protein, 403 aa, Zea Mays
MEMKLTIRRVPTVVSNYQEDADKPRAGCGRNCLGDCCLPASKLPLYAFKLTPAKGSQEDAASTKLLVDILLSEWEDRMTRGLFRYDVTACETKPFDPAKFNFTKVGQEEVLFQFENSGGDDSYFLNNAPIIAVDRAPNVIAINVSPIEYGHVLLIPRVLDRLPQRIDPESFLLALQMAAEGGSPYFRLGYNSLGAFATINHLHFQAYYLSVPFPVEKAATHKIPLSEDTKKNGVTVSKLINYPVRGLVFEGGNTLDDLATVVSNACIWLQDNNVPYNVLISDCGKRVFLFPQCYAEKQALGEVSQELLDTQVNPAVWEISGHMVLKRRMDYEEASETSAWKLLAEVSLSEERFEEVKAYIFSAAGLVQYDEEEEEASDGEGPTAYVPVKVTPLPVAEGCLVLP

SEQ ID NO: 186464 - protein, 438 aa, Zea Mays
MTEPLTKEDLVAYLVSGCKPKENWRIGTEHEKFGFEVDTLRPIKYDQIRDILNGLAERFDWDKIMEENNVIGLKQGKQSISLEPGGQFELSGAPLETLHQTCAEVNSHLYQVKAVGEEMGIGFLGLGFQPKWALSDIPIMPKGRYEIMRNYMPKVGTLGLDMMFRTCTVQVNLDFSSEQDMIRKFRAGLALQPIATAIFANSPFKEGKPNGFLSLRSHIWTDTDNNRAGMLPFVFDDSFGFEQYVDYALEVPMYFVYRNKKYIDCTGMSFRDFMQGKLPQAPGELPTLNDWENHLTTIFPEVRLKRYLEMRGADGGPWRRLCALPAFWVGLLYDEESLQSILDMTFDWTKEEREMLRRKVPSTGLKTPFRDGYVRDLAEEVLKLAKNGLERRGYKEVGFLREVDEVVRTGVTPAERLLNLYETKWQRNVDHVFEHLLY

SEQ ID NO: 186465 - protein, 216 aa, Zea Mays
MAVASRLAVARVSPDGARPAAAAAAGGRGRSGLAAVRLPSTAGWVRRRGRGGAVAASPPTEEAVQMTEPLTKEDLVAYLVSGCKPKENWRIGTEHEKFGFEVDTLRPIKYDQIRDILNGLAERFDWDKIMEENNVIGLKQGKQSISLEPGGQFELSGAPLETLHQTCAEVNSHLYQVKAVGEEMGIGFLGLGFQPKWALSDIPIMPKIRNNEELHA

SEQ ID NO: 186466 - protein, 291 aa, Zea Mays
MRNYMPKVGTLGLDMMFRTCTVQVNLDFSSEQDMIRKFRAGLALQPIATAIFANSPFKEGKPNGFLSLRSHIWTDTDNNRAGMLPFVFDDSFGFEQYVDYALEVPMYFVYRNKKYIDCTGMSFRDFMQGKLPQAPGELPTLNDWENHLTTIFPEVRLKRYLEMRGADGGPWRRLCALPAFWVGLLYDEESLQSILDMTFDWTKEEREMLRRKVPSTGLKTPFRDGYVRDLAEEVLKLAKNGLERRGYKEVGFLREVDEVVRTGVTPAERLLNLYETKWQRNVDHVFEHLLY

SEQ ID NO: 186467 - protein, 374 aa, Zea Mays
MEENNVIGLKQGKQSISLEPGGQFELSGAPLETLHQTCAEVNSHLYQVKAVGEEMGIGFLGLGFQPKWALSDIPIMPKGRYEIMRNYMPKVGTLGLDMMFRTCTVQVNLDFSSEQDMIRKFRAGLALQPIATAIFANSPFKEGKPNGFLSLRSHIWTDTDNNRAGMLPFVFDDSFGFEQYVDYALEVPMYFVYRNKKYIDCTGMSFRDFMQGKLPQAPGELPTLNDWENHLTTIFPEVRLKRYLEMRGADGGPWRRLCALPAFWVGLLYDEESLQSILDMTFDWTKEEREMLRRKVPSTGLKTPFRDGYVRDLAEEVLKLAKNGLERRGYKEVGFLREVDEVVRTGVTPAERLLNLYETKWQRNVDHVFEHLLY

SEQ ID NO: 186468 - protein, 62 aa, Zea Mays
MPSINNYKHDTNYHGLIGLFLFKLVEPFVLRHFTMRKLPGSWLRLVSSCSVRLYQLAKGVFA

SEQ ID NO: 186469 - protein, 414 aa, Zea Mays
MAGRRFTQNGSSSTQIYAQMTLSYVSKQGGYMDLMMEQIRNSQGESVSEVGNEMQSGLCTQNETMNKNLLVAPCETYTQMILEEDSTLANADISKQQQDVLTGYVSNQIYNSQGESVSEVGNEMQSGLCTQNETMNNNLLEAPCETYTQMILEEDSPLANADISKETFGECNEADTSKYGEAVYHRDLFEIIHVQQLTECAQNDDGKETKTSSASANFDDAEAETTNAGDEELTEDQIDAFIMSEQIAATEGNNASIDNKYTPQVGMEFKTRGDAEHFLFFYGCLASFKPAITHTFRTSNKKRSNEVTKVELKCNKHGKTKKTNQQEQDICTEKKRCEKGPKRNTNVQVKTDCRVFMVIKEHGQKWVIDKLDLEHNHELRPANSNNMFSGHKYMTDMEKGIIRTLTTTTYLHRR

SEQ ID NO: 186470 - protein, 470 aa, Zea Mays
MKAGRAAHRIQILRRKSNMKASRFRVETQHPSSRRPTTPLFLCLLLVVVYWSWSRVRQGQGQPGCLSSPLLLLTSISIPIPTTDLTARTPPLASITSSLRSTFAAVLRLPPPASKSNHPHRAPPPWIPSTTSTAPSPIPTTRSSPRRRRTFPCRPRPRSCPPSPPPPARASSGSASRSGPTPRRPPSSPCAPTSITPSSPPSATRRSGRPSPRASTRRASRAPRTSASPSGRTSSPGSRAPRPPPPPPRPTRPPRSSSSRGRSSRSTTRCGGYSTPGPSARRHWRGRGPRARASARRRRRRWTTKAPARGTTPPMLTTTKRTRTKRPRRATRRPAGACLLRRTRAAGPARRSAGGSRRAPPPLGPRRGRARWRPCCGSSCAGRPRWRSAGRRPPRRARPSAGRARRSGAPPWSRWARSASRSCAAGGSARTPCARAQRSARSAATSSSPRCSPSSAAPTADVSCCVDRHA

SEQ ID NO: 186471 - protein, 54 aa, Zea Mays
MPTTSSASAPNSNNAASNGASSSQQQYQLAMGRSARPGSNSNNAASNGASSSQQ

SEQ ID NO: 186472 - protein, 65 aa, Zea Mays
MHIIPHNLLSDERMRAHSCCLTPPTGQEQVPQDEAHGGCCDEFVRDLGHRLSVNFGLLDRCLLIM

SEQ ID NO: 186473 - protein, 82 aa, Zea Mays
MEASSPRRASSHTQPLSTPPSSPSFQPATGALLLDSVSGCRPSRLPLPRQARSDTSPPRRIALASGRREDTCYLKSKLVPGI

SEQ ID NO: 186474 - protein, 289 aa, Zea Mays
MYPYRMSNVAIGYLNLATLLASIPVIGAGLWLAKGSATPTCSSILQAPLLAVGFAVLLVSLAGFVGACFHVAWALWLYLAAVMLLIAFLLGLTVFGFAVTAGGGGEQVYGRPYREYRVADYSPWLQRHVRDARYWRPALACVVGSRACPKIHNWTPMDYLQHDLTPIQSGCCKPPTACQYSGGVAVGAQDEDCYRWNNAPGVLCYQCDSCKAGVMEQVRQDWHKIAVLNVVVLVALVCICSCGCCAFRNARRSLSEYPYGVNQMSKIDPRWDYYWYSYLFTLFFPTNFS

SEQ ID NO: 186475 - protein, 83 aa, Zea Mays
MELPSNAGDGELLPMEEHKERALRHLLRRSKRPLEEFVAAVADVAEQLGTRHTGWQLAGQCPIRSPSSIRLNSYPHHILMSRA

SEQ ID NO: 186476 - protein, 126 aa, Zea Mays
MWLAMACLLRDQHEQWKHKYGNPCRSVKIFRCQLPRNNAFYSAQPPKHDGSDKPLCPGAPVCHWCGTWKGDKICSSCKKARYCYEKHQALHWRTGHKNDCLQIISSVASNSVLPAVGIGDYLFLYG

SEQ ID NO: 186477 - protein, 100 aa, Zea Mays
MWLAMACLLRDQHEQWKHKYGNPCRRFSGANCHGIMPSTQLNLQSMMALTNHSVQELLYATGVVPGKVIKYVVAARKQGTVMRNIRHCIGVLVIKMIASR

SEQ ID NO: 186478 - protein, 131 aa, Zea Mays
MWLAMACLLRDQHEQWKHKYGNPCRSGLFSSVKIFRCQLPRNNAFYSAQPPKHDGSDKPLCPGAPVCHWCGTWKGDKICSSCKKARYCYEKHQALHWRTGHKNDCLQIISSVASNSVLPAVGIGDYLFLYG

SEQ ID NO: 186479 - protein, 85 aa, Zea Mays
MSSTAMSWDGRRRGRWSCRATLATANSCPWRSTRSARCGTYSADPSARWRSSWPPWQTSRSSWAHVTPGGNWQGNARSGLRRRFV

SEQ ID NO: 186480 - protein, 826 aa, Zea Mays
MSDLASTSKDKLAYFRIKELKDILNQLGLPKHGKKQDLVDRVLAELSDEQGQRHHGWGRKNALTREAVAKVVDDTYSRKMQVCAPDLPSRSHSGSDFNHFRPKEEATDFYYVETKVRCLCNSTMLNDKIIKCEDGKCQLWQHFTCVLIPDTPTEGAGPDIPPHFYCELCRLNRADPFWVTTANPLLPVKFISSGVGNDGASAPQIVEKTFQLSRAERETVQRPEYDLQVWCILVNDKVQFRMQWPQYAELQVNGIPVRVMTRPGSQLLGINGRDDGPLVTTCSREGINKISLSRVDARTFCFGVRIVRRRTVPQVLSLIPKEGEGESFEDALARVRRCLGGGGATDNADSDSDLEVVTESVTVNLRCPNSGSRMRIAGRFKPCVHMGCFDLETFVELNQRSRKWQCPICLNNYSLENLMIDPYFNRITSLLHNCSEDVNELDVKPDGSWRVMGDAATRDLSQWHMPDGTLCDSKEDTNPGVASVNEFKREGASDEHRTLKLGIKKNPIGLWQVSSKADDMKPVVRNHIQNNTGFSTPNIVPMISSPTGSYRDGEDVSVNQEGGGIQFDISLNQEFDSFAHNFGQTYNTEDRPQHPHHNAADVIVLSDSDEENDPTVQPPAVYENTPTNDDSFPFVTDAAGSGYPERYQEDASVGTSGLGLLRQNTGEFEINNWQMLSYPQPEQGFQFFVTDTDVGNPFVAPHNSFTIAPEDYSLGCNVGIEDPSAAHDVSICRNSNDVHGSLVDNPLALTGDDPSLQIFLPSQPSTVPLQQELSERSDTPNGVHPNDWRISLTLAAGGGGNEESTSVGGLKSQPKVSSKELLLLEA

SEQ ID NO: 186481 - protein, 351 aa, Zea Mays
MQVCAPDLPSRSHSGSDFNHFRPKEEATDFYYVETKVRCLCNSTMLNDKIIKCEDGKCQLWQHFTCVLIPDTPTEGAGPDIPPHFYCELCRLNRADPFWVTTANPLLPVKFISSGVGNDGASAPQIVEKTFQLSRAERETVQRPEYDLQVWCILVNDKVQFRMQWPQYAELQVNGIPVRVMTRPGSQLLGINGRDDGPLVTTCSREGINKISLSRVDARTFCFGVRIVRRRTVPQVLSLIPKEGEGESFEDALARVRRCLGGGGATDNADSDSDLEVVTESVTVNLRCPNSGSRMRIAGRFKPCVHMGCFDLETFVELNQRSRKWQCPICLNNYSLENLMIDPYFNRITSL

SEQ ID NO: 186482 - protein, 840 aa, Zea Mays
MSDLASTSKDKLAYFRIKELKDILNQLGLPKHGKKQDLVDRVLAELSDEQGQRHHGWGRKNALTREAVAKVVDDTYRKMQVCAPDLPSRSHSGSDFNHFRPKEEATDFYYVETKVRCLCNSTMLNDKIIKCEDGKCQLWQHFTCVLIPDTPTEGAGPDIPPHFYCELCRLNRADPFWVTTANPLLPVKFISSGVGNDGASAPQIVEKTFQLSRAERETVQRPEYDLQVWCILVNDKVQFRMQWPQYAELQVNGIPVRVMTRPGSQLLGINGRDDGPLVLSLIPKEGEGESFEDALARVRRCLGGGGATDNADSDSDLEVVTESVTVNLRCPNSGSRMRIAGRFKPCVHMGCFDLETFVELNQRSRKWQCPICLNNYSLENLMIDPYFNRITSLLHNCSEDVNELDVKPDGSWRVMGDAATRDLSQWHMPDGTLCDSKEDTNPGVASVNEFKREGASDEHRTLKLGIKKNPIGLWQVSSKADDMKPVVRNHIQNNTGFSTPNIVPMISSPTGSYRDGEDVSVNQEGGGIQFDISLNQEFDSFAHNFGQTYNTEDRPQHPHHNAADVIVLSDSDEENDPTVQPPAVYENTPTNDDSFPFVTDAAGSGYPERYQEDASVGTSGLGLLRQNTGEFEINNWQMLSYPQPEQGFQFFVTDTDVGNPFVAPHNSFTIAPEDYSLGCNVGIEDPSAAHDVSICRNSNDVHGSLVDNPLALTGDDPSLQIFLPSQPSTVPLQQELSERSDTPNGVHPNDWRISLTLAAGGGGNEESTSVGGLKSQPKVSSKEAGVEPLLDAASALGSMNNDRCTGSNLNPKRIENIFSHPRQPRSVRPRLCLSLDTDSE

SEQ ID NO: 186483 - protein, 426 aa, Zea Mays
MGDAATRDLSQWHMPDGTLCDSKEDTNPGVASVNEFKREGASDEHRTLKLGIKKNPIGLWQVSSKADDMKPVVRNHIQNNTGFSTPNIVPMISSPTGSYRDGEDVSVNQEGGGIQFDISLNQEFDSFAHNFGQTYNTEDRPQHPHHNAADVIVLSDSDEENDPTVQPPAVYENTPTNDDSFPFVTDAAGSGYPERYQEDASVGTSGLGLLRQNTGEFEINNWQMLSYPQPEQGFQFFVTDTDVGNPFVAPHNSFTIAPEDYSLGCNVGIEDPSAAHDVSICRNSNDVHGSLVDNPLALTGDDPSLQIFLPSQPSTVPLQQELSERSDTPNGVHPNDWRISLTLAAGGGGNEESTSVGGLKSQPKVSSKEAGVEPLLDAASALGSMNNDRCTGSNLNPKRIENIFSHPRQPRSVRPRLCLSLDTDSE

SEQ ID NO: 186484 - protein, 798 aa, Zea Mays
MQVCAPDLPSRSHSGSDFNHFRPKEEATDFYYVETKVRCLCNSTMLNDKIIKCEDGKCQLWQHFTCVLIPDTPTEGAGPDIPPHFYCELCRLNRADPFWVTTANPLLPVKFISSGVGNDGASAPQIVEKTFQLSRAERETVQRPEYDLQVWCILVNDKVQFRMQWPQYAELQVNGIPVRVMTRPGSQLLGINGRDDGPLVTTCSREGINKISLSRVDARTFCFGVRIVRRRTVPQVLSLIPKEGEGESFEDALARVRRCLGGGGATDNADSDSDLEVVTESVTVNLRCPNSGSRMRIAGRFKPCVHMGCFDLETFVELNQRSRKWQCPICLNNYSLENLMIDPYFNRITSLLHNCSEDVNELDVKPDGSWRVMGDAATRDLSQWHMPDGTLCDSKEDTNPGVASVNEFKREGASDEHRTLKLGIKKNPIGLWQVSSKADDMKPVVRNHIQNNTGFSTPNIVPMISSPTGSYRDGEDVSVNQEGGGIQFDISLNQEFDSFAHNFGQTYNTEDRPQHPHHNAADVIVLSDSDEENDPTVQPPAVYENTPTNDDSFPFVTDAAGSGYPERYQEDASVGTSGLGLLRQNTGEFEINNWQMLSYPQPEQGFQFFVTDTDVGNPFVAPHNSFTIAPEDYSLGCNVGIEDPSAAHDVSICRNSNDVHGSLVDNPLALTGDDPSLQIFLPSQPSTVPLQQELSERSDTPNGVHPNDWRISLTLAAGGGGNEESTSVGGLKSQPKVSSKEAGVEPLLDAASALGSMNNDRCTGSNLNPKRIENIFSHPRQPRSVRPRLCLSLDTDSE

SEQ ID NO: 186485 - protein, 440 aa, Zea Mays
MGDAATRDLSQWHMPDGTLCDSKEDTNPGVASVNEFKREGASDEHRTLKLGIKKNPIGLWQVSSKADDMKPVVRNHIQNNTGFSTPNIVPMISSPTGSYRDGEDVSVNQEGGGIQFDISLNQEFDSFAHNFGQTYNTEDRPQHPHHNAADVIVLSDSDEENDPTVQPPAVYENTPTNDDSFPFVTDAAGSGYPERYQEDASVGTSGLGLLRQNTGEFEINNWQMLSYPQPEQGFQFFVTDTDVGNPFVAPHNSFTIAPEDYSLGCNVGIEDPSAAHDVSICRNSNDVHGSLVDNPLALTGDDPSLQIFLPSQPSTVPLQQELSERSDTPNGVHPNDWRISLTLAAGGGGNEESTSVGGLKSQPKVSSKEAGVEPLLDAACQAFPGSSRLTFEASALGSMNNDRCTGSNLNPKRIENIFSHPRQPRSVRPRLCLSLDTDSE

SEQ ID NO: 186486 - protein, 812 aa, Zea Mays
MQVCAPDLPSRSHSGSDFNHFRPKEEATDFYYVETKVRCLCNSTMLNDKIIKCEDGKCQLWQHFTCVLIPDTPTEGAGPDIPPHFYCELCRLNRADPFWVTTANPLLPVKFISSGVGNDGASAPQIVEKTFQLSRAERETVQRPEYDLQVWCILVNDKVQFRMQWPQYAELQVNGIPVRVMTRPGSQLLGINGRDDGPLVTTCSREGINKISLSRVDARTFCFGVRIVRRRTVPQVLSLIPKEGEGESFEDALARVRRCLGGGGATDNADSDSDLEVVTESVTVNLRCPNSGSRMRIAGRFKPCVHMGCFDLETFVELNQRSRKWQCPICLNNYSLENLMIDPYFNRITSLLHNCSEDVNELDVKPDGSWRVMGDAATRDLSQWHMPDGTLCDSKEDTNPGVASVNEFKREGASDEHRTLKLGIKKNPIGLWQVSSKADDMKPVVRNHIQNNTGFSTPNIVPMISSPTGSYRDGEDVSVNQEGGGIQFDISLNQEFDSFAHNFGQTYNTEDRPQHPHHNAADVIVLSDSDEENDPTVQPPAVYENTPTNDDSFPFVTDAAGSGYPERYQEDASVGTSGLGLLRQNTGEFEINNWQMLSYPQPEQGFQFFVTDTDVGNPFVAPHNSFTIAPEDYSLGCNVGIEDPSAAHDVSICRNSNDVHGSLVDNPLALTGDDPSLQIFLPSQPSTVPLQQELSERSDTPNGVHPNDWRISLTLAAGGGGNEESTSVGGLKSQPKVSSKEAGVEPLLDAACQAFPGSSRLTFEASALGSMNNDRCTGSNLNPKRIENIFSHPRQPRSVRPRLCLSLDTDSE

SEQ ID NO: 186487 - protein, 856 aa, Zea Mays
MSDLASTSKDKLAYFRIKELKDILNQLGLPKHGKKQDLVDRVLAELSDEQGQRHHGWGRKNALTREAVAKVVDDTYSRKMQVCAPDLPSRSHSGSDFNHFRPKEEATDFYYVETKVRCLCNSTMLNDKIIKCEDGKCQLWQHFTCVLIPDTPTEGAGPDIPPHFYCELCRLNRADPFWVTTANPLLPVKFISSGVGNDGASAPQIVEKTFQLSRAERETVQRPEYDLQVWCILVNDKVQFRMQWPQYAELQVNGIPVRVMTRPGSQLLGINGRDDGPLVTTCSREGINKISLSRVDARTFCFGVRIVRRRTVPQVLSLIPKEGEGESFEDALARVRRCLGGGGATDNADSDSDLEVVTESVTVNLRCPWQCPICLNNYSLENLMIDPYFNRITSLLHNCSEDVNELDVKPDGSWRVMGDAATRDLSQWHMPDGTLCDSKEDTNPGVASVNEFKREGASDEHRTLKLGIKKNPIGLWQVSSKADDMKPVVRNHIQNNTGFSTPNIVPMISSPTGSYRDGEDVSVNQEGGGIQFDISLNQEFDSFAHNFGQTYNTEDRPQHPHHNAADVIVLSDSDEENDPTVQPPAVYENTPTNDDSFPFVTDAAGSGYPERYQEDASVGTSGLGLLRQNTGEFEINNWQMLSYPQPEQGFQFFVTDTDVGNPFVAPHNSFTIAPEDYSLGCNVGIEDPSAAHDVSICRNSNDVHGSLVDNPLALTGDDPSLQIFLPSQPSTVPLQQELSERSDTPNGVHPNDWRISLTLAAGGGGNEESTSVGGLKSQPKVSSKEAGVEPLLDAACQAFPGSSRLTFEASALGSMNNDRCTGSNLNPKRIENIFSHPRQPRSVRPRLCLSLDTDSE

SEQ ID NO: 186488 - protein, 877 aa, Zea Mays
MSDLASTSKDKLAYFRIKELKDILNQLGLPKHGKKQDLVDRVLAELSDEQGQRHHGWGRKNALTREAVAKVVDDTYSRKMQVCAPDLPSRSHSGSDFNHFRPKEEATDFYYVETKVRCLCNSTMLNDKIIKCEDGKCQLWQHFTCVLIPDTPTEGAGPDIPPHFYCELCRLNRADPFWVTTANPLLPVKFISSGVGNDGASAPQIVEKTFQLSRAERETVQRPEYDLQVWCILVNDKVQFRMQWPQYAELQVNGIPVRVMTRPGSQLLGINGRDDGPLVTTCSREGINKISLSRVDARTFCFGVRIVRRRTVPQVLSLIPKEGEGESFEDALARVRRCLGGGGATDNADSDSDLEVVTESVTVNLRCPNSGSRMRIAGRFKPCVHMGCFDLETFVELNQRSRKWQCPICLNNYSLENLMIDPYFNRITSLLHNCSEDVNELDVKPDGSWRVMGDAATRDLSQWHMPDGTLCDSKEDTNPGVASVNEFKREGASDEHRTLKLGIKKNPIGLWQVSSKADDMKPVVRNHIQNNTGFSTPNIVPMISSPTGSYRDGEDVSVNQEGGGIQFDISLNQEFDSFAHNFGQTYNTEDRPQHPHHNAADVIVLSDSDEENDPTVQPPAVYENTPTNDDSFPFVTDAAGSGYPERYQEDASVGTSGLGLLRQNTGEFEINNWQMLSYPQPEQGFQFFVTDTDVGNPFVAPHNSFTIAPEDYSLGCNVGIEDPSAAHDVSICRNSNDVHGSLVDNPLALTGDDPSLQIFLPSQPSTVPLQQELSERSDTPNGVHPNDWRISLTLAAGGGGNEESTSVGGLKSQPKVSSKEAGVEPLLDAASALGSMNNDRCTGSNLNPKRIENIFSHPRQPRSVRPRLCLSLDTDSE

SEQ ID NO: 186489 - protein, 760 aa, Zea Mays
MCFPTPTIPSLPGASPTPPHSPTSVPTPGPAATPSSPLAPEATPVPLAVGRSKALRWRDDGSPESSSVASLGLHRRRPSYKEALLLPRPAPFLGREDDFGAGWVTVEGRQARRRRLRHLKPPPLSPRVVPSDLRGKCFNCFSPSHRAAVCRRQVRCFCCRLPGHRAYVCPRRRSAAPLPQRGLVWRPVSLSSGMAGSNDSLAGRVVDGGEDGGGVLKRRTRRGLRRRRSGNLRDSADQDAIVAVPSQRPADQCHDRALGRPRRIIKHSRMILQAEDNLRRALIITVIDQSNSGCAADVSDALAVRFNLDAQTLDLRRAAPNSFIAFLPNEEVACRVFNGGIPFVSPTVRLHIKRWSRHAMAVGGRELPVPVDIELRGIPAHLWGLETATQLLDEYCLIRDVHPDSAEGGDLSVFKLSAWCDEPELVPAELDLLAEEPQLGASDFGSFPHTLVFPITVRVCRSDAILDRRPSPPPQPPFSGDDREQNHGKRRRDQHSISSVPGRRPVHARLGPCVRTDSAPGGTCETIALPVPLGAVSTASASRPRARLGPCGGAGSAPGCTVGTFSAPGPLSAVVAVGAEEAASGSTIPTPAPLVSPPTALVTSVIVPGAANALTTGSPSEDPGPASLIGAISSGLLDSERPILHDNSFNVAAFEEAGGFQRLGQGPENLCADASGRASVPFSHVPHVPDVPADNAAQVRNPWDIIKYSLQAKPPCFKVYSRRRDTVPVQSQEWQCPICLNNYSLENLMIDPYFNRITSL

SEQ ID NO: 186490 - protein, 282 aa, Zea Mays
MGENWDDSTQSKEQIEASLISRQEAAIRRERALAYAFSHQWKSTSRSANPMFVDPNNLQWGWSWLERWMAAKPWEGRNGTDKESNIDRGSVKNMSLNLGVGEGEITKAFNRRDSKPEKPSPPTPKPARPASRQSPSTPSARVAPIPARRKSSTPKNGLSQVDDDVRSVLSVQSERPRRHSIATTSTMRDDESLASSPSLPSYMVPTESARAKSRTATANGAETPEKGGSAGPVKKRLSFQGGAAAASPMRRHSGPPKVESAVKDIAAPPQPEALVANGGGSK

SEQ ID NO: 186491 - protein, 162 aa, Zea Mays
MNNVPHTTFLLTHACFLFYHMASNMTLRRLRHSTAHLPQSICWLFEAAWILALSYFIAYLETLAIANFPYYEFVDRDIMYKVGSLFYAIYFIVSFPMFSRIDEKDEKWSLSRVAVDSLGAAMLVTIILDLWRIFLGPIVPVPESRQCGQPGLAWFQAQNGST

SEQ ID NO: 186492 - protein, 82 aa, Zea Mays
MNNVPHTTFLLTHACFLFYHMASNMTLRRLRHSTAHLPQSICWLFEAAWILALSYFIAYLETLAIANFPYYEFVDRDIMYKD

SEQ ID NO: 186493 - protein, 310 aa, Zea Mays
MPGCTLWYCLHLYYFICIKPFFRYYIVIHVFPKLLQRPFSCTVDGCPFSYSRKDHLNRHLLTHEGKLFVCPVEGCGRKFNIKGNMQRHVQEIHKDVSPCESKKEFICPKVNCGKAFKYASKLKKHEESHVQLEYTEVMCCEPGCMKFFSNMECLKAHNQSCHQYVQCDICGTKQLKKNFQRHHRMHEGSCVTERVKCHIEDCKCSFSKKSNLDKHVKAVHEQRRPFVCQFSGCGKRFSYKHVRDNHEKSSAHVHTEGDFVEADEQRPRSVGGCKRKPVSVESLMRKRVAAPDDGPAHADATEYLRWLLSV

SEQ ID NO: 186494 - protein, 180 aa, Zea Mays
MLEYTEVMCCEPGCMKFFSNMECLKAHNQSCHQYVQCDICGTKQLKKNFQRHHRMHEGSCVTERVKCHIEDCKCSFSKKSNLDKHVKAVHEQRRPFVCQFSGCGKRFSYKHVRDNHEKSSAHVHTEGDFVEADEQRPRSVGGCKRKPVSVESLMRKRVAAPDDGPAHADATEYLRWLLSV

SEQ ID NO: 186495 - protein, 121 aa, Zea Mays
MPCDVSIRQLPAPPRLPERLEKLGVARGPQLLYRLHARQALPGAFADLHDLVVMLPLQLPHLPVARREDRPDVRARVAVKLQRAWNGRNGVVKGKKKKKRKLSMAPCYAMLCYALHCTALR

SEQ ID NO: 186496 - protein, 84 aa, Zea Mays
MIIREYLVRVVISSEKCNSCFIQNKCSIWTVDLAYLLNKFSVSFSFCTVTLRANPQYSAESFYRLLVLTNFYCTRLLKFSSIMF

SEQ ID NO: 186497 - protein, 215 aa, Zea Mays
MGGGKDKHDESDKGLFSNMMHGVAGGHGYPHQGYPPQGYPPQPGAYPPPPGAYPPPPGAYPPPPGAYPPQYGYPQPGGYPPQPGAYPPPPGAYPPPPGAYPPQYGYPQPGGYPTQGGYPPAGYPGSSHQGYGSSHAGGHMGTGAMLAGGAAAAAAAYGAHKLSHGHSGHGGHGPFGGHGRGRGRGGYGRGRGHHGKFKHGKHGHGMFSGKFKKWK

SEQ ID NO: 186498 - protein, 73 aa, Zea Mays
MPRYDDRHGNTRLYVGRLAPRTRSRDLEYLFSKYGRFSVFYPTMEVCGGRVPLVELVAIVPIFVEDFGEGRPW

SEQ ID NO: 186499 - protein, 304 aa, Zea Mays
MENPPSILVTPMAPAMSAQFTRITFSNLFVRRAGPGSTELTVEGRPSDQLGRRNLTDSPVFDGRGPDASLVARVQGVATQMGDVRQLYTVVFQERPLKGSTLVTEGAMTEGSDEWAIYGGTGVFAMARGVIRRTFLADTSGGNSDELAVEVLCPVFRPAAFGSSSSQPAAKDIATTEPPRRLQSLTVRAGVAVDSIEFTYSTDTGGQTRTAGRWGGLGGNVRKLDLGDAEYVKEVSGTYGAFEGATTLTSFRIVTSTARAWGPWGIESGTRFCITAPIGSSIVGFYGRATTRLVAAIGVYLRQL

SEQ ID NO: 186500 - protein, 816 aa, Zea Mays
MDAELLELQRQLEAAQSARSSVRLSERNVVELVRKLQERGIIDFDLLHTVSGKEYITSDHLKHEIKMEIKKRGRASLVDLSDTLGVDLYHVERQSQKVVSDDPTLMLINGEIMSQSYWDTVTEEINEKLQERSQIALAEIAAQLHIGSELVISILEPRLGTIVKGRLEGGQLYTPAYVSRITAMVRGAARGITVPTNLPSVWNSLQQQLHEMHGASGVSVEGSFFQSIFNGLLKEGAVLGSVRAGGQWTPAVFAHAQKESVDAFFSQNSYIGYDVLQKLAIPQPKQFLEARYPDGIALDAVFVHTSVVDMLDTAVGDAIENGHWIDSLSVLPSYISGPDATKILSICPSLQKAIKSSKAVVFGESCVFSNMFIKGIFDRLEKDMDSFGIRLSVGQGRPVNTNLGSEHKTGSGQHSDTKDLGGNGTSSTGASSDRGSKKKRGKGTGSTKGGSLEKDDDNEESIPVKGKKSHRKNKDAGASGDIKHGGKKTSEKMIEENANIFPDELIEEKVLAVAPELEELGGSDDSNAPLKLLSSHLRPMLVDSWAKKRNTMLSGNAERRRRLLDNLQKQIDEAVLEIQLYEKALDVFEEDPTTSGILHKHLLRSMGTPIVDKVLITLDKDNKLKNGMEVEDSEDHVQLSTADRSSLAKDLPSALSLKAQALIEALEGKRFDSFMDALRDILEESGLTFKKLDKRLERTMLHSYRKDLTAQVSSENDPVAFLPKVVALLFLQAYNKAIQAPGRAVGAVITLLKLPAATYKVLTDYHSTTVKLLALQAAATDDEEDCTSDRMRERKEDLEERLMPELKSLVLGTNKE

SEQ ID NO: 186501 - protein, 673 aa, Zea Mays
MDAELLELQRQLEAAQSARSSVRLSERNVVELVRKLQERGIIDFDLLHTVSGKEYITSDHLKHEIKMEIKKRGRASLVDLSDTLGVDLYHVERQSQKVVSDDPTLMLINGEIMSQSYWDTVTEEINEKLQERSQIALAEIAAQLHIGSELVISILEPRLGTIVKGRLEGGQLYTPAYVSRITAMVRGAARGITVPTNLPSVWNSLQQQLHEMHGASGVSVEGSFFQSIFNGLLKEGAVLGSVRAGGQWTPAVFAHAQKESVDAFFSQNSYIGYDVLQKLAIPQPKQFLEARYPDGIALDAVFVHTSVVDMLDTAVGDAIENGHWIDSLSVLPSYISGPDATKILSICPSLQKAIKSSKAVVFGESCVFSNMFIKGIFDRLEKDMDSFGIRLSVGQGRPVNTNLGSEHKTGSGQHSDTKDLGGNGTSSTGASSDRGSKKKRGKGTGSTKGGSLEKDDDNEESIPVKGKKSHRKNKDAGASGDIKHGGKKTSEKMIEENANIFPDELIEEKVLAVAPELEELGGSDDSNAPLKLLSSHLRPMLVDSWAKKRNTMLSGNAERRRRLLDNLQKQIDEAVLEIQLYEKALDVFEEDPTTSGILHKHLLRSMGTPIVDKVLITLDKDNKLKNGMEVEDSEDHVQLSTADRSSLAKDLPSALSLKAQALIEALEGKWLDI

SEQ ID NO: 186502 - protein, 818 aa, Zea Mays
MDAELLELQRQLEAAQSARSSVRLSERNVVELVRKLQERGIIDFDLLHTVSGKEYITSDHLKHEIKMEIKKRGRASLVDLSDTLGVDLYHVERQSQKVVSDDPTLMLINGEIMSQSYWDTVTEEINEKLQERSQIALAEIAAQLHIGSELVISILEPRLGTIVKGRLEGGQLYTPAYVSRITAMVRGAARGITVPTNLPSVWNSLQQQLHEMHGASGVSVEGSFFQSIFNGLLKEGAVLGSVRAGGQWTPAVFAHAQKESVDAFFSQNSYIGYDVLQKLAIPQPKQFLEARYPDGIALDAVFVHTSVVDMLDTAVGDAIENGHWIDSLSVLPSYISGPDATKILSICPSLQKAIKSSKAVVFGESCVFSNMFIKGIFDRLEKDMDSFGIRLSVGQGRPVNTNLGSEHKTGSGQHSDTKDLGGNGTSSTGASSDRGSKKKRGKGTGSTKGGSLEKDDDNEESIPVKGKKSHRKNKDAGASGDIKHGGKKTSEKMIEENANIFPDELIEEKVLAVAPELEELGGSDDSNAPLKLLSSHLRPMLVDSWAKKRNTMLSGNAERRRRLLDNLQKQIDEAVLEIQLYEKALDVFEEDPTTSGILHKHLLRSMGTPIVDKVLITLDKDNKLKNGMEVEDSEDHVQLSTADRSSLAKDLPSALSLKAQALIEALEGKRFDSFMDALRDILEESGLTFKKLDKRLERTMLHSYRKDLTAQVSSENDPVAFLPKVVALLFLQAYNKAIQAPGRAVGAVITLLKDKLPAATYKVLTDYHSTTVKLLALQAAATDDEEDCTSDRMRERKEDLEERLMPELKSLVLGTNKE

SEQ ID NO: 186503 - protein, 509 aa, Zea Mays
MLDTAVGDAIENGHWIDSLSVLPSYISGPDATKILSICPSLQKAIKSSKAVVFGESCVFSNMFIKGIFDRLEKDMDSFGIRLSVGQGRPVNTNLGSEHKTGSGQHSDTKDLGGNGTSSTGASSDRGSKKKRGKGTGSTKGGSLEKDDDNEESIPVKGKKSHRKNKDAGASGDIKHGGKKTSEKMIEENANIFPDELIEEKVLAVAPELEELGGSDDSNAPLKLLSSHLRPMLVDSWAKKRNTMLSGNAERRRRLLDNLQKQIDEAVLEIQLYEKALDVFEEDPTTSGILHKHLLRSMGTPIVDKVLITLDKDNKLKNGMEVEDSEDHVQLSTADRSSLAKDLPSALSLKAQALIEALEGKRFDSFMDALRDILEESGLTFKKLDKRLERTMLHSYRKDLTAQVSSENDPVAFLPKVVALLFLQAYNKAIQAPGRAVGAVITLLKDKLPAATYKVLTDYHSTTVKLLALQAAATDDEEDCTSDRMRERKEDLEERLMPELKSLVLGTNKE

SEQ ID NO: 186504 - protein, 229 aa, Zea Mays
MEGSLSLAIPARLLQGRKVRPRHRHPRAAAFPSRHPRTAAPRKEGPTPPSPQWEIPILCARARHGAGVPEAQERAPVCSATRSLQDLASRKRAYRGSEPQQSHCTDAPVPAVVMTAPAASGASASARVLSGRELKRKVGCIDNAMRIGRRKRLESEYDLGDEIGHGKFGSVRVCRPKAGTRGEEEFACKALPKNGGDTTHREVEIMHHLSGHPGVVTLRASLKTPMAPR

SEQ ID NO: 186505 - protein, 241 aa, Zea Mays
MKNCAQVGSYVRLYVKNVPTDIASKLCHPSRRIPVVVSGLLQHESKMSVLHFSIKKHDSYEAPIKSKEPLIFNVGFRQFTARPLFSSDNINCNKHKMERFLHHGRFSVASVYAPISFPPLPLIVLKNRDGEQPAIAAVGSLKSVDPDRIILKKIVLTGYPQRVSKLKSIVRYMFHNPDDVKWFKPVELWTKHGRRGRIKETVGTHGAMKCLFNSSIQQHDTVCMSLYKRAYPKWPEQLYHV

SEQ ID NO: 186506 - protein, 279 aa, Zea Mays
MDATDNDQVTVELHPRISAVLQHFQPVFDIPQGMPPYRSCDHSIPLIQRYQPVFIRPYCYAPTVKDEIERQVSEMLSSGIIQHNSSPFSSPMLLVCKKDQSWRFCVDFRHLNALTIKRKYTVPIIEELMDELQEASWFSSLDLRARFHQILLKEGEEFKTAFQTHNGHYELRVMAFGLTGAPATFQSAMNSTLQPVLCKFALVFFDDILVYSSTLDDHVEHLSTVLSLLQKDQWQVKLSKCTFATRSISYLGHVISETGVQTDPNKVTTVVNWSTPTNI

SEQ ID NO: 186507 - protein, 534 aa, Zea Mays
MDPQIKLALEAQTRSFLNELDKKFAAHDTKWESRVGDLERSAAAAADQFYDLKADIHTDVTAQLEFFVSSATERTDRAAAATISRVSALKSTTSTFEAWRPTMESMVTDFKLSVKAVQAIVDNLSLSWERRPPEPDHLKPGILGTFGSAPVRPPTREWTNGPDGHHLDSNHREAGFGRMFASTHLPPNGMLPSDSPTFSHLLGSPHRLGGGHTEGFTQSSNFGPLPKVPFPPFDGDNPRLWITRSKDYFDLYNVDPTAWIRVSTMHFTGPTSRWLQSLGPQFRIYPWPEFTRLLLQRFGRDQHDTLIRQLFHIKQSTTIATYIEQFSGIVDQLLAYESHTDPRFYTMQFIDGLKDHIKSAVLLQRPPNLDTACALAQLQEEVSEPAQVDYRKFISSPSTRPAQSPMPLPRPPQAETVVADHAKVYAVPRQRQVDEKLASLKAYRRARGLCDRCADKWVPGHRCAPTVQLHALQELWELIEEDSSTNTTETEPKPSGGRWRQCFMFTVFQSFSNSMVSSGLQFLHRFQGISFTKL

SEQ ID NO: 186508 - protein, 232 aa, Zea Mays
MRVPYGADKEFFRYSLFLVFCNRITTSMVSAMVLLASKKSLDPVAPLHKYGVVSISNILTTTCQYEALKYVSFPVQTLAKCAKMIPVMIWGTIIMRKKYGGKDYFFAVIVTLGCALFILYPAMMDVSPFNKGRESTIWGVSLMFGYLGFDGFTSTFQDKLFKGYDMEIHNQIFYTTVCSCLLSLSGLILQNHLIPAVDFMFHHPDCFSDVLILSSVFKEHETENLLELLNFS

SEQ ID NO: 186509 - protein, 349 aa, Zea Mays
MADAAADRERDKGKDDRRRWAARCGFAVLGIMSTLLVYGVLQEKIMRVPYGADKEFFRYSLFLVFCNRITTSMVSAMVLLASKKSLDPVAPLHKYGVVSISNILTTTCQYEALKYVSFPVQTLAKCAKMIPVMIWGTIIMRKKYGGKDYFFAVIVTLGCALFILYPAMMDVSPFNKGRESTIWGVSLMFGYLGFDGFTSTFQDKLFKGYDMEIHNQIFYTTVCSCLLSLSGLILQNHLIPAVDFMFHHPDCFSDVLILSSVATASQFFISYTIRTFGALTFATIMTTRQLVSILLSCIWFAHPLSWMQWVGAAIVFGAIYAKSFLRSKPQKTAVASLPHGSSPNPANSS

SEQ ID NO: 186510 - protein, 199 aa, Zea Mays
MADAAADRERDKGKDDRRRWAARCGFAVLGIMSTLLVYGVLQEKIMRVPYGADKEFFRYSLFLVFCNRITTSMVSAMVLLASKKSLDPVAPLHKYGVVSISNILTTTCQYEALKYVSFPVQTLAKCAKMIPVMIWGTIIMRKKYGGKDYFFAVIVTLGCALFILYPAMMDVSPFNKGRESTIWGVSLMFGYLGYDCIFV

SEQ ID NO: 186511 - protein, 273 aa, Zea Mays
MADAAADRERDKGKDDRRRWAARCGFAVLGIMSTLLVYGVLQEKIMRVPYGADKEFFRYSLFLVFCNRITTSMVSAMVLLASKKSLDPVAPLHKYGVVSISNILTTTCQYEIWGTIIMRKKYGGKDYFFAVIVTLGCALFILYPAMMDVSPFNKGRESTIWGVSLMFGYLGFDGFTSTFQDKLFKGYDMEIHNQIFYTTVCSCLLSLSGLILQNHLIPAVDFMFHHPDCFSDVLILSSVTGDFLHRKGLSDALPIKVFKEHETENLLELLNFS

SEQ ID NO: 186512 - protein, 347 aa, Zea Mays
MADAAADRERDKGKDDRRRWAARCGFAVLGIMSTLLVYGVLQEKIMRVPYGADKEFFRYSLFLVFCNRITTSMVSAMVLLASKKSLDPVAPLHKYGVVSISNILTTTCQYEALKYVSFPVQTLAKCAKMIPVMIWGTIIMRKKYGGKDYFFAVIVTLGCALFILYPAMMDVSPFNKGRESTIWGVSLMFGYLGFDGFTSTFQDKLFKGYDMEIHNQIFYTTVCSCLLSLSGLILQNHLIPAVDFMFHHPDCFSDVLILSSVATASQFFISYTIRTFGALTFATIMTTRQLVSILLSCIWFAHPLSWMQWVGAVTGDFLHRKGLSDALPIKVFKEHETENLLELLNFS

SEQ ID NO: 186513 - protein, 96 aa, Zea Mays
MRQTLRNFGYNLSKVPLLCDNESAIRMADNPVEHSRTKHIDIRHHFLRDHQQKGDIEVHHINTENQLVDIFTNPLDEKTFCRLRSELNVLDSRNLD

SEQ ID NO: 186514 - protein, 87 aa, Zea Mays
MIGGAFLSAGCPSLTSPRTSLLASFFPWIIDRRLSSGTCLAFFICQIYPTASSCCSTILHSSPSWLASNSTSSLSLSLLYVCICVYK

SEQ ID NO: 186515 - protein, 233 aa, Zea Mays
MPRLSVVLLFVPTEERQLLFFSLSLSQDKSGKVCGRMGSVPPPVVAGHPKTLMHCTQQFAPLTVHSLFVGYVSADMLLYATNACAVPVLPESTARFFWQDVAEGSPPSASDALAFQWAEGREPPRRLVSDYLPGLPLRQKLTPGPRDFSGVYGEVRVRQGLSGTTTVTACLSTIYHHLPRACACPPFTKPCRYCQESDTEDSAEHWNDDEQRGRGLSDNVRDKEDDEKKKIWI

SEQ ID NO: 186516 - protein, 144 aa, Zea Mays
MDASSSAMLFYSVSSSPIVLPPSCVSMSIWNPSTEAVTYYSINAPTRFGCRPPHRRGMALHLHPQARRRLGVLTCLLHDPLLLQRQQSVVAFCCNGLARHCPGHGQEQIPQDEAHGGCCDVFVRGLGHRIPVNFGLLNRCLFMM

SEQ ID NO: 186517 - protein, 104 aa, Zea Mays
MESTTGSAELEHAPFLTNHFFLVLCSNTRKADEAREPHRESMPSTTACWVSGTARLAASSFTMTPRARRGRKRGCGSRKSTTRRSSPARSADGKAWSWKTVPGR

SEQ ID NO: 186518 - protein, 110 aa, Zea Mays
MQPPPPVQPPPSPLLSRSAPPVRPPPAPPPLACYCSLVVRPPCPALPLSARRPVPLSACCCSLVVALLSRTPTAPLFLACCCFSSCSNKQLCVCSCSCCSLAEEGVLTNA

SEQ ID NO: 186519 - protein, 64 aa, Zea Mays
MVDGEAASTRLNFGGGPRVRLEGEKEATTENNDLRKRCVPVNIRNERQGLTFYAITSVICWTSK

SEQ ID NO: 186520 - protein, 125 aa, Zea Mays
MQPPPPVQPPPSPLLSRSAPPVRPPPAPPPLACYCSLVVRPPCPALPLSARRPVPLSACCCSLVVALLSRTPTAPLFLACCCFSSCSNKQLCVCSCSCCSLAEASELSRWRFRAAPPILEGGANG

SEQ ID NO: 186521 - protein, 146 aa, Zea Mays
MPRSGFSGSFRSPKIDVVIDMGKPLPQPHRSTASSRSAPVGACKVLPRDLRVPPQGDVSKHKVEHALRKMCKEGAYWGTVAGVYVGMVYGVERVRGRSDWKNAMIGGALSGALISGASNSDRGKVVKDAITAGAVATAVEFINCIT

SEQ ID NO: 186522 - protein, 81 aa, Zea Mays
MANNLLSEDMFISCGSQLFTKTYPSAVFLILFWFLSTAGTTRSCLVACEPSIGTATWFLRMFVRCGPRYRRPVKARRRLSR

SEQ ID NO: 186523 - protein, 68 aa, Zea Mays
MKINVNNLMDLYPNNRPTNALQKSVDHIDEAIIVHPNGNDTITHEVFVHPYGKLQEMHILQNDIILLS

SEQ ID NO: 186524 - protein, 414 aa, Zea Mays
MVLSGGAERVACWACMLGIQVSESEASRPKLQALASFPFCAAGGGGAPPPHGRRQQHRHGPRQRRLLLHRGVLAGGPDAARPARQAVRGVGGQVPQGVRQLRGEAAPVRGVQGQPAPHRRGARVRGLAEEGRRDGGQEPGAVRQLLGLLHGGGRGRDQPDRDGQPHVAVGAAAGRLQHRREQRVQRRRHGQRLLVHRHRRRAPLRGGVPVPHGGRGLRRQGPRRRGARHYIRVRGRAGQRRAGARQGPRPPARQRRHRGVREALPVLQRGRVRWTVRVGAGPRRGGGGLRQQQGAGLHHRQELVGHPLGREGLHPHEEGHRQAGGPLRHQQDGILPDQGPLMDHGRRRSYLSSLPFHPTLSISIVCPLFLNVCVFFYILLCQVISRWIDRGRTTNMHSSTSAAMSSFSSFGALK

SEQ ID NO: 186525 - protein, 77 aa, Zea Mays
MPAHEFPQRHHQSLHPSSCRSRSPSTRSATFLFLSSFLRILSRVDYGTLNNRVMRKMSQVDLKHGLLRMVVLMDEPT

SEQ ID NO: 186526 - protein, 390 aa, Zea Mays
MAKLASIARSMLRFPNGSMRLVMVTVIGAVLGFFIGISFPSVSITKDSFISYIEDKDAGLTTQAILNHAWTSARNARGNGTEPTSNSTLKIYVPTNPKGAEGLAPGIVVSESDFHLRRLWGDPSEDLPFKPKYLVTFTVGVEQKANINRAVKKFSDNFAILLFHYDGRVSEWDEFEWSQRAIHISVRKQTKWWYAKRFLHPDIVAAYEYIFIWDEDLGVEHFNAEEYIKLVKKHNLDISQPGLEPDRGLTWQMTKRRGDSEVHKDTEERPGWCSDPHLPPCAAFVEIMAPVFSRDAWRCVWHMIQNDLVHGWGLDFALRKCVEPAHEKIGVVDSQWIVHQVVPSLGNQGQSENGRARCRKEWGMFQTRMAEAEKAYYKMMGITPPNSTRV

SEQ ID NO: 186527 - protein, 462 aa, Zea Mays
MPPRAGAMAAAAARARAALLPSSPSPSPLFRLPRRFLSLTATRYPLYYDLIVHRPADPNPPKSSAAGADRQPQPAPEEQTLDRAKRRYLRKRRSRLLPDPDATTTTKPSSLSSEFVELRPEVVDFPRLHAREEALYFHDTFAMPWEKDKHYRMLYRLEKKYFPHQSLDNAFVSADAAPASDADRGLVFFDDEKKENEGEERAVSDKGANKGEVLERKVEDFFRSLKKGPGQVDTKAKRPGTEPQQQVKREVRREEERPQPYLVTRTTELPPRWDGPAGTVVLIDKPKGWTSFTVCGKLRRLVKVQKVGHAGTLDPMATGLLIVCVGKATKIVDSYQGMVKGYSGVFRLGEATSTWDADSPIIQREPWEHIKDENIRKAAASFMGEIWQVPPMFSAIKVGGEKMYDKARKGETVELSPRRISIYQFDIERSLEDRQNLIFRVTCSKGTYIRSLCADLGKALGR

SEQ ID NO: 186528 - protein, 512 aa, Zea Mays
MPPRAGAMAAAAARARAALLPSSPSPSPLFRLPRRFLSLTATRYPLYYDLIVHRPADPNPPKSSAAGADRQPQPAPEEQTLDRAKRRYLRKRRSRLLPDPDATTTTKPSSLSSEFVELRPEVVDFPRLHAREEALYFHDTFAMPWEKDKHYRMLYRLEKKYFPHQSLDNAFVSADAAPASDADRGLVFFDDEKKENEGEERAVSDKGANKGEVLERKVEDFFRSLKKGPGQVDTKAKRPGTEPQQQVKREVRREEERPQPYLVTRTTELPPRWDGPAGTVVLIDKPKGWTSFTVCGKLRRLVKVQKPLALSTCFAIFVWSQVGHAGTLDPMATGLLIVCVGKATKIVDSYQGMVKGYSGVFRLGEATSTWDADSPIIQREPWEHIKDENIRKAAASFMGEIWQVPPMFSAIKVGGEKMYDKARKGETVELSPRRISIYQFDIERSLEDRQNLIFRVTCSKGTYIRSLCADLGKALGSCAHLTALRRDSIGEYSVNDAWNFDELEEQITKGYL

SEQ ID NO: 186529 - protein, 494 aa, Zea Mays
MPPRAGAMAAAAARARAALLPSSPSPSPLFRLPRRFLSLTATRYPLYYDLIVHRPADPNPPKSSAAGADRQPQPAPEEQTLDRAKRRYLRKRRSRLLPDPDATTTTKPSSLSSEFVELRPEVVDFPRLHAREEALYFHDTFAMPWEKDKHYRMLYRLEKKYFPHQSLDNAFVSADAAPASDADRGLVFFDDEKKENEGEERAVSDKGANKGEVLERKVEDFFRSLKKGPGQVDTKAKRPGTEPQQQVKREVRREEERPQPYLVTRTTELPPRWDGPAGTVVLIDKPKGWTSFTVCGKLRRLVKVGHAGTLDPMATGLLIVCVGKATKIVDSYQGMVKGYSGVFRLGEATSTWDADSPIIQREPWEHIKDENIRKAAASFMGEIWQVPPMFSAIKVGGEKMYDKARKGETVELSPRRISIYQFDIERSLEDRQNLIFRVTCSKGTYIRSLCADLGKALGSCAHLTALRRDSIGEYSVNDAWNFDELEEQITKGYL

SEQ ID NO: 186530 - protein, 175 aa, Zea Mays
MAASTFSGDETAPFFGFLGAAAALVFSCMGAAYGTAKSGVGVASMGVMRPELVMKSIVPVVMAGVLGIYGLIIAVIISTGINPKAKPYFLFDGYAHLSSGLACGLAGLAAGMAIGIVGDAGVRSSCSVRSHRRYHSLIPCRPISRRLEGLIYATLSHLPLYSKCSFLGEQCEGSC

SEQ ID NO: 186531 - protein, 62 aa, Zea Mays
MGVNNKALRRQLPSSFLPPCISGANVSIEANTLPELPSTSILTHTAGATSRVDRGGSSGEPK

SEQ ID NO: 186532 - protein, 327 aa, Zea Mays
MADGEDIQPLVCDNGTGMVKAGFAGDDAPRAVFPSIVGRPRHTGVMVGMGQKDAYVGDEAPLNPKANREKMTQIMFETFNVPAMYVAIQAVLSLYASGRTTGIVLDSGDGVSHTVPIYEGYALPHAILRLDLAGRDLTDSLMKILTERGYSFTTSAEREIVRDIKEKLAYIALDYEQELETAKNSSSVEKSYELPDGQVITIGAERFRCPEVLFQPSMIGMEAAGIHETTYNSIMKCDVDIRKDLYGNIVLSGGSTMFPGIADRMSKEITSLAPSSMKIKVVAPPERKYSVWIGGSILASLSTFQQMWISKEEYDESGPAIVHRKCF

SEQ ID NO: 186533 - protein, 350 aa, Zea Mays
MADGEDIQPLVCDNGTGMVKAGFAGDDAPRAVFPSIVGRPRHTGVMVGMGQKDAYVGDEAQSKRGILTLKYPIEHGIVSNWDDMEKIWHHTFYNELRVAPEEHPVLLTEAPLNPKANREKMTQIMFETFNVPAMYVAIQAVLSLYASGRTTGIVLDSGDGVSHTVPIYEGYALPHAILRLDLAGRDLTDSLMKILTERGYSFTTSAEREIVRDIKEKLAYIALDYEQELETAKNSSSVEKSYELPDGQVITIGAERFRCPEVLFQPSMIGMEAAGIHETTYNSIMKCDVDIRKDLYGNIVLSGGSTMFPGIADRMSKEITSLAPSSMKIKEGPLRQHCAQWRFDYVPRYR

SEQ ID NO: 186534 - protein, 394 aa, Zea Mays
MADGEDIQPLVCDNGTGMVKAGFAGDDAPRAVFPSIVGRPRHTGVMVGMGQKDAYVGDEAQSKRGILTLKYPIEHGIVSNWDDMEKIWHHTFYNELRVAPEEHPVLLTEAPLNPKANREKMTQIMFETFNVPAMYVAIQAVLSLYASGRTTGIVLDSGDGVSHTVPIYEGYALPHAILRLDLAGRDLTDSLMKILTERGYSFTTSAEREIVRDIKEKLAYIALDYEQELETAKNSSSVEKSYELPDGQVITIGAERFRCPEVLFQPSMIGMEAAGIHETTYNSIMKCDVDIRKDLYGNIVLSGGSTMFPGIADRMSKEITSLAPSSMKIKVVAPPERKYSVWIGGSILASLSTFQQMWISKEEYDESGPAIVHRKVDPSLAQHFPTDVDIQGGV

SEQ ID NO: 186535 - protein, 1211 aa, Zea Mays
MAGTFREGAGPGDAHAPPPTPTPPLSQFLALDALPSWGSDPKQPHWRHPELRRALASDDQADELRRIRASVQDSAGKAKEKVRSLHEAIQKLDKYKNIVTRKRQRATEASAAPDKLGPAGASSSGALRMGAQNNSAVLSKRVRSSLADARVEGRGSVPTRQGPLISTEKNSPLEKEKSSARISATVSGLSDDKLRGLSTGSEGWEKKMKRKRSVGTMLSRGSDVDRDVKSAGQHRPANEVRPRSSDGLGYRHGVSAGALVGNKLDGTSQQNNIVSRILSKSDADYVAQPNERRERHPGVEKERTTLKGNKANSSDDMQNVSLNPLPKAKACRAPRTSSLAMNSSSNFQRSTGGSDEWEETPYPNKASPLGGMTNRKRSTHSNASSPPIAWVGQRPQKMSRTRRANVVSPVSNFDEALSEGSPLDTATRSAPIESGSVLLTKNTSTTKMDNISSPAGLSESEGSAVNESKSKEKAMHSGEVGNEGANAAHNAMGLIFSSNKNRIPLKEELEDGSIRRQGRSGRGAMHVKGCSPIPKEKLDTAETRKPTKGGRPGSEKNESKLGRPPMKKASDRKASSWHSQALNSDITDITGEPEDDQEELLAAVNAARSAIVSAYSGPFWKKMEPMLTFMSSENLSFLKNQINLVEELEVSMSCMSDGEHDIIASVGHRRMSKMEEHSSQGLVPSNFSPSSQQSKTNGVGEKGLVGCFSHGDESRTGPQKLEADKWFNEMAPMTHRLLSALIMEDDLPDSNGVQRDILVEFPNSHNPYTVNRYLENELQASAITSNFGLSVDFVHSNSTSVVHQSMCNGFTASSNFINSNSENSVHSENLSDGLNFTVYPESGPLHDLIPLTPRQCQNPGKDFPLSPYEYQYGQMSMEDKILIELQSIGICPETVPKLDDGEDEDINKMISELRKRLHDQVNQKKCRLHKLDKSIQDTKNIEERSLEQHAMNKLVERAYRKLKGGRIGSSHKAGVSKSANKAAKQLALAFAKRTLVRCHKFDETGKSCFSEPSLWSILSAPLPSSDSKCTEGVERLKHQKLDRTPFDQGGAKWKKVDRERDHNRDASAKGSGLKSGRHSSGGSGRSGERKNKTKPKQKLAQLSTSGNVLGRVVEPFSSPTVQEPPEPASEKKTQHPTRGASSSAAQRLTVDAGLPVLPGLDDILDVPEGLDGQGNDISSWFTDGLDDSLQDIDLSGALEIPDDDLTQLGFM

SEQ ID NO: 186536 - protein, 81 aa, Zea Mays
MFFRMMDKVHHHDNRIFLHPGYLVLIHPFCAPIILNAYGLQMENLLLLNEVAACSKILVRPLHLWSDPRPRMSMLCVCTNS

SEQ ID NO: 186537 - protein, 202 aa, Zea Mays
MVHRARYNDGDDIPPLVIGVSAPQGSGKTTLVFALDYLFRVAGRNSATLSIDDFYLTAKEQNELRDRNPANALLEFRGNAGSHDLQLSVETLESLIKLTKEGMKMKVPRYDKSAFGGRGDRADPSVWPEVEGPLEVVLFEGWMLGFKPLPNEVVKEVDPQLEVVNKNLEAYSDAWDRFIQSWIVIKIREPGSVYQWRLQRSL

SEQ ID NO: 186538 - protein, 152 aa, Zea Mays
MLGFKPLPNEVVKEVDPQLEVVNKNLEAYSDAWDRFIQSWIVIKIREPGSVYQWRLQCLDCQAEVAMRADGKPGMSDEEVCSLTKLLTILEQSLCYPSNLGALLMVLSCGFFGYGFCITLPTGIPCISANTVQRGAEWFESRSSAGHRHRRK

SEQ ID NO: 186539 - protein, 168 aa, Zea Mays
MKMKVPRYDKSAFGGRGDRADPSVWPEVEGPLEVVLFEGWMLGFKPLPNEVVKEVDPQLEVVNKNLEAYSDAWDRFIQSWIVIKIREPGSVYQWRLQAEVAMRADGKPGMSDEEVMDFVSRYLPAYHAYLPTLYKEGPNGSNPDHLLVIDIDENRNPICGGSWDISCL

SEQ ID NO: 186540 - protein, 252 aa, Zea Mays
MESKYRGKDDSEIDSDAQFVYSVRESLQLFLQASDLYDPEDVLDVIAESELWLEKAILYRKMGQENIVLQILALKLEDSEAAEQYCAEIGRDDAYIQLLGLYLDPQNGKEPMFTAAVRLLHNHGESLDPIQVLEKLSPDMPLQLASDTILRTLRARVHHHRQGQIVHNLSRATNLDVRLTRLEERSRHVQLTDESICDSCRARLGTKLFAMYPNDSVVCYRCYRSQQGESSSGHGRSMRKDVIFKQSWLVSR

SEQ ID NO: 186541 - protein, 580 aa, Zea Mays
MISFVHAQLGFLLFFDLRFEDAVNHFLLSETMQPSEVFPFIMRDPNRWSDLVPRKRYWGLHPPPKPLEEFIDDGLVTVQQALFLKKAGVDTVVDEDFLSNPPSRADLLELAIRNIIRYLCASRMKNLPSPEMEGVDTLLMYLYRALHLVDDMYNLASSQNSCIVDELESLLDDSGHLRTLAFLYGSKGMCSKALSIWRVLARNYSAGLWKDLSENDSCGTLVTKRSGEEIAAVEAAKILKALSDEDLVLEHLGWVADIDQDLAIAVLTSETRENQLSPEKVVASVDAEKVVIHQRYLQWLIEGQGCDDPHYHTSYALSLAKSAIEAVDMESKYRGKDDSEIDSDAQFVYSVRESLQLFLQASDLYDPEDVLDVIAESELWLEKAILYRKMGQENIVLQILALKLEDSEAAEQYCAEIGRDDAYIQLLGLYLDPQNGKEPMFTAAVRLLHNHGESLDPIQVLEKLSPDMPLQLASDTILRTLRARVHHHRQGQIVHNLSRATNLDVRLTRLEERSRHVQLTDESICDSCRARLGTKLFAMYPNDSVVCYRCYRSQQGESSSGHGRSMRKDVIFKQSWLVSR

SEQ ID NO: 186542 - protein, 637 aa, Zea Mays
MGSQPPASRAALEHLATLDPAALAGLPVSSPLTVRSAAVSAHLLYLGTGGGKLLLFSLQDPSTPEFLRLLPIGATLPVSAIVPLPSVARLLVLADGLLLLADPLLSRPVRRLGSLRSVTAVAARRVVLADPSSCSVAISVGKKLLRVDFTLHDADELDVQTREIASVEGVKALAWVDDSVFVATATGYSLYSSTNGQGVDIFSLPESAGHPRVKPLSGGDEVMLLVDNVGVVVDRFGQPVGSSLVFSTTPDYIAEVFPYVIVAGDSKVDVYRRRNAAHLQTIPVARTGQGVLIVAGDDDGIDTELVVIATTYKVFCYRKVSALEQIKASLRRKNYKEAISLLEEFESDGEISKDMISFVHAQLGFLLFFDLRFEDAVNHFLLSETMQPSEVFPFIMRDPNRWSDLVPRKRYWGLHPPPKPLEEFIDDGLVTVQQALFLKKAGVDTVVDEDFLSNPPSRADLLELAIRNIIRYLCASRMKNLPSPEMEGVDTLLMYLYRALHLVDDMYNLASSQNSCIVDELESLLDDSGHLRTLAFLYGSKGMCSKALSIWRVLARNYSAGLWKDLSENDSCGTLVTKRSGEEIAAVEAAKILKALSDEDLVLEHLGWVADIDQDLAIAVLTSETRENQLSPGCCFC

SEQ ID NO: 186543 - protein, 934 aa, Zea Mays
MGSQPPASRAALEHLATLDPAALAGLPVSSPLTVRSAAVSAHLLYLGTGGGKLLLFSLQDPSTPEFLRLLPIGATLPVSAIVPLPSVARLLVLADGLLLLADPLLSRPVRRLGSLRSVTAVAARRVVLADPSSCSVAISVGKKLLRVDFTLHDADELDVQTREIASVEGVKALAWVDDSVFVATATGYSLYSSTNGQGVDIFSLPESAGHPRVKPLSGGDEVMLLVDNVGVVVDRFGQPVGSSLVFSTTPDYIAEVFPYVIVAGDSKVDVYRRRNAAHLQTIPVARTGQGVLIVAGDDDGIDTELVVIATTYKVFCYRKVSALEQIKASLRRKNYKEAISLLEEFESDGEISKDMISFVHAQLGFLLFFDLRFEDAVNHFLLSETMQPSEVFPFIMRDPNRWSDLVPRKRYWGLHPPPKPLEEFIDDGLVTVQQALFLKKAGVDTVVDEDFLSNPPSRADLLELAIRNIIRYLCASRMKNLPSPEMEGVDTLLMYLYRALHLVDDMYNLASSQNSCIVDELESLLDDSGHLRTLAFLYGSKGMCSKALSIWRVLARNYSAGLWKDLSENDSCGTLVTKRSGEEIAAVEAAKILKALSDEDLVLEHLGWVADIDQDLAIAVLTSETRENQLSPEKVVASVDAEKVVIHQRYLQWLIEGQGCDDPHYHTSYALSLAKSAIEAVDMESKYRGKDDSEIDSDAQFVYSVRESLQLFLQASDLYDPEDVLDVIAESELWLEKAILYRKMGQENIVLQILALKLEDSEAAEQYCAEIGRDDAYIQLLGLYLDPQNGKEPMFTAAVRLLHNHGESLDPIQVLEKLSPDMPLQLASDTILRTLRARVHHHRQGQIVHNLSRATNLDVRLTRLEERSRHVQLTDESICDSCRARLGTKLFAMYPNDSVVCYRCYRSQQGESSSGHGRSMRKDVIFKQSWLVSR

SEQ ID NO: 186544 - protein, 69 aa, Zea Mays
MANAGPNTNGSQFFICTVKTPWLDGRHVVFGQVVEGMDIVRLIESQETDRGDRPKKKVVISECGELPVV

SEQ ID NO: 186545 - protein, 301 aa, Zea Mays
MICGGSYVREISFAFLIYPSARPQHHPILQQRDNKSPPLPLRIRISPSPSMAAAAAAATSFTTLAVARSAGQRSLLASKAAPSPLLSLRGARIPSQAVSFSGGLAASPSHSRARFATSASAEPKEADLQSKITNKVYFDISIGNPVGKNVGRIVIGLYGDDVPQTAENFRALCTGEKGFGYKGSSFHRVISDFMIQGGDFDKGNGTGGKSIYGRTFKDENFKLVHTGPGVVSMANAGPNTNGSQFFICTVKTPWLDGRHVVFGQVVEGMDIVRLIESQETDRGDRPKKKVVISECGELPVV

SEQ ID NO: 186546 - protein, 204 aa, Zea Mays
MAAAAAAATSFTTLAVARSAGQRSLLASKAAPSPLLSLRGARIPSQAVSFSGGLAASPSHSRARFATSASAEPKEADLQSKITNKVYFDISIGNPVGKNVGRIVIGLYGDDVPQTAENFRALCTGEKGFGYKGSSFHRVISDFMIQGGDFDKGNGTGGKSIYGRTFKDENFKLVHTGPGVVSMANAGPNTNGSQFFICTVKHQS

SEQ ID NO: 186547 - protein, 335 aa, Zea Mays
MASGTGSGQPQPAAADADPGAGDNKLVFETPLQPQPVREDYVENAVKFLSHPKVRGSPVVYRRSFLEKKGLTTQEIDEALRRVPDPEPITTATASPQQQVGSQNQSAGAQTYAPARSMHPATAGPVVRPRFSWLKSWIRNVVAQGDGAEGNQLKHRIDEETAEAVKASASAVSAIAKTNQQLLASKDEEKKILVTLTQALDSQAKELKSLTESINRTREPINITRDDRFSQHRPLEDHVPPVTRNGAINSSWRSSQQTNMYGVSHGDFGSARSASFVPAPAEPTAGSFSRSCAECGHWKNRNSYSVLRLLVTSISYPGGFPVLALGRVASVLHSV

SEQ ID NO: 186548 - protein, 132 aa, Zea Mays
MGDESLVEWARPLLSRALDTGDLEGLVDPRLEMKLDEVEMFRMVEAAAACIRHSASRRPRMSQVVRVLESSADIDLTNGVQPGQSQLFNVANAAEIRMFRRMVAGAQDDDSSDLTQYDWSRGSDAAPGSRIL

SEQ ID NO: 186549 - protein, 354 aa, Zea Mays
MQLFGIASNTATDTISRFLQRLLGEGGFGSVYKGRLPDYKDVAVKRLKDGGGQGEREFQAEVEIISRVHHRHLVSLVGYCISNDQRLLVYDFVSNNTLHYHLHGHGMPVLEWSARVKIAAGAARGIAYLHEDCHPRIIHRDIKSSNILLDNNFEAKVADFGLARLALDAVTHVTTRVMGTFGYMAPEYASSGKLTERSDVFSFGVVLLELITGRKPVDASRPMGDESLVEWARPLLSRALDTGDLEGLVDPRLEMKLDEVEMFRMVEAAAACIRHSASRRPRMSQVVRVLESSADIDLTNGVQPGQSQLFNVANAAEIRMFRRMVAGAQDDDSSDLTQYDWSRGSDAAPGSRIL

SEQ ID NO: 186550 - protein, 248 aa, Zea Mays
MPVLEWSARVKIAAGAARGIAYLHEDCHPRIIHRDIKSSNILLDNNFEAKVADFGLARLALDAVTHVTTRVMGTFGYMAPEYASSGKLTERSDVFSFGVVLLELITGRKPVDASRPMGDESLVEWARPLLSRALDTGDLEGLVDPRLEMKLDEVEMFRMVEAAAACIRHSASRRPRMSQVVRVLESSADIDLTNGVQPGQSQLFNVANAAEIRMFRRMVAGAQDDDSSDLTQYDWSRGSDAAPGSRIL

SEQ ID NO: 186551 - protein, 1171 aa, Zea Mays
MIKEAIEDWRRNQQDTEVNNRKTQVFQVNNIGGGGGFRDAKWKDIRVGDIVKVHKDEFFPADLVLLSSSYDDAICYVETMNLDGETNLKLKQSLEATSASLPPDDGASFGAFRGAVVRCEDPNAHLYTFVGNIEMDGRQHPLSPQQLLLRDSKLRNTDFVYGVVVFTGQDTKVMQNSMKVPSKRSNVEKKMDRVMYLLLFSLIVISVVSSVFFGIATRDHGRTMRRWYLRPDDTEIYYDPKRPAVAAVLHFFTAIMLYGYFIPISLYISIEIVKLLQALFINHDIHMYHEETDTPAHARTSNLNEELGQVDTILTDKTGTLTCNSMEFIKCSIAGTAYGRGVTEVERAMARKKGSAAAADNTDKAKNNGIQQQQHFLSSSSSDDNDDGDNNSKPAATKGFNFVDERVMGGNWVHQPRSDAIEMFFRLLAVCHTCIPEVDQESGKISYEAESPDEAAFVVAARELGFTFYKRTQTGVYLRELDPSSGKQVDRSYRILNVLEFNSARKRMSVIVKDEEGKLFLFTKGADNVMFERLSGSGSAHRDVTQQHINEYADAGLRTLVLAYRELKADEYAHFDRQFAAAKNSVSADRDEKIDEAADLVERDLLLLGATAVEDKLQNGVPECIDKLAQAGIKIWVLTGDKMETAINIGYACSLLRQGMKQITITLETADIAALEKGSDKAALTKASKDSVARQINEGKKLVNASSGESFALIIDGRSLTYALEDDAKDMFLDLAVGCGSVICCRSSPKQKALVTRLVKTGTGKVTLAIGDGANDVGMIQEADIGVGISGAEGMQAVMASDVSIAQFRFLERLLLVHGHWCYSRISSMICYFFYKNITFGVTLFLYDAYTSFSGQPLYNDWAMASFNVFFTSLPVVAMGVFDQDVSARFCLKFPMLYQEGPQDLLFQWRRIIGWMVNGVASAVIIFFLCTASLQHQAFRSGGEVADMATLGATAYTCIVWAVNLQMYITVSYFTLVQHVCIWLSVGLWYVFLPVYGAIAPSFSTTYYMVFVEALAGAPSYWVVTLLVSAASLVPYFTYAVVKSWFFPDYHNRIQWLRHRERAQGPPGPGDQRRRGAQPGPAPVLRPLHRRRRVGPARCHGRAPSPQTARRSVRTIRSHHPPQVSQSSSQQIDERKHSLESIHTNIDVNTVVHTTQEEGKTCKLVSTQQLA

SEQ ID NO: 186552 - protein, 585 aa, Zea Mays
MLDNVLIDSDAVSVLKGVYNHLLKFRDFLAWEAAVAMAVIEADSSIEKPQAAVENEAASVTEKPLAGGDKAKGDKKSKKKKTLGKGTSAVLMLLRDHVTNGSTVAAMNSASVAEWATSLSLLFDPKCPGLESLVEKVKEIVESNEVRRLPKIPKGTRDFGKEQMAIRERAFSIITSVFKMHGATALDTPVFELRETLMGKYGEDSKLIYDLADQGGELCSLRYDLTVPFARYVAMNSISALKRYQIAKVYRRDNPSKGRYREFYQCDFDIAGVYEPMEPDFEVIKVLTELLNQLDIGTYEIKLNHRKLLDGMLEICGVPPQKFRTVCSSIDKLDKQTFEQVKKELVDEKGISNETADEIGNLVKTRGPPLEVLMELRKEGSKFMNNVGSVAALNELEILFKALDKANAISKITFDLSLARGLDYYTGVIYEAVFKGAAQVGSIAAGGRYDNLVGMFSGKQIPAVGVSLGIERVFAIMEQQEKERNEIRPTETEVLVSILGKDLTLAAELVSELWNAGIKAEFKLTTRVANHIKYALQSSIPWMVLVGESELQKGTVKLKDVEANQEEEVDRKDFVRELKKRLSKS

SEQ ID NO: 186553 - protein, 541 aa, Zea Mays
MLDNVLIDSDAVSVLKGVYNHLLKFRDFLAWEAAVAMAVIEADSSIEKPQAAVENEAASVTEKPLAGGDKAKGDKKSKKKKTLGLESLVEKVKEIVESNEVRRLPKIPKGTRDFGKEQMAIRERAFSIITSVFKMHGATALDTPVFELRETLMGKYGEDSKLIYDLADQGGELCSLRYDLTVPFARYVAMNSISALKRYQIAKVYRRDNPSKGRYREFYQCDFDIAGVYEPMEPDFEVIKVLTELLNQLDIGTYEIKLNHRKLLDGMLEICGVPPQKFRTVCSSIDKLDKQTFEQVKKELVDEKGISNETADEIGNLVKTRGPPLEVLMELRKEGSKFMNNVGSVAALNELEILFKALDKANAISKITFDLSLARGLDYYTGVIYEAVFKGAAQVGSIAAGGRYDNLVGMFSGKQIPAVGVSLGIERVFAIMEQQEKERNEKIRPTETEVLVSILGKDLTLAAELVSELWNAGIKAEFKLTTRVANHIKYALQSSIPWMVLVGESELQKGTVKLKDVEANQEEEVDRKDFVRELKKRLSKS

SEQ ID NO: 186554 - protein, 66 aa, Zea Mays
MHPDSNCNGLDMVGKITRLSNQPNWFHPKIHPESTGIVETCQRSDSFLVLQHRLLGRWAVYRVGAH

SEQ ID NO: 186555 - protein, 64 aa, Zea Mays
MICCWCELAFIPATGIDGREGYCFCRRGPGGVAWPGFAMLLGFSPLVISAALKFMVIISETPIM

SEQ ID NO: 186556 - protein, 96 aa, Zea Mays
MRQTLRDFGYNLSKVPLLCDNESAIRMAENPIEHSRTKHIDIRHHFLRDHQQKGDIEVFHVSTENQLADIFTKPLDEKTFCRLRSELNVLDSRNLD

SEQ ID NO: 186557 - protein, 325 aa, Zea Mays
MRTMAIGDVRPQEHLEQDQPSSSTIVHPPTQDDEQVPQVEAGDQGGAQDDHVMEEKAQPAPPTQVRAMIQRDHPVDQILGDISKGVTTRSRLVNFCEHYSFVSSIEPFRVEEALLDPDWVLAMQEELNNFKRNEVWTLVPRSEAKCCGNQVGCFRNKQDEHGVVTRNKARLVAKGYAQVAGLDFEETFAPVARLESIRILLAYAAHHSFRLYQMDVKSAYLNGPIKEEVYVEQPPGFEDERYPDHVCKLSKALYGLKQAPRAWYECLRDFLIANAFKVGKADPTLFTKTCDGDLFVCQIYVDDIIFGSTNQKSCEEFSRVMTQKF

SEQ ID NO: 186558 - protein, 209 aa, Zea Mays
MKNLHKLLKGEHVIGLTNVQFEKDRSCAACQAGKQVGGSHHTKNVMTTSRPLEMLHMDLFGPVAYLSIGGSKYGLVIVDDFSRFTWVFFLQEKSETQGTLKRFLRRSQNEFELKVKKIRSDNGSEFKNLQVEEFLEEEGIKHEFSAPYTPQQNGVVERKNRTLIDMARTMLGEFKTPERFWSEAVNTACHAINRVYLHRLLKKTSYELL

SEQ ID NO: 186559 - protein, 93 aa, Zea Mays
MDPKGKGIVINDKEKESFVNEPRDDKSNDSGSGHRRKDGKKKKTRRIKEIIYYDDSDESTSSQKDGDNDYKKTVNSNFSFDYSRIQHSSNSHL

SEQ ID NO: 186560 - protein, 132 aa, Zea Mays
MVAVLCFPFSASTPSGRALTSSSSHERRRLLSLFLPQLHHAVKFPCAHRAPYAYHSSNSGVNAPCSCCLECSSISPPWPLPFGDPNYVPMCVESQQSNWVSGRVTAPCIACVVLDVMAELEIIAVLVAFELD

SEQ ID NO: 186561 - protein, 95 aa, Zea Mays
MKTSIFALQSDLYTLVDGFVTRNSARTNPSNPSIELGPEFKKVGSFLGRFKSIPSIVELDSLKVSGDVWFGSRIVLKVHLPKLQNSYNIHIGVFG

SEQ ID NO: 186562 - protein, 51 aa, Zea Mays
MEQVRCRAPSAGVACRAPSAGVAVGDKKKIYNICGDWYRVDVWSKYDCSRL

SEQ ID NO: 186563 - protein, 57 aa, Zea Mays
MCSTESGLKKKPAGEGVDWICRRDYSLTRLHSGWCWLGVVLRGTGVFLGSLGHRRKP

SEQ ID NO: 186564 - protein, 344 aa, Zea Mays
MMTTQGGLPPTSNEANLCTNDNGSQLGTRIVDEIMAGKNVFFDLPDKLTGEIWTLKFHCMGAQPRKEIVTLNIDKAYVAFYNVVYIKSKLGYSERDFLFYKKRCGIDRSRLVALDYIHQEEAMISDNVDERKISFVLTKDPPSDLEVSITPIKRPRQQTNVDEENIEVLIDAYKEWLAILQHDNPETDNDGVFKKEGRGTLKGIVAATKRIKNGDHKLKIEFSSKLGGPVGPNTRTFVDEIVLFTKKKAPLIGVKKWKDIELNVRSSIASHVLRRWEFPRNEDAREKIWSIAKERYKGWRSALSSTYKAYNNYAERMKNKPKDVDIVEWHYLMLYFGSEKFHVR

SEQ ID NO: 186565 - protein, 474 aa, Zea Mays
MMMMTRWSSTDMKRRNRILANMVPIRNLSLPDYYEYEEEYHPVSREATRGVCILLRIDRYLSSIGRSIQDREVLRDFCQRLLFPQREAGHSFSEIYDDIRAHGVEASRLGQPLRDLYDEMERNGEIVNNGSIIIPGGGGPVTESPLDQFGIHPILDLNIGKYYVSFTNLSLSMLLTLGLVLLLVFVVTKKGGGKSVPNAFQSLVELIYDFVPNLVNEQIGGLSGNVKHKFFPCISVTFTFSLFRNPQGHPDKGTERVDMGLFLIKAYIGGWYDNLSKMGNSNDSFRFVEPCFGLWFDGCLDFSAMIFPVVHIGAIAVSFLFVVMMFNIQIAEIHEEVLRYLPVSGIIGLIFWWEMFFILDNETIPLLPTHRNTTSLKYTVYAGKVRSWTNLETLGNLLYTYYSVWFLVSSLILLVAMIGAIVLTMHRTTKVKRQDVFRRNALDSRRTTIHIQNRRFFSHKGDDAPVPPADPESI

SEQ ID NO: 186566 - protein, 59 aa, Zea Mays
MSLIQFCLFLRIMSLFYQPNLGKDCPIFFLNLMPLVSSYLSKAYQLNLMIIFPPYLVRY

SEQ ID NO: 186567 - protein, 51 aa, Zea Mays
MIFMTFISMHSIIICVVLPWRTYEMHPTLSLKTGCDRSGIGGNVDCRTKPR

SEQ ID NO: 186568 - protein, 118 aa, Zea Mays
MRVVLELKVFLGEGDWYMRPLRLDEGSLHSNMLYPSLCLLLLLLISWFKLEWPMVGSTNFVAEGATAWVPSEAIVTEVSSPEVGANIGHLFSNVVNQEQGNTKLLRTFVLRSIASFRI

SEQ ID NO: 186569 - protein, 57 aa, Zea Mays
MIKDYLNWPHALEMGQGKLEPDYSIREKTTAHWAWEMVGVACTLLAGGWMEEYCAPG

SEQ ID NO: 186570 - protein, 91 aa, Zea Mays
MLMAQIHHGSERNLIPLPQETTTSARAVRHGRRAQRARLTEALRLKMDQVPIPLIEYSKNLLHSKYSSRREIQGSCFSKQLRAFEILLKLF

SEQ ID NO: 186571 - protein, 77 aa, Zea Mays
MNLSSSLASAYTEASTPIWARRAPSLFAKAKTRLSSFLAGYEDGSMRTEMNSPSFSELLKDVLLANASHQYAGNRVG

SEQ ID NO: 186572 - protein, 452 aa, Zea Mays
MPVLIGLLYLNTRRTLLEKYNLLAVGSSHGALIDPKDQFMYRTGDGKYNDPDNAEAGSQYTFFGRNMKPVDQEYELMSPDPFVVATKLLARREYKDTGKQFNILAAAWIQFMVHDWMDHMEDTKQIEITAPNEVANKCPLKSFKFYATKELPTNSDGTIKTGYYNVRTAWWDGSAIYGNNDKKAEKLRTYVDGKLVIGDDGLLLHEENGVALLGDVRNSWVGVSILQALFVKEHNAVCDAIKEEHPNLSDEELYRYARLVTSAVIAKVHTIDWTVELLKTKTMRAGMRANWYGLLGKKIKDTFGHIGGPALGGLVGLKKPINHGVPYSLTEEFTSVYRMHSLLPSTLKLRDPTGQPDANNSPPYLKDVDIGELVGLKGEGQLSKIGFEMEILSMGYQACGALELWNYPSFFRDLIPQNLDGTNRSDRIDLAALEEIGREVYRGTMSSGEDYF

SEQ ID NO: 186573 - protein, 154 aa, Zea Mays
MLLSLSSLQLGRPAWSLPQPSPSWFSAGRAPLHGRPGLFPMVADPMPSSPPCPNSEGSRLYSPCHGDLAFTASISSPSRRRLPLSFSLLQRLAPSFSQPWTTMSLYSFPMAMHLSVAARSQRRRPSGNWDEVECFSTSSTRCSVKGPSQKSLSF

SEQ ID NO: 186574 - protein, 166 aa, Zea Mays
MEHQPISSPATRLPHGALHAPLSLISATWTASMELAPALSLLVLCWSRSSPWAPRSLPHGGRPYAQLAPMSEFRRQPSLLPLPWRPRLHCIYFFSKPTSSPSIFLSAAAPSALIFPAMDNNVPLLLPHGYAPLCSSTFATPSTLGMALRVIGMKWNVSAHHPPGVR

SEQ ID NO: 186575 - protein, 321 aa, Zea Mays
MDALKFEYPDYERLSKGAEWPKRKRVVSVMKRQAARMIEEDEKALKKKKSSPKPKVAVPKKRKVAAAKPKTTDIEEEIPSTPLAADVEEILKLMTESLPLKLSPLGPQLMKLLQKKEEPTAIKKPVEKRRRIITVIDAIEETPPSASASKTPTVEAAPTEATTAEVAAAEATNLESAFFVIDKMILDMATEETVATAEETLATVLGKGEKVFNKEKKITEDILEEEDFNFQNMIGQELSKTEKEELRDYAISCGYQPGALLFGGVDEESLGCLRDRTRAKVVSTLSKIVGFLKLEADLSRYRRQHIADSLFYSNFKVKFLP

SEQ ID NO: 186576 - protein, 731 aa, Zea Mays
MAANNNPWRVPMPPLLNVRAGFGDTSLFSTSLPVLPHEKLIFSHSSHGTPSKDDASAKMKVLADDPDEKDYKFDFDLRQIDDLLPDEDEFFAGITDETEPIGQTNTTEELEEFDVFGNGGGMELDIDPVETITVSFANSSIVDGARGNGINPFGVPNTVGTVAGEHPFGEHPSRTLFVRNINSNVEDSELRSLFEQYGDIRTLYTATKHRGFVMISYFDIRAARNAMRALQNKPLRRRKLDIHFSIPKENPSDKDLNQGTLVIFNLDPSVSNEEVRQIFGAYGEVKEIRETPNKKHHKFIEFYDVRAAEAALRSLNKSEIAGKRIKLEPSRPGGTRRNLMQQLGHDLDQEEPRSYRHPHVGSPIANSPPGAWAHYSSPTDNNMLQAFTRSPTGNGMSPIGMPSLISNAPKIAPIGKDSNRSKYDQVFSNGNQSLGAAFQHSHSYQDHNSEQMSSSPGTLSGPQFLWGSPKPYSEHSKSPIWRPPANGPALSSSSRTQGQGFLYSSRQASLFGSLDQHHHHVGSAPSGAPFENHFGFLSESPETSYMKQLKFGNMGNVGIGRNGGGLMLGMASHASVNPGSSLIGSLTDNVSSSFRPILSPRLGQAFYTNPPYHGPGTFGLDSSIDHARNRRVDSSVLQADSKRQYLLDLEKIRRGDDTRTTLMIKNIPNKCSWLQLMSFTKEFMTSSTCQLISRTNAMLDMRSLTWYHRCTLYPSTRLLMVRNGRSSTVRR

SEQ ID NO: 186577 - protein, 384 aa, Zea Mays
MSSWQALKRSTDNQGFQIWIDKLRLWLKEQTYADNSLLLIESSSWDKLSSDQLPDADVPIWIAAQRAVSRYEGILSPVGPRGRLLRRLLKWTGLIPSLPEATIKSNNETKHLEGHVRPNFLPRITLANIWEPASRESCNNNIWEMVKASFRILFGRSTLQEPAFQELILLYTDEVVPSETKDEMVPLQLKIYERIPIPDLPVVFPHKKLSFRILDTVRLDIATVIGQLFLLDIVAGTALVILVFRVALGYKQTRDRYQLLVNKTLYEKTLASGFGSVYFLLDASEQQQYKEALLAYAMLLCRKKYEVSSRASIRDACEQFMHEKFEAKIEMPIDKAMETLLRLGLVIELPTDGGSSVIGLPCSEAYRILKSRWDGLLEQDTEQG

SEQ ID NO: 186578 - protein, 493 aa, Zea Mays
MLLLRANALAAVPVSFSITPAASYSCFPWPSSSTTAASCSVGSSARLDAAVQYDPLRPGSDAWAHPDGMVTAEGDEEKQRYDTEGESNDWEGEGPQGSSDPEGINVPRQRYIAVPKEALLDAVLSQFASDDDDAADFKRCARCLDAILHAEHKRMLEEMRTSYMLTQRHRDEEEEQDDTDTASGSDYVNGKAGSGFFGITQLDGTLFLTRSVDLRTLLGLTPDPDSQTRVAFATQFQRSFMTLLRNAQFEELSAQDLLLTYALNNDYLLTLPIYVDWKKAAQSNAIIFRRGYATERQKGLLLVEKLDYLQSKLLQNVFFSLSKPLKKPGKWLNEALKRSTDNQGFQIWIDKLRLWLKEQTYADNSLLLIESSSWDKLSSDQLPDADVPIWIAAQRAVSRYEGILSPVGPRGRLLRRLLKWTGLIPSLPEATIKSNNETKHLEGHVRPNFLPRITLANIWEPASRESCNNNIWEMVKASFRILFGRSTLQHSRS

SEQ ID NO: 186579 - protein, 397 aa, Zea Mays
MSSWQALKRSTDNQGFQIWIDKLRLWLKEQTYADNSLLLIESSSWDKLSSDQLPDADVPIWIAAQRAVSRYEGILSPVGPRGRLLRRLLKWTGLIPSLPEATIKSNNETKHLEGHVRPNFLPRITLANIWEPASRESCNNNIWEMVKASFRILFGRSTLQEPAFQELILLYTDEVVPSETKDEMVPLQLKIYERIPIPDLPVVFPHKKLSFRILDTVRLDIATVIGQLFLLDIVAGTALVILVFRVALGYKQTRDRYQLLVNKTLYEKTLASGFGSVYFLLDASEQQQYKEALLAYAMLLCRKKYEVSSRASIRDACEQFMHEKFEAKVKDDGYIIVSVLMIEMPIDKAMETLLRLGLVIELPTDGGSSVIGLPCSEAYRILKSRWDGLLEQDTEQG

SEQ ID NO: 186580 - protein, 711 aa, Zea Mays
MLLLRANALAAVPVSFSITPAASYSCFPWPSSSTTAASCSVGSSARLDAAVQYDPLRPGSDAWAHPDGMVTAEGDEEKQRYDTEGESNDWEGEGPQGSSDPEGINVPRQRYIAVPKEALLDAVLSQFASDDDDAADFKRCARCLDAILHAEHKRMLEEMRTSYMLTQRHRDEEEEQDDTDTASGSDYVNGKAGSGFFGITQLDGTLFLTRSVDLRTLLGLTPDPDSQTRVAFATQFQRSFMTLLRNAQFEELSAQDLLLTYALNNDYLLTLPIYVDWKKAAQSNAIIFRRGYATERQKGLLLVEKLDYLQSKLLQNVFFSLSKPLKKPGKWLNEALKRSTDNQGFQIWIDKLRLWLKEQTYADNSLLLIESSSWDKLSSDQLPDADVPIWIAAQRAVSRYEGILSPVGPRGRLLRRLLKWTGLIPSLPEATIKSNNETKHLEGHVRPNFLPRITLANIWEPASRESCNNNIWEMVKASFRILFGRSTLQEPAFQELILLYTDEVVPSETKDEMVPLQLKIYERIPIPDLPVRLDIATVIGQLFLLDIVAGTALVILVFRVALGYKQTRDRYQLLVNKTLYEKTLASGFGSVYFLLDASEQQQYKEALLAYAMLLCRKKYEVSSRASIRDACEQFMHEKFEAKVKDDGYIIVSVLMIEMPIDKAMETLLRLGLVIELPTDGGSSVIGLPCSEAYRILKSRWDGLLEQDTEQG

SEQ ID NO: 186581 - protein, 499 aa, Zea Mays
MRGPIPTAWSPRRVTRRNSAMTRRGSPTTGKGKGPKDHQTPRASTCRASATSPSPRRPSSMLSSRSSRPTTTTPRTSSAAPGAIHSLLLYYVTCHFVNNLPLITSFPPFLRCLDAILHAEHKRMLEEMRTSYMLTQRHRDEEEEQDDTDTASGSDYVNGKAGSGFFGITQLDGTLFLTRSVDLRTLLGLTPDPDSQTRVAFATQFQRSFMTLLRNAQFEELSAQDLLLTYALNNDYLLTLPIYVDWKKAAQSNAIIFRRGYATERQKGLLLVEKLDYLQSKLLQNVFFSLSKPLKKPGKWLNEALKRSTDNQGFQIWIDKLRLWLKEQTYADNSLLLIESSSWDKLSSDQLPDADVPIWIAAQRAVSRYEGILSPVGPRGRLLRRLLKWTGLIPSLPEATIKSNNETKHLEGHVRPNFLPRITLANIWEPASRESCNNNIWEMVKASFRILFGRSTLQEPAFQELILLYTDEVVPSETKDEMVPLQLKIYERIPIPDLP

SEQ ID NO: 186582 - protein, 52 aa, Zea Mays
MQGQLHSEWQICDGIKHGPISQVKNKVLIKKSWKKNRGAFKGYMFAILSINS

SEQ ID NO: 186583 - protein, 1142 aa, Zea Mays
MHTEVGYGESNATSQFDSRATAEGYGDRSADAQVEYTDPRYLESLYPGWKYDEATHQWYQVDTLNTQTYAARDTGGAVADLASGGSVQQHQQFSGSYIQNTSHPEPALELTEPTSESKPQLEPAAAPPQTDAYPAVASHKEEQKEHGSVPVHTKPEAQEIPANAGDTATVTEGGSPGSEKGIHTAVKQVQWNDFGASTGGADLFGDLLPDGAEDDFFEGTVPVSQDVSSLVGATNVSAPDHSFSAGVYNTAMISAGHSFSDGVDKNANSHFGPSGSSAGYGDQSTNAQLGSTDPKYLESLYPGWKYDEATQQWYQVDTHSAQSYVADNTGAVVAVGSDNTQQHQQQFSASYLQNNLHAALETIAEESSTNAMSWVQGGTNTGPPEYPPNMLFYAEYPGWYFDTNTQQWQTLESYQQSVAHVATTAAASDGFAGTCHNVAHYTEDSYASSYNQQSQWQPDSFGNTMQADVLGGKSLLGNQSWYSGLEHSTSKELRYKGFEPSTGFQTSRKEFQPPKDHQAGHMADEPLTRYGYGSSNGVVNTQNFVPKEGMHKTQMHDDSTAHTYAASNYWGTQTSMGSAQQQLTGTNGPSQQFGFSPHEQRSSAGRPPHTVVSFGFGGKLVVLKETSSMAANFDSGNQGNSGRTVSVLNIPEIVADKIDHSSIANGGAFSYFHALCRHPIPGPLVGGSAASKDLNKWLDDMSGVYESSQTEFQGGDVQKVLISLLKILCQHYGKLRSSFGSDPSQEGIDGPEMAVTKLFSSCKSSANMKGYGAVVHCMRNLPSESQIQTTAQEVQSLLVSGRRKEALHQAQEGHLWGPALILALQLGDKFYADTVKKMAHCHFVSGSPLRTLCLLIAGQPADVFSFENPVNSGLSSPQQPVEAAPKGMLDDWQENLAIITANRTKGDDLVITRLGDCLWEEKNEVASAHSCYLVAELNIDSYSGSARMCLIGADHLRCPRTFTSPEAIQRTEVYEYAKVLGNSQYILLPFQPYKLIYAYMLAEVGKISDSLKYCQASLKVLKSSGRAPELEAWKQLFITLEDRIRTHQQGGYATNLAPGKIVGKLFTSLDKSLSRMMGTQSAPLPQLPQGAANERGKLHITEVFLNQTSAKPPNSRVLLYQVRHRAHQVQAVHALDGWCRRQ

SEQ ID NO: 186584 - protein, 788 aa, Zea Mays
MHTEVGYGESNATSQFDSRATAEGYGDRSADAQVEYTDPRYLESLYPGWKYDEATHQWYQVDTLNTQTYAARDTGGAVADLASGGSVQQHQQFSGSYIQNTSHPEPALELTEPTSESKPQLEPAAAPPQTDAYPAVASHKEEQKEHGSVPVHTKPEAQEIPANAGDTATVTEGGSPGSEKGIHTAVKQVQWNDFGASTGGADLFGDLLPDGAEDDFFEGTVPVSQDVSSLVGATNVSAPDHSFSAGVYNTAMISAGHSFSDGVDKNANSHFGPSGSSAGYGDQSTNAQLGSTDPKYLESLYPGWKYDEATQQWYQVDTHSAQSYVADNTGAVVAVGSDNTQQHQQQFSASYLQNNLHAALETIAEESSTNAMSWVQGGTNTGPPEYPPNMLFYAEYPGWYFDTNTQQWQTLESYQQSVAHVATTAAASDGFAGTCHNVAHYTEDSYASSYNQQSQWQPDSFGNTMQADVLGGKSLLGSSYGSNQQAGNQIGQQANVDSLNHEPHVNTFMPSTGNQSWYSGLEHSTSKELRYKGFEPSTGFQTSRKEFQPPKDHQAGHMADEPLTRYGYGSSNGVVNTQNFVPKEGMHKTQMHDDSTAHTYAASNYWGTQTSMGSAQQQLTGTNGPSQQFGFSPHEQRSSAGRPPHTVVSFGFGGKLVVLKETSSMAANFDSGNQGNSGRTVSVLNIPEIVADKIDHSSIANGGAFSYFHALCRHPIPGPLVGGSAASKDLNKWLDDMSGVYESSQTEFQGGDVQKVLISLLKILCQHYGKLRSSFGSDPSQEMAQRWQ

SEQ ID NO: 186585 - protein, 1050 aa, Zea Mays
MHTEVGYGESNATSQFDSRATAEGYGDRSADAQVEYTDPRYLESLYPGWKYDEATHQWYQVDTLNTQTYAARDTGGAVADLASGGSVQQHQQFSGSYIQNTSHPEPALELTEPTSESKPQLEPAAAPPQTDAYPAVASHKEEQKEHGSVPVHTKPEAQEIPANAGDTATVTEGGSPGSEKGIHTAVKQVQWNDFGASTGGADLFGDLLPDGAEDDFFEGTVPVSQDVSSLVGATNVSAPDHSFSAGVYNTAMISAGHSFSDGVDKNANSHFGPSGSSAGYGDQSTNAQLGSTDPKYLESLYPGWKYDEATQQWYQVDTHSAQSYVADNTGAVVAVGSDNTQQHQQQFSASYLQNNLHAALETIAEESSTNAMSWVQGGTNTGPPEYPPNMLFYAEYPGWYFDTNTQQWQTLESYQQSVAHVATTAAASDGFAGTCHNVAHYTEDSYASSYNQQSQWQPDSFGNTMQADVLGGKSLLGSSYGSNQQAGNQIGQQANVDSLNHEPHVNTFMPSTGNQSWYSGLEHSTSKELRYKGFEPSTGFQTSRKEFQPPKDHQAGHMADEPLTRYGYGSSNGVVNTQNFVPKEGMHKTQMHDDSTAHTYAASNYWGTQTSMGSAQQQLTGTNGPSQQFGFSPHEQRSSAGRPPHTVVSFGFGGKLVVLKETSSMAANFDSGNQGNSGRTVSVLNIPEIVADKIDHSSIANGGAFSYFHALCRHPIPGPLVGGSAASKDLNKWLDDMSGVYESSQTEFQGGDVQKVLISLLKILCQHYGKLRSSFGSDPSQEGIDGPEMAVTKLFSSCKSSANMKGYGAVVHCMRNLPSESQIQTTAQEVQSLLVSGRRKEALHQAQEGHLWGPALILALQLGDKFYADTVKKMAHCHFVSGSPLRTLCLLIAGQPADVFSFENPVNSGLSSPQQPVEAAPKGMLDDWQENLAIITANRTKGDDLVITRLGDCLWEEKNEVASAHSCYLVAELNIDSYSGSARMCLIGADHLRCPRTFTSPEAIQRTEVYEYAKVLGNSQYILLPFQPYKLIYAYMLAEVGKISDSLNAL

SEQ ID NO: 186586 - protein, 1467 aa, Zea Mays
MHTEVGYGESNATSQFDSRATAEGYGDRSADAQVEYTDPRYLESLYPGWKYDEATHQWYQVDTLNTQTYAARDTGGAVADLASGGSVQQHQQFSGSYIQNTSHPEPALELTEPTSESKPQLEPAAAPPQTDAYPAVASHKEEQKEHGSVPVHTKPEAQEIPANAGDTATVTEGGSPGSEKGIHTAVKQVQWNDFGASTGGADLFGDLLPDGAEDDFFEGTVPVSQDVSSLVGATNVSAPDHSFSAGVYNTAMISAGHSFSDGVDKNANSHFGPSGSSAGYGDQSTNAQLGSTDPKYLESLYPGWKYDEATQQWYQVDTHSAQSYVADNTGAVVAVGSDNTQQHQQQFSASYLQNNLHAALETIAEESSTNAMSWVQGGTNTGPPEYPPNMLFYAEYPGWYFDTNTQQWQTLESYQQSVAHVATTAAASDGFAGTCHNVAHYTEDSYASSYNQQSQWQPDSFGNTMQADVLGGKSLLGSSYGSNQQAGNQIGQQANVDSLNHEPHVNTFMPSTGNQSWYSGLEHSTSKELRYKGFEPSTGFQTSRKEFQPPKDHQAGHMADEPLTRYGYGSSNGVVNTQNFVPKEGMHKTQMHDDSTAHTYAASNYWGTQTSMGSAQQQLTGTNGPSQQFGFSPHEQRSSAGRPPHTVVSFGFGGKLVVLKETSSMAANFDSGNQGNSGRTVSVLNIPEIVADKIDHSSIANGGAFSYFHALCRHPIPGPLVGGSAASKDLNKWLDDMSGVYESSQTEFQGGDVQKVLISLLKILCQHYGKLRSSFGSDPSQEGIDGPEMAVTKLFSSCKSSANMKGYGAVVHCMRNLPSESQIQTTAQEVQSLLVSGRRKEALHQAQEGHLWGPALILALQLGDKFYADTVKKMAHCHFVSGSPLRTLCLLIAGQPADVFSFENPVNSGLSSPQQPVEAAPKGMLDDWQENLAIITANRTKGDDLVITRLGDCLWEEKNEVASAHSCYLVAELNIDSYSGSARMCLIGADHLRCPRTFTSPEAIQRTEVYEYAKVLGNSQYILLPFQPYKLIYAYMLAEVGKISDSLKYCQASLKVLKSSGRAPELEAWKQLFITLEDRIRTHQQGGYATNLAPGKIVGKLFTSLDKSLSRMMGTQSAPLPQLPQGAANERGVYSSPDTKVVNSQSVMSMAPLVSSASEQSMSEIGGNSVYGREVAHNRSISEPDFGKTPQQGAAVSSKAQSTSGSGSSRFGWLVQKTIGLVSKSHRQAKLGEQNKFYYDEKLKRWVEEGAEIPAEEPPLPPPPTKVPFQNSVPDPNSNAPPTGGGYSSNPPEPSSGMPPMPPTQNQFSARGRMGVRSRYVDTFNKGGGGGGANAFGVATSYSKPAAPSIETARQDESSSSPAMETSFSSPPSLIQMQSSIPRYPSMDNVSSPTGSINSSMSRSRASSWSGTYPEQLSSTAASRSPDGQMTQSPSMPGRRPPHSRSNSASSSAQLNGLGEDLHEVEL

SEQ ID NO: 186587 - protein, 1185 aa, Zea Mays
MHTEVGYGESNATSQFDSRATAEGYGDRSADAQVEYTDPRYLESLYPGWKYDEATHQWYQVDTLNTQTYAARDTGGAVADLASGGSVQQHQQFSGSYIQNTSHPEPALELTEPTSESKPQLEPAAAPPQTDAYPAVASHKEEQKEHGSVPVHTKPEAQEIPANAGDTATVTEGGSPGSEKGIHTAVKQVQWNDFGASTGGADLFGDLLPDGAEDDFFEGTVPVSQDVSSLVGATNVSAPDHSFSAGVYNTAMISAGHSFSDGVDKNANSHFGPSGSSAGYGDQSTNAQLGSTDPKYLESLYPGWKYDEATQQWYQVDTHSAQSYVADNTGAVVAVGSDNTQQHQQQFSASYLQNNLHAALETIAEESSTNAMSWVQGGTNTGPPEYPPNMLFYAEYPGWYFDTNTQQWQTLESYQQSVAHVATTAAASDGFAGTCHNVAHYTEDSYASSYNQQSQWQPDSFGNTMQADVLGGKSLLGSSYGSNQQAGNQIGQQANVDSLNHEPHVNTFMPSTGNQSWYSGLEHSTSKELRYKGFEPSTGFQTSRKEFQPPKDHQAGHMADEPLTRYGYGSSNGVVNTQNFVPKEGMHKTQMHDDSTAHTYAASNYWGTQTSMGSAQQQLTGTNGPSQQFGFSPHEQRSSAGRPPHTVVSFGFGGKLVVLKETSSMAANFDSGNQGNSGRTVSVLNIPEIVADKIDHSSIANGGAFSYFHALCRHPIPGPLVGGSAASKDLNKWLDDMSGVYESSQTEFQGGDVQKVLISLLKILCQHYGKLRSSFGSDPSQEGIDGPEMAVTKLFSSCKSSANMKGYGAVVHCMRNLPSESQIQTTAQEVQSLLVSGRRKEALHQAQEGHLWGPALILALQLGDKFYADTVKKMAHCHFVSGSPLRTLCLLIAGQPADVFSFENPVNSGLSSPQQPVEAAPKGMLDDWQENLAIITANRTKGDDLVITRLGDCLWEEKNEVASAHSCYLVAELNIDSYSGSARMCLIGADHLRCPRTFTSPEAIQRTEVYEYAKVLGNSQYILLPFQPYKLIYAYMLAEVGKISDSLKYCQASLKVLKSSGRAPELEAWKQLFITLEDRIRTHQQIVGKLFTSLDKSLSRMMGTQSAPLPQLPQGAANERGVYSSPDTKVVNSQSVMSMAPLVSSASEQSMSEIGGNSVYGREVAHNRSISEPDFGKTPQQVLVS

SEQ ID NO: 186588 - protein, 1426 aa, Zea Mays
MHTEVGYGESNATSQFDSRATAEGYGDRSADAQVEYTDPRYLESLYPGWKYDEATHQWYQVDTLNTQTYAARDTGGAVADLASGGSVQQHQQFSGSYIQNTSHPEPALELTEPTSESKPQLEPAAAPPQTDAYPAVASHKEEQKEHGSVPVHTKPEAQEIPANAGDTATVTEGGSPGSEKGIHTAVKQVQWNDFGASTGGADLFGDLLPDGAEDDFFEGTVPVSQDVSSLVGATNVSAPDHSFSAGVYNTAMISAGHSFSDGVDKNANSHFGPSGSSAGYGDQSTNAQLGSTDPKYLESLYPGWKYDEATQQWYQVDTHSAQSYVADNTGAVVAVGSDNTQQHQQQFSASYLQNNLHAALETIAEESSTNAMSWVQGGTNTGPPEYPPNMLFYAEYPGWYFDTNTQQWQTLESYQQSVAHVATTAAASDGFAGTCHNVAHYTEDSYASSYNQQSQWQPDSFGNTMQADVLGGKSLLGSSYGSNQQAGNQIGQQANVDSLNHEPHVNTFMPSTGNQSWYSGLEHSTSKELRYKGFEPSTGFQTSRKEFQPPKDHQAGHMADEPLTRYGYGSSNGVVNTQNFVPKEGMHKTQMHDDSTAHTYAASNYWGTQTSMGSAQQQLTGTNGPSQQFGFSPHEQRSSAGRPPHTVVSFGFGGKLVVLKETSSMAANFDSGNQGNSGRTVSVLNIPEIVADKIDHSSIANGGAFSYFHALCRHPIPGPLVGGSAASKDLNKWLDDMSGVYESSQTEFQGGDVQKVLISLLKILCQHYGKLRSSFGSDPSQEGIDGPEMAVTKLFSSCKSSANMKGYGAVVHCMRNLPSESQIQFYADTVKKMAHCHFVSGSPLRTLCLLIAGQPADVFSFENPVNSGLSSPQQPVEAAPKGMLDDWQENLAIITANRTKGDDLVITRLGDCLWEEKNEVASAHSCYLVAELNIDSYSGSARMCLIGADHLRCPRTFTSPEAIQRTEVYEYAKVLGNSQYILLPFQPYKLIYAYMLAEVGKISDSLKYCQASLKVLKSSGRAPELEAWKQLFITLEDRIRTHQQGGYATNLAPGKIVGKLFTSLDKSLSRMMGTQSAPLPQLPQGAANERGVYSSPDTKVVNSQSVMSMAPLVSSASEQSMSEIGGNSVYGREVAHNRSISEPDFGKTPQQGAAVSSKAQSTSGSGSSRFGWLVQKTIGLVSKSHRQAKLGEQNKFYYDEKLKRWVEEGAEIPAEEPPLPPPPTKVPFQNSVPDPNSNAPPTGGGYSSNPPEPSSGMPPMPPTQNQFSARGRMGVRSRYVDTFNKGGGGGGANAFGVATSYSKPAAPSIETARQDESSSSPAMETSFSSPPSLIQMQSSIPRYPSMDNVSSPTGSINSSMSRSRASSWSGTYPEQLSSTAASRSPDGQMTQSPSMPGRRPPHSRSNSASSSAQLNGLGEDLHEVEL

SEQ ID NO: 186589 - protein, 952 aa, Zea Mays
MHTEVGYGESNATSQFDSRATAEGYGDRSADAQVEYTDPRYLESLYPGWKYDEATHQWYQVDTLNTQTYAARDTGGAVADLASGGSVQQHQQFSGSYIQNTSHPEPALELTEPTSESKPQLEPAAAPPQTDAYPAVASHKEEQKEHGSVPVHTKPEAQEIPANAGDTATVTEGGSPGSEKGIHTAVKQVQWNDFGASTGGADLFGDLLPDGAEDDFFEGTVPVSQDVSSLVGATNVSAPDHSFSAGVYNTAMISAGHSFSDGVDKNANSHFGPSGSSAGYGDQSTNAQLGSTDPKYLESLYPGWKYDEATQQWYQVDTHSAQSYVADNTGAVVAVGSDNTQQHQQQFSASYLQNNLHAALETIAEESSTNAMSWVQGGTNTGPPEYPPNMLFYAEYPGWYFDTNTQQWQTLESYQQSVAHVATTAAASDGFAGTCHNVAHYTEDSYASSYNQQSQWQPDSFGNTMQADVLGGKSLLGSSYGSNQQAGNQIGQQANVDSLNHEPHVNTFMPSTGNQSWYSGLEHSTSKELRYKGFEPSTGFQTSRKEFQPPKDHQAGHMADEPLTRYGYGSSNGVVNTQNFVPKEGMHKTQMHDDSTAHTYAASNYWGTQTSMGSAQQQLTGTNGPSQQFGFSPHEQRSSAGRPPHTVVSFGFGGKLVVLKETSSMAANFDSGNQGNSGRTVSVLNIPEIVADKIDHSSIANGGAFSYFHALCRHPIPGPLVGGSAASKDLNKWLDDMSGVYESSQTEFQGGDVQKVLISLLKILCQHYGKLRSSFGSDPSQEGIDGPEMAVTKLFSSCKSSANMKGYGAVVHCMRNLPSESQIQTTAQEVQSLLVSGRRKEALHQAQEGHLWGPALILALQLGDKFYADTVKKMAHCHFVSGSPLRTLCLLIAGQPADVFSFENPVNSGLSSPQQPVEAAPKGMLDDWQENLAIITANRTKGCICPLVLFSC

SEQ ID NO: 186590 - protein, 783 aa, Zea Mays
MHTEVGYGESNATSQFDSRATAEGYGDRSADAQVEYTDPRYLESLYPGWKYDEATHQWYQVDTLNTQTYAARDTGGAVADLASGGSVQQHQQFSGSYIQNTSHPEPALELTEPTSESKPQLEPAAAPPQTDAYPAVASHKEEQKEHGSVPVHTKPEAQEIPANAGDTATVTEGGSPGSEKGIHTAVKQVQWNDFGASTGGADLFGDLLPDGAEDDFFEGTVPVSQDVSSLVGATNVSAPDHSFSAGVYNTAMISAGHSFSDGVDKNANSHFGPSGSSAGYGDQSTNAQLGSTDPKYLESLYPGWKYDEATQQWYQVDTHSAQSYVADNTGAVVAVGSDNTQQHQQQFSASYLQNNLHAALETIAEESSTNAMSWVQGGTNTGPPEYPPNMLFYAEYPGWYFDTNTQQWQTLESYQQSVAHVATTAAASDGFAGTCHNVAHYTEDSYASSYNQQSQWQPDSFGNTMQADVLGGKSLLGSSYGSNQQAGNQIGQQANVDSLNHEPHVNTFMPSTGNQSWYSGLEHSTSKELRYKGFEPSTGFQTSRKEFQPPKDHQAGHMADEPLTRYGYGSSNGVVNTQNFVPKEGMHKTQMHDDSTAHTYAASNYWGTQTSMGSAQQQLTGTNGPSQQFGFSPHEQRSSAGRPPHTVVSFGFGGKLVVLKETSSMAANFDSGNQGNSGRTVSVLNIPEIVADKIDHSSIANGGAFSYFHALCRHPIPGPLVGGSAASKDLNKWLDDMSGVYESSQTEFQGGDVQKVLISLLKILCQHYGKLRSSFGSDPSQEC

SEQ ID NO: 186591 - protein, 439 aa, Zea Mays
MYLAPACRAHTASVADFGGVGDGTTSNTAAFRSAVDHLSQYSGEGGGGGMLYVPAGKWLTGPFNLTSHFTLYLHQDAVILGSQDVGEWPIVDPLPSYGRGRDKVGGRFASLIGGSNLTDVVITGSNGTIDGQGAMWWSKFHKNQLKYTRGYLIELMHSDTIYISNLTLLNSPAWNIHPVYSSNIVVQGITILAPTNSPNTDGINPDSCSHVRIEDCYIVSGDDCVAIKSGWDEYGISYGMPSQHIVIRRLTCVSPTSAVIALGSEMSGGIQDVRAEDITAINTESAVRIKTAVGRGAYVRDVFARRMTLTTMKRVFWMTGDYKSHPDDKYDPNAVPVVANISYQDVVATGVYKEAARLQGIQGAPFRGICVANVTADLSKSRKYPWNCADIEGVSANVSPAPCDPLQGAHDGACPFPTDTLPIDQVTVQQCAYDIPATN

SEQ ID NO: 186592 - protein, 126 aa, Zea Mays
MKTILASETMDIPEGVTVTVAAKLVTVEGPRGKLTRNFKHLNLDFQLQEGGRKLKVDAWFGTRRTMAAIRTAISHVQNLIKGVTKGYRYKMRFVYAHFPINASITNSNTAIEIRNFLGEKKKGGHA

SEQ ID NO: 186593 - protein, 168 aa, Zea Mays
MKTILASETMDIPEGVTVTVAAKLVTVEGPRGKLTRNFKHLNLDFQLQEGGRKLKVDAWFGTRRTMAAIRTAISHVQNLIKGVTKGYRYKMRFVYAHFPINASITNSNTAIEIRNFLGEKKVRKVDMLDGVTILRSEKVKDELILDGNDVENAMSRRRISGSFWMVSM

SEQ ID NO: 186594 - protein, 373 aa, Zea Mays
MGRSPCCDQDAGVKKGPWTPEEDKLLVDYINEHGHGSWRRLPKLAGLNRCGKSCRLRWTNYLRPDIKRGRFTDDEEDLIVHLHSLLGNKWSSIATKLPGRTDNEIKNYWNTHLRKKLLSMGIDPVTHQRRTDLNLLAAGFPSLLAAANFAAAAGAPAPTATGPLAAAHVSSWDINALRLQADAAKYQLLEGLVRVLTAPAAAPTVGLMTLLAAANGGAPSGHQQSTRVVQQCDGMLSLPALTSVPPVTTPPGTSSAAYSLSGLLFGGAGTTTTAPAAGDGLSSTDQLGHSGATTGSNITAAAMPPPLSSAAAEGCNGAGKGCGRSTPSTCDETPASSPFDSLDSLTLDFDHNSDSWRELLEQMSWLNNPNDQL

SEQ ID NO: 186595 - protein, 1160 aa, Zea Mays
MRYRAPRSSGRRNNVLSWISEVKDTSNVGVRKKRGRRAPPSAKRLRDKRVDKAIESDGAVDSDSDDTDGQVDKNQPSAHIEEHVDGRTGDDLATAGHSGNSSNGPSSASEEQDHSTNSKDKLQKASSQNTKKVFGNSTNGKQGASNLEQECANEDGSHVLVAAVYKDIDNERSSQKIRDDVSDAQLDTASSDDKSSEEVEDVKVCDICGDVGEEEKLAVCSRCNDGAEHTYCMRVMMEEVPDSEWLCEDCQTAVESENENRLQKSQVKAGTSKELSLEGEINKPAIAAKGRSSSDCELKAGNIENKESNTTNERNGTVKTRTEEDAVTTSSTRDIFSETGGLYMGADSRKRMEPSHETFVSDADKGKQPSHQVSTSLVVNALKNQAPQSRGQLSKSTSFNNSKVPKVKQLLNEVPQKPKFLKESWSSIINKKEGPISMTTKSATFKKPKPCEPTNKAKSSVLSPVEEPRVPNQLASHNVTNGQCSILGPPSATSSMVAPVLRTDSTTQLLSTRNNTVDSNNLGSVHLQGNSELKKPRLAKVPGSMMLSNAERSAGGILGSGAHREVIQNSDPSHRDAKIKDQTGFRQGASSSNRTIRCQRCNEYGHSTHFCEVEKLRLSSGKPLSERNLKDASAKRNKTSEVSTLASSEKTPSREPEHVVKCAINQNLINGPNDGIPAPFSHVKKHSLSPRANVSIPGSGVDCSKPKFKNNDPSLSGTAGIFVHNGRIMPNDHRDEPAQGFSAGDEPTSSTVPELGWIWQGGFELQRTGSSPELCDGFQAHLSCSASQLVLDAVKKFPSKVQLEEVPRKNSWPTQFQKNGPTYDNIGLFFFARDVQSYENHYSKLVENMLKNDLVLRGSVGTVELLIFPSNILSKNFQRWNMLYFLWGLFRVSKKDSSNLPSYLSTSRVERNFNDDLQAMDWMPSTHSFSQNRSDLAEPDPDLLKSTNFEPSLEASREVCLDGENSLNQLVRRRALDDHLDSDAKACSTISNGAMGSSAMSMQRKHQKPDYPEHQDKKRDTFGGNVSERDFDVNTVPVTCSVSLTHLQEEPGKLSTAIDLMDIDHGVSAGALDRSHASGGAGKRSFETAEVAAEVPEHKKTKLDNNVVPISSGPRENACTNDGNSDKLMPGSSSSDGKRVFPLDLNAVGDEDIVNIPAFR

SEQ ID NO: 186596 - protein, 1148 aa, Zea Mays
MRLRNTDRAPRSSGRRNNVLSWISEVKDTSNVGVRKKRGRRAPPSAKRLRDKRVDKAIESDGAVDSDSDDTDGQVDKNQPSAHIEEHVDGRTGDDLATAGHSGNSSNGPSSASEEQDHSTNSKDKLQKASSQNTKKVFGNSTNGKQGASNLEQECANEDGSHVLVAAVVSDAQLDTASSDDKSSEEVEDVKVCDICGDVGEEEKLAVCSRCNDGAEHTYCMRVMMEEVPDSEWLCEDCQTAVESENENRLQKSQVKAGTSKELSLEGEINKPAIAAKGRSSSDCELKAGNIENKESNTTNERNGTVKTRTEEDAVTTSSTRDIFSETGGLYMGADSRKRMEPSHETFVSDADKGKQPSHQVSTSLVVNALKNQAPQSRGQLSKSTSFNNSKVPKVKQLLNEVPQKPKFLKESWSSIINKKEGPISMTTKSATFKKPKPCEPTNKAKSSVLSPVEEPRVPNQLASHNVTNGQCSILGPPSATSSMVAPVLRTDSTTQLLSTRNNTVDSNNLGSVHLQGNSELKKPRLAKVPGSMMLSNAERSAGGILGSGAHREVIQNSDPSHRDAKIKDQTGFRQGASSSNRTIRCQRCNEYGHSTHFCEVEKLRLSSGKPLSERNLKDASAKRNKTSEVSTLASSEKTPSREPEHVVKCAINQNLINGPNDGIPAPFSHVKKHSLSPRANVSIPGSGVDCSKPKFKNNDPSLSGTAGIFVHNGRIMPNDHRDEPAQGFSAGDEPTSSTVPELGWIWQGGFELQRTGSSPELCDGFQAHLSCSASQLVLDAVKKFPSKVQLEEVPRKNSWPTQFQKNGPTYDNIGLFFFARDVQSYENHYSKLVENMLKNDLVLRGSVGTVELLIFPSNILSKNFQRWNMLYFLWGLFRVSKKDSSNLPSYLSTSRVERNFNDDLQAMDWMPSTHSFSQNRSDLAEPDPDLLKSTNFEPSLEASREVCLDGENSLNQLVRRRALDDHLDSDAKACSTISNGAMGSSAMSMQRKHQKPDYPEHQDKKRDTFGGNVSERDFDVNTVPVTCSVSLTHLQEEPGKLSTAIDLMDIDHGVSAGALDRSHASGGAGKRSFETAEVAAEVPEHKKTKLDNNVVPISSGPRENACTNDGNSDKLMPGSSSSDGKRVFPLDLNAVGDEDIVNIPAFR

SEQ ID NO: 186597 - protein, 1133 aa, Zea Mays
MRLRNTDRAPRSSGRRNNVLSWISEVKDTSNVGVRKKRGRRAPPSAKRLRDKRVDKAIESDGAVDSDSDDTDGQVDKNQPSAHIEEHVDGRTGDDLATAGHSGNSSNGPSSASEEQDHSTNSKDKLQKASSQNTKKVFGNSTNGKQGASNLEQECANEDGSHVLVAAVSDAQLDTASSDDKSSEEVEDVKVCDICGDVGEEEKLAVCSRCNDGAEHTYCMRVMMEEVPDSEWLCEDCQTAVESENENRLQKSQVKAGTSKELSLEGEINKPAIAAKGRSSSDCELKAGNIENKESNTTNERNGTVKTRTEEDAVTTSSTRDIFSETGGLYMGADSRKRMEPSHETFVSDADKGKQPSHQVSTSLVVNALKNQAPQSRGQLSKSTSFNNSKVPKVKQLLNEVPQKPKFLKESWSSIINKKEGPISMTTKSATFKKPKPCEPTNKAKSSVLSPVEEPRVPNQLASHNVTNGQCSILGPPSATSSMVAPVLRTDSTTQLLSTRNNTVDSNNLGSVHLQGNSELKKPRLAKVPGSMMLSNAERSAGGILGSGAHREVIQNSDPSHRDAKIKDQTGFRQGASSSNRTIRCQRCNEYGHSTHFCEVEKLRLSSGKPLSERNLKDASAKRNKTSEVSTLASSEKTPSREPEHVVKCAINQNLINGPNDGIPAPFSHVKKHSLSPRANVSIPGSGVDCSKPKFKNNDPSLSGTAGIFVHNGRIMPNDHRDEPAQGFSAGDEPTSSTVPELGWIWQGGFELQRTGSSPELCDGFQAHLSCSASQLVLDAVKKFPSKVQLEEVPRKNSWPTQFQKNGPTYDNIGLFFFARDVQSYENHYSKLVENMLKNDLVLRGSVGTVELLIFPSNILSKNFQRWNMLYFLWGLFRVSKKDSSNLPSYLSTSRVERNFNDDLQAMDWMPSTHSFSQNRSDLAEPDPDLLKSTNFEPSLEASREVCLDGENSLNQLVRRRALDDHLDSDAKACSTISNGAMGSSAMSMQRKHQKPDYPEHQDKKRDTFGGNVSERDFDVNTVPVTCSVSLTHLQEDHGVSAGALDRSHASGGAGKRSFETAEVAAEVPEHKKTKLDNNVVPISSGPRENACTNDGNSDKLMPGSSSSDGKRVFPLDLNAVGDEDIVNIPAFR

SEQ ID NO: 186598 - protein, 421 aa, Zea Mays
MSPLGWSGLSWAIGILIVAPLLTQTAHHLDRGQYQSLILIAATSFGSFFCLLTGFFKTVWVFLFYILFIAGSIIVAEAVHTRNLGLMIRGLAAHDSGKHLVLRRRAAASQLSLYCTAIGGIGAALMAAFMYHMLRRTDQLTGLWVVSIFCGLIWFIGICHGLFTNRPSSSSPTTAFEPNFFTKLSYSMTLLRYPQAIGSLVAVFLSSFATMCIFTSGTLYAIGGVCIKPVLVLALWILYFLFPLISLPLLHPIQIIIRADAVRMQLLGFIICLFVSGAGFYFKSHRWRAAHIIVIALVQSTANGILYAFGRILLLDASPPGKEGAFSVWYAFVRVTGAMIGFAASSAGPGRAGGSFAAAFLGSFLGIIVLIFGNVSNIGALKAAGHLKGMDDEKRMGGLGMEKGEGMGSAVADSGESRGRV

SEQ ID NO: 186599 - protein, 516 aa, Zea Mays
MAAAPAAATAERPRSPGRRRPARSRWSGRRTAARRPRRPTSYPRSRRPWSSSSAGTSTASAPTSSPTCCCRSSSRPSSRRYQRLTKHSIVIDGSRMSPLGWSGLSWAIGILIVAPLLTQTAHHLDRGQYQSLILIAATSFGSFFCLLTGFFKTVWVFLFYILFIAGSIIVAEAVHTRNLGLMIRGLAAHDSGKHLVLRRRAAASQLSLYCTAIGGIGAALMAAFMYHMLRRTDQLTGLWVVSIFCGLIWFIGICHGLFTNRPSSSSPTTAFEPNFFTKLSYSMTLLRYPQAIGSLVAVFLSSFATMCIFTSGTLYAIGGVCIKPVLVLALWILYFLFPLISLPLLHPIQIIIRADAVRMQLLGFIICLFVSGAGFYFKSHRWRAAHIIVIALVQSTANGILYAFGRILLLDASPPGKEGAFSVWYAFVRVTGAMIGFAASSAGPGRAGGSFAAAFLGSFLGIIVLIFGNVSNIGALKAAGHLKGMDDEKRMGGLGMEKGEGMGSAVADSGESRGRV

SEQ ID NO: 186600 - protein, 193 aa, Zea Mays
MQTGPFRMQSTCTKCGGSGKTVKEFCKACRGNKVVPGRKSVRLDILPGSDNEDTIKVVRSGGEDPDGRPGDLYVTLEVREDPVFRREKGDIHVDAVLNVTQAILGGTVQVPTLSGDVVLKIKPGTQPGQKVVLRGKGIKTRNSPYHGDQYVHFNVNIPENLTSRQRELIEEFAKEEQGEDEKDAKAAAGASGG

SEQ ID NO: 186601 - protein, 266 aa, Zea Mays
MNDFFRNIFGDRDFGGRDVKVALELSFVEAVQGCSKTVTFQTSVTCEICGGAGVPPGTTPETCLSCRGSGFIFMQTGPFRMQSTCTKCGGSGKTVKEFCKACRGNKVVPGRKSVRLDILPGSDNEDTIKVVRSGGEDPDGRPGDLYVTLEVREDPVFRREKGDIHVDAVLNVTQAILGGTVQVPTLSGDVVLKIKPGTQPGQKVVLRGKGIKTRNSPYHGDQYVHFNVNIPENLTSRQRELIEEFAKEEQGEDEKDAKAAAGASGG

SEQ ID NO: 186602 - protein, 307 aa, Zea Mays
MRLPAGARLALLLARRSLSSSPRIPRAHTGIWSEAPSRSSPFSPPSSARRSFHGTRPVAARDYYDVLGVSKSASQAEIKKAYYGLAKKLHPDTNKGDADAERKFQEVQRAYETLKDEQKRSLYDQVGPDQYEKTASGGGGTGFEGGFGNPFEDIFGGGGGGGGMNDFFRNIFGDRDFGGRDVKVALELSFVEAVQGCSKTVTFQTSVTCEICGGAGVPPGTTPETCLSCRGSGFIFMQTGPFRMQSTCTKCGGSGKTVKEFCKACRGNKVVPGRKSVRLDILPGSDNEDTIKVVRSGGEDPDGRPGS

SEQ ID NO: 186603 - protein, 437 aa, Zea Mays
MRLHAGARLALLLARRSLSSSPRIPRVHTACRAPRSTGIRSEAPSRSSPFYPPSSARRSFHGTRPVAARDYYDVLGVSKSASQAEIKKAYYGLAKKLHPDTNKGDADAERKFQEVQRAYETLKDEQKRSLYDQVGPDQYEKTASGGGGTGFEGGFGNPFEDIFGGGGGGGGMNDFFRNIFGDRDFRGRDVKVALELSFMEAVQGCSKTVTFQTSVTCEICGGAGVPPGTTPETCLSCRGSGFIFMQTGPFRMQSTCTKCGGSGKTVKEFCKACRGNKVVPGRKSVRLDILPGLDNEDTIKVVRSGGEDPDGRPGDLYVTLEVREDPVFRREKGDIHVDAVLNVTQAILGGTVQVPTLSGDVVLKVKPGTQPGQKVVLRGKGIKTRNSPHYGDQYVHFNVNIPENLTSRQRELIEEFAKEEQGEDEKDAKAAAGASGG

SEQ ID NO: 186604 - protein, 266 aa, Zea Mays
MNDFFRNIFGDRDFRGRDVKVALELSFMEAVQGCSKTVTFQTSVTCEICGGAGVPPGTTPETCLSCRGSGFIFMQTGPFRMQSTCTKCGGSGKTVKEFCKACRGNKVVPGRKSVRLDILPGLDNEDTIKVVRSGGEDPDGRPGDLYVTLEVREDPVFRREKGDIHVDAVLNVTQAILGGTVQVPTLSGDVVLKVKPGTQPGQKVVLRGKGIKTRNSPHYGDQYVHFNVNIPENLTSRQRELIEEFAKEEQGEDEKDAKAAAGASGG

SEQ ID NO: 186605 - protein, 429 aa, Zea Mays
MRLHAGARLALLLARRSLSSSPRIPRVHTGIRSEAPSRSSPFYPPSSARRSFHGTRPVAARDYYDVLGVSKSASQAEIKKAYYGLAKKLHPDTNKGDADAERKFQEVQRAYETLKDEQKRSLYDQVGPDQYEKTASGGGGTGFEGGFGNPFEDIFGGGGGGGGMNDFFRNIFGDRDFRGRDVKVALELSFMEAVQGCSKTVTFQTSVTCEICGGAGVPPGTTPETCLSCRGSGFIFMQTGPFRMQSTCTKCGGSGKTVKEFCKACRGNKVVPGRKSVRLDILPGLDNEDTIKVVRSGGEDPDGRPGDLYVTLEVREDPVFRREKGDIHVDAVLNVTQAILGGTVQVPTLSGDVVLKVKPGTQPGQKVVLRGKGIKTRNSPHYGDQYVHFNVNIPENLTSRQRELIEEFAKEEQGEDEKDAKAAAGASGG

SEQ ID NO: 186606 - protein, 196 aa, Zea Mays
MRLHAGARLALLLARRSLSSSPRIPRVHTGIRSEAPSRSSPFYPPSSARRSFHGTRPVAARDYYDVLGVSKSASQAEIKKAYYGLAKKLHPDTNKGDADAERKFQEVQRAYETLKDEQKRSLYDQVGPDQYEKTASGGGGTGFEGGFGNPFEDIFGGGGGGGGMNDFFRNIFGDRDFRGRDVKFKGAAKRSPSKRL

SEQ ID NO: 186607 - protein, 408 aa, Zea Mays
MPLVAPTFQCSDYYTELLVVYSATEGYMMRCGGAQTEARPAGASATPTFGWSEQAWPGDLLMAAKGMAAGAVVGTEARRAGANGTPKSKRSTLKDEQKRSLYDQVGPDQYEKTASGGGGTGFEGGFGNPFEDIFGGGGGGGGMNDFFRNIFGDRDFRGRDVKVALELSFMEAVQGCSKTVTFQTSVTCEICGGAGVPPGTTPETCLSCRGSGFIFMQTGPFRMQSTCTKCGGSGKTVKEFCKACRGNKVVPGRKSVRLDILPGLDNEDTIKVVRSGGEDPDGRPGDLYVTLEVREDPVFRREKGDIHVDAVLNVTQAILGGTVQVPTLSGDVVLKVKPGTQPGQKVVLRGKGIKTRNSPHYGDQYVHFNVNIPENLTSRQRELIEEFAKEEQGEDEKDAKAAAGASGG

SEQ ID NO: 186608 - protein, 236 aa, Zea Mays
MPLVAPTFQCSDYYTELLVVYSATEGYMMRCGGAQTEARPAGASATPTFGWSEQAWPGDLLMAAKGMAAGAVVGTEARRAGANGTPKSKRSTLKDEQKRSLYDQVGPDQYEKTASGGGGTGFEGGFGNPFEDIFGGGGGGGGMNDFFRNIFGDRDFRGRDVKVALELSFMEAVQGCSKTVTFQTSVTCEICGGAGVPPGTTPETCLSCRGSGLYSCKPGPSGCNQPAQNVVVLGKL

SEQ ID NO: 186609 - protein, 286 aa, Zea Mays
MPLVAPTFQCSDYYTELLVVYSATEGYMMRCGGAQTEARPAGASATPTFGWSEQAWPGDLLMAAKGMAAGAVVGTEARRAGANGTPKSKRSTLKDEQKRSLYDQVGPDQYEKTASGGGGTGFEGGFGNPFEDIFGGGGGGGGMNDFFRNIFGDRDFRGRDVKVALELSFMEAVQGCSKTVTFQTSVTCEICGGAGVPPGTTPETCLSCRGSGFIFMQTGPFRMQSTCTKCGGSGKTVKEFCKACRGNKVVPGRKSVRLDILPGLDNEDTIKVVRSGGEDPDGRPGS

SEQ ID NO: 186610 - protein, 126 aa, Zea Mays
MAFLQISRFIMLSSSKWQGDAGCWQLPVRFSHRETNFLRNLTRVRAPGPKVEGPSALPAPCALLHEMNGTTLAQCPCSHLFSPAVNWDPLNPHLHSELPVCPSCIVLLCPVTKMENTTMVRDISSI

SEQ ID NO: 186611 - protein, 438 aa, Zea Mays
MNGTHPWTSMSGGACSNLGYARDMNGNVPISTTNSSGPSIGVSSLVTDANSSLSGGAQLQPSTSMNGDSLMRVPASPMSFSSNNISGSSVIDGSIMQQSPPQEQMQKRRSSSVTSQHVIDAGGALHAQKKSRTDVSQGDIMQHQLIQHLIHGQNSLHFQGQQNPQLQAFIQQHKLAQLQQRQQQHLLQPFSQMQQPQVGIPRQPQLRPPLAQTGMQLGGPVRTPIERGVCSRRILQYLFHKRHRPENNSITYWRKIVEEYFAPRARERWCVSSYENRGNSSAAAPQKALDTWRCGICNTHAGKGYEATYEILPRLCQIRFDHGVIDEYLYFDSPNEFGLPNGQMVLEHAKVVQKSVYEHLHVIHEGHLRIIFTPELKIISWEFCSRRHEEYTTRKTIAPQVNNLLQVVQKYQAVVTESGSAGISNNDAQTICNIYRRW

SEQ ID NO: 186612 - protein, 676 aa, Zea Mays
MQKRRSSSVTSQHVIDAGGALHAQKKSRTDVSQGDIMQHQLIQHLIHGQNSLHFQGQQNPQLQAFIQQHKLAQLQQRQQQHLLQPFSQMQQPQVGIPRQPQLRPPLAQTGMQLGGPVRTPIERGVCSRRILQYLFHKRHRPENNSITYWRKIVEEYFAPRARERWCVSSYENRGNSSAAAPQKALDTWRCGICNTHAGKGYEATYEILPRLCQIRFDHGVIDEYLYFDSPNEFGLPNGQMVLEHAKVVQKSVYEHLHVIHEGHLRIIFTPELKIISWEFCSRRHEEYTTRKTIAPQVNNLLQVVQKYQAVVTESGSAGISNNDAQTICNMFVTASQQLAKNLEHHTLNEHGLSKRYVRSLQISEVVNHMKDLIEFSHKNGLGPKESLNSYSKTMAKFQNMHDSRQLMAAANLANNQSNTKLMGTKEEASASATNQTPGVGAIGNNALQHATPLNSYQNMLRSSSANPVLLQQEASSVFKGPTAMHSGIQLEAARSFRGPNQVQFQHPAAIQQQQPMPQQSNFQGFGGVNPQYQHHVLNQLLQEVKNNNHVKAQQLPPDAPKASGGLAPGVAIPNVAAAGEQGQHINSNTRDHNGAVKGAAPAGTGPSNVINNTASMPPGRNNSFKSVSSSPAAATGGIAVNSKVDDSFHQLEDLDLDGLITNELMESGLFGAGQGW

SEQ ID NO: 186613 - protein, 318 aa, Zea Mays
MLEETQLKFEEERQNLLKVLSNTSKEQCEGSLNEEYNKFQETYDMFCKEKDAHMQTFRGRAHPVPAEAHVRLRHLHVCRDGEGHPEQGNPHFVRDVRVLVKPYKEKGKVPGRFRKLQHAHHGGAEFAGCASPTGLLDSRDPYALLLLSGAQVFTSEVLKVVEDGLREASFEIGLDDQKVHKEMDEIYTVFINISTPINVYNKLFVLQSTLQATIISRIPWSPRCATATEVMWVELAAPLDAEFRFVGQPFDATVWQTRAAASRSGVGSLVLLRGTDDASKLARERVEGVFEMELRIAMEVRYFPVHIVWSSRLEATCR

SEQ ID NO: 186614 - protein, 362 aa, Zea Mays
MLEETQLKFEEERQNLLKVLSNTSKEQCEGSLNEEYNKFQETYDMFCKEKDAHMQTFRGRAHPVPAEAHVRLRHLHVCRDGEGHPEQGNPHFVRDVRVLVKPYKEKGKVPGRFRKLQHAHHGGAEFAGCASPTGLLDSRDPYALLLLSGAQVFTSEVLKVVEDGLREASFEIGLDDQKVHKEMDEIYTVFINISTPINVYNKLFVLQSTLQATIISRIPWSPRCATATEVMWVELAAPLDAEFRFVGQPFDATVWQTRAAASRSGVGSLVLLRGTDDASKLARERVEGVFEMELRIAMEVRYFPVHIVWSSRALIIQMDANNLLRFSWDCSQGYWILNKECKRMLVRHLQPLKRSHWMLVLN

SEQ ID NO: 186615 - protein, 155 aa, Zea Mays
MLLQVHFGTRLPAVMSGSYTYIYPVVAIILSQRYALLIDPLEGVLIIVGVFQAVVGFFGIWRVFIRFLSPLTAVPFVTLTGLGLFFSAFPGVTKCIEVGLPALVLLVIFAEYASHVFAKGSFVFSRCPVLVTVVIIWIYAEILTAAGAYNQLGIT

SEQ ID NO: 186616 - protein, 190 aa, Zea Mays
MTLAALARALDRSARSSRPRQGFQLGGLRQSPAPPLQPPVHGGEGGAAGFVRSYLTAASSAALGNPSAGKTVDWRYVLASPHFRRLFSDGSKKNYENYYPKGKKEVPKGDGTNKSESKQESNTDEGWNFQDNAMKQMQNFLAPLLILGLMLSSMSSSFADQKEVCNFLGPQKTNNTVASPCVPNPVSNSC

SEQ ID NO: 186617 - protein, 205 aa, Zea Mays
MKLLEMQKGELRCLLPRSLLDNGFFGIRSSEDKDSKKNTGPFSSFSWSGQRKVPSYLPKIVFPHEFMSTLRTIAMQEHELEQVASLLGEVGYSEDRETSCAAIQSAIWEVCGDQGALGLLVDLLGVKMAELEEGSGTEASDAELLEQFDSIQPEDYASESGEKHERKSKTNYRSCVVYRRGQKQLTRLFLREVEHLLELSAKEQS

SEQ ID NO: 186618 - protein, 385 aa, Zea Mays
MRRLKGSLRSFCMSMNQQVEVLFEDFLWANSIFWTRALNIPLPHSYVFLGSCGDQQARADNDAHQEIDITAKDCSADENSKPSNTESIWVEGLVPGIDFCNHNVKALATWEVDSVGNATGIPASMYLLLADKSPAETGAEICINYGNKGNEELLYLYGFVVDNNPDDYLMVHYPLEALRQIQSADIKMKLLEMQKGELRCLLPRSLLDNGFFGIRSSEDKDSKKNTGPFSSFSWSGQRKVPSYLPKIVFPHEFMSTLRTIAMQEHELEQVGYSEDRETSCAAIQSAIWEVCGDQGALGLLVDLLGVKMAELEEGSGTEASDAELLEQFDSIQPEDYASESGEKHERKSKTNYRSCVVYRRGQKQLTRLFLREVEHLLELSAKEQS

SEQ ID NO: 186619 - protein, 212 aa, Zea Mays
MATAAADDDVKLESFLQWLQSNGADLRSCTIRACGGKGLGVFSTAAPEPGSNDGVAMVVPLDLAITPMRVLQDPLVGPRCRALLEDGVVDDRLLVMLFLMAERRRPGSLWKPYLDMLPSTFGSSLWFTEEELAELEGTTLHRATLIQRKSLQSSFDEKVKGLVEELLHVDESASSVEVLFEDFLWYVIFLFALKAETTYYNLHLIIPFYHLD

SEQ ID NO: 186620 - protein, 327 aa, Zea Mays
MRRLKGSLRSFCMSMNQQAQLKFCLRTSFVRVYDRANSIFWTRALNIPLPHSYVFLGSCGDQQARADNDAHQEIDITAKDCSADENSKPSNTESIWVEGLVPGIDFCNHNVKALATWEVDSVGNATGIPASMYLLLADKSPAETGAEICINYGNKGNEELLYLYGFVVDNNPDDYLMVHYPLEALRQIQSADIKMKLLEMQKGELRCLLPRSLLDNGFFVLYVLLPCKNMSLNRLLLYLERLDIVKTEKHLVQRSKVLFGRSAVIRVHWVCLWIFSGSKWLNLKRALEQKHLTPNCSSSSIPFSQKTTRVKAARSTKGSQRQTTVRV

SEQ ID NO: 186621 - protein, 198 aa, Zea Mays
MLLHAEGPRVEGELARAAAEEGALRQRRGHEAADGEHGDLRRHGGDGERLLAVPEEGVEEGERGAGRRAQHPRPERQRRRRRVVPRRHRQRHLLDRRAVVVPRFSLLFLRRAMRAPRRRLHCMTRNGNKANGAVVRSTCHRNEETESWERGALRSGEVISWMPWRSCSSPASSCSSSWWTDDAMIGLGLGSYDWDLAG

SEQ ID NO: 186622 - protein, 119 aa, Zea Mays
MVCIQVHSGSSLLPVSSCAPCWPDRHRVAMAAQQARRLPNHPLARGAGTHLVHVSSPPHDVAPLGASREPVLVIGDPGVLDEMPERGGLFRVLQCSPTSSGWSELGDAGMAAPSVLCMR

SEQ ID NO: 186623 - protein, 159 aa, Zea Mays
MRATFPEYVVALTTIVGSVLFTIFGGVGIACLPLGLIFSFVRRPKAVITRSQYIKEATELGKKARELKKAAEALHQEERSGNKGRKWRKNVKALEKELLLLEDDMKALEEMYPQGEQAEATWAFTVLGDCWGDDAWIEASFYHNSPDEMGRHFNELLPV

SEQ ID NO: 186624 - protein, 409 aa, Zea Mays
MASQLPSLAAPAGLCLLSALAAALLVLTLYVLGAVASFAVFCAGEFARRDPGRPPLTGTMLRQLKNFDRLFDEHVRYALAHRTSRLVYPGHSELFTADPAVVEHVLRTNFSKYSKGAYNIGVMKDLFGDGIFAIDGDSWRHQRKLASHEFSTKVLREFSSVVFRANATRLVDKISSAAANRTILNMQDLLMKTTMDSIFKVGFGFELNTLSGSDKSSVQFSNAFDEANCIVYHRYVDLFWQLKRYFNIGSEAKLRKNIQIIDDFVMNLIHQKREQMNGQDNDGKMAEDDDVLPNGYKVIKGDGINYMIYAMGRMTYLWGEDAEDFRPERWIANGVFQQESPYKFVSFNAGPRTCLGKDFAYRQMKIMAATLIHFFRFKLTDESKDATYKTMFTLHMDKGLKLYAYPRSI

SEQ ID NO: 186625 - protein, 53 aa, Zea Mays
MYVVQRISADKPLAFCVCLSRQRRHRFRPSAQAAPSLRPNNLYCVLFIYVLTY

SEQ ID NO: 186626 - protein, 67 aa, Zea Mays
MSPRFVCSVTDMAPARSGEGRRGGGGGAGLRLGGGQAGDGSKSNCGLCCARSGGDWWSLEEGDVGRV

SEQ ID NO: 186627 - protein, 84 aa, Zea Mays
MSLVVLFLVMFVKSFSTFVLFLCCSRMYRSIFPSAETLGVMMQSCWRAFFPSCHKTKIGSVFLGTTGDALIGSSVHKHVFTTTT

SEQ ID NO: 186628 - protein, 103 aa, Zea Mays
MPKAAATCQCLLVLKLVFIVPDISCEFSLYRSSNEVITQVLGRGNPLSSNQAVYVRCGIRLQTVRIIFSICLLIWFSSKLVGPIGMAMGEFGVRMVACGVWVG

SEQ ID NO: 186629 - protein, 379 aa, Zea Mays
MSPKKKVAAETKLTKEAKLFEEKKAVDPYIAVFVKSMAKTNTEKITKEILEGLSEDTGDNDSYDVGSGDEDSEDRPWRPSHSIFGKSTIKKSHLENMRGRYFQDMSTVRAGGDNNVSAPEENEVVIYRSFFRAGLRFPLSKFVVEVLKTYQIFLHQITPKAIIRMEIFVWEVRSQGLEPSAKCFCSMHELLYETKAMGKEQYHNNFSCYGFIARPNASHPVPTFWKRWPGAWMEEWFYVKNDLKAREDIKEVIMRPIWSRFGLRRLKIEIDETIEECQRAFITICSFIGTRDLIQEHIAFRVWPLVDSWEMPKETITDSSEGGLIRLKYTFRFGDKFDEPDDDWLKCIEATSDELLGAYSKAEDNALSVAFEGRGKKRL

SEQ ID NO: 186630 - protein, 542 aa, Zea Mays
MAPPRPPTGPILFLPLVFLFLFTTAAASAAAPEDEKFTEELLLRPLPDRKALAHFHFRSSAPPAASVGRHHHLFPKAISQLVKKYHISELELSFTQGRWNYEQWGGFDPMSTNNAKPPGVELWAVFDLPLSEIDATWKNLTHTLSGLFCASINFLESSTAFSAPRWGFKLNEGNLRYGALPREAVCTENLTPWLKLLPCRDKAGIASLLYRPSIYKGYYHSQKLKLRSSQSLGIILDQTLTVVLQPNNVHGEQLHSNHGQLQPNWSMRHLFNRKLSGKCLVSKSSRVFIEVDKGIADEVNISGSVHSWSNEFFVLSNSPDKLIKGQNHLEMQSSFLYVYDASNYSEEQPLDLGITWKLPLIWTCTPSPFHASRFLMGSGNERGSIALSFMSTNLHKKISGSANDCSIKAVIFQVVPWYVKVYYHSLEIFIDGSRKTVSEVVDKIHVIPSEDKLLPGTLEMLLRFPCSMQSGTLTLDFDKGFLHIDEYPPDANQGFDIPSALVSFPEFSSARSYPEIDPVLGSPLLENFQYTNICLFCRKIVL

SEQ ID NO: 186631 - protein, 606 aa, Zea Mays
MAPPRPPTGPILFLPLVFLFLFTTAAASAAAPEDEKFTEELLLRPLPDRKALAHFHFRSSAPPAASVGRHHHLFPKAISQLVKKYHISELELSFTQGRWNYEQWGGFDPMSTNNAKPPGVELWAVFDLPLSEIDATWKNLTHTLSGLFCASINFLESSTAFSAPRWGFKLNEGNLRYGALPREAVCTENLTPWLKLLPCRDKAGIASLLYRPSIYKGYYHSQKLKLRSSQSLGIILDQTLTVVLQPNNVHGEQLHSNHGQLQPNWSMRHLFNRKLSGKCLVSKSSRVFIEVDKGIADEVNISGSVHSWSNEFFVLSNSPDKLIKGQNHLEMQSSFLYVYDASNYSEEQPLDLGITWKLPLIWTCTPSPFHASRFLMGSGNERGSIALSFMSTNLHKKISGSANDCSIKAVIFQVVPWYVKVYYHSLEIFIDGSRKTVSEVVDKIHVIPSEDKLLPGTLEMLLRFPCSMQSGTLTLDFDKGFLHIDEYPPDANQGFDIPSALVSFPEFSSARSYPEIDPVLGSPLLENFQEDSVVKSYTEVLLVPLTTPDFSMPYNVITFTCTVLALYFGSLLNALRRRIGEEERELKKRDDNLVDALMVFFPFISN

SEQ ID NO: 186632 - protein, 255 aa, Zea Mays
MFSPGRLSHRALKLVLAGVLLYHGSPLRAGLSSAPPSMALGCSKSLPYSLIEAARHLSARPHLPVLELVGFSSTRSSPCSSFLPAARVNFLRAELSCTPLHSPKSPPFSLLARAAAPQLLAVACALFLPNSSPFFFRTAAPDLRSSDLVVHLTRYRCRGCTSCSTKAQRDGHAYAIRVDSNSPYTRERHVCVHDLECHKSPHSSSSIQAVSPTCPSTPTIYLSTARYLRRDPKLSVVLDLTSLKLVDIPCVVEKS

SEQ ID NO: 186633 - protein, 168 aa, Zea Mays
MRLAELREAAKAARFGTILPITGSDFVREVSQAQSDVWVVVFLYKDGIPECGLLQNCLEELATRYPATKFVKIISTDCIPNYPDRNVPTILVYNNSAVKGTYVGLQKFGGKRCTPESVALALCQSDPVLNDGHGGSDSSRGNVFEGVRRKFIEKVVAQHEEREEEDSD

SEQ ID NO: 186634 - protein, 224 aa, Zea Mays
MDNVFVQLICTIQYRVVKENADDAFYELQNPQQQIQAYVFDVVRAIVPRMNLDDLFEQKNDVAKAVLEELEKVMADYGYSIEHILMVDIIPDAAVRKAMNDINAAQRLQLASVYKGEAEKILMVKKAEAEAEAKYLSGVGIAKQRQAITDGLRENILNFSHSVSGTSAKEVMDLIMVTQYFDTIKELGDGSKNTTIFIPHGPGHVKDISEQIRDGMMQASSSNV

SEQ ID NO: 186635 - protein, 349 aa, Zea Mays
MVQKIPLYQHIANLAGNKTLVLPVPAFNVINGGSHAGNKLAMQEFMILPTGASFKEAMKMGVEVYHHLKEYAAGTLMFLYAEHNQEELKKYGQDATNVGDEGGFAPNIQENKKGLELLKAAIEKAGYTGKVFIGMDVAASEFFSEKDKTYDLNFKEENNDGSNKISGDSLKDLYKSFVSEYPIVSIEDPFDQDDWTTYAKLTGEIGQQVQIVGDDLLVTNPTRVAKAINEKTCNALLLKVNQIGSVTESIEAVRMSKRAGWGVMASHRSGETEDTFISDLSVGLATGQIKTGAPCRSERLAKYNQLRLGSRKSSVLPQSTPERSSEHQWSPTEPRVPRAWRKKMRMFPH

SEQ ID NO: 186636 - protein, 51 aa, Zea Mays
MICQMGRARKDSPDGFVTKPETLTDGIVKLMIWHRTIPSMQGIGRPASLHI

SEQ ID NO: 186637 - protein, 88 aa, Zea Mays
MICQMGRARKDSPDGFVTKPETLTDGIVKLMIWHRTIPSMQGFCSLGLRGLPGIKVRTELEDQLLYTYRCHCLDGEFSDFKALPRASG

SEQ ID NO: 186638 - protein, 219 aa, Zea Mays
MAGQAHPAHAALHGIAVPADLLSLAVHSPNELLSMEHRGRGLLLGEIHGWRPPLLLSPPPASLIEALLDSVLRCVHGGFSWASGGFCAARRSALGLRFMVLLMHVLFVGAVFILNPTSAGESTGSRDEGFTMAKSKDHMAHNQSYKAHKNNIKKPTRGCQTSTKGTAIPFHTWRTAIKMMDRGEASNPSPLLGFTDSLSFCSPICRSSVHRFAAVLLIS

SEQ ID NO: 186639 - protein, 278 aa, Zea Mays
MKCLQTSLLKSECTKLLRNQLWRVLCVWQSVMEGYNGTVMAYGQTGTGKTFTLGRLGEEDTAARGIMVRAMEDILADITPGTDSVSVSYLQLYMEMIQDLLDPVNDNIAIVEDPRTGDVSLPGATVVEVRDQKSFVDLLRVGEAHRVAANTKLNTESSRSHAILMVNVRRSVKGRTEMDVSISGENGLSSSLVGSLRPPIVRKSKLVVVDLAGSERIDKSGSEGHTLEEAKSINLSLSALGKCINALAESSPHVPVRDSKLTRLLKDSFGERISVLYL

SEQ ID NO: 186640 - protein, 280 aa, Zea Mays
MSGVCGRNNNPYPCHFAERLRQNQGFWLNGIYPIEELLKNDLIPINSSIGLIKLFHFVFILTACQVYKLSLIVDHVATSVLRLQMRIYSSLVPAVSSRVRVAVRLRPRNAEELAADADFGDCVELQPELKRLRLRKNNWESETYEFDEVLTDFSSQKRVYEVVAKPVVESVMEGYNGTVMAYGQTGTGKTFTLERLGEEDTAARGIMVRAMEDILADITPGTDSVSVSYLQLYMEMIQDLLDPVNDNIAIVEDPRTGDVSLPGATVVEVRDQKSFVDLLR

SEQ ID NO: 186641 - protein, 169 aa, Zea Mays
MQKSWRQMQILVIVLNFSQRLRLRKNNWESETYEFDEVLTDFSSQKRVYEVVAKPVVESVMEGYNGTVMAYGQTGTGKTFTLERLGEEDTAARGIMVRAMEDILADITPGTDSVSVSYLQLYMEMIQDLLDPVNDNIAIVEDPRTGDVSLPGATVVEVRDQKSFVDLLR

SEQ ID NO: 186642 - protein, 252 aa, Zea Mays
MASSGVRNGVGPRMSAKPDRQGAGATPKTAAGKHRVSSAGGAGAYRRTSSGPLPAAAGGRAASDGAVSSRVRVAVRLRPRNAEELAADADFGDCVELQPELKRLRLRKNNWESETYEFDEVLTDFSSQKRVYEVVAKPVVESVMEGYNGTVMAYGQTGTGKTFTLERLGEEDTAARGIMVRAMEDILADITPGTDSVSVSYLQLYMEMIQDLLDPVNDNIAIVEDPRTGDVSLPGATVVEVRDQKSFVDLLR

SEQ ID NO: 186643 - protein, 128 aa, Zea Mays
MASSGVRNGVGPRMSAKPDRQGAGATPKTAAGKHRVSSAGGAGAYRRTSSGPLPAAAGGRAASDGERLRQNQGFWLNGIYPIEELLKNDLIPINSSIGLIKLFHFVFILTACQVYKLSLIVDHVATSV

SEQ ID NO: 186644 - protein, 137 aa, Zea Mays
MSNHTTYVALNPCICQLAHRFLKTRTGSRDPRAQYSTVQPLAWLVHVTLAMVPAMFPRVQHPTFQSLPRRVQATLAIAPLPVRASCSGIGPTEAKLTHDEACGQLKGPRSAGQQSERSLSDTDGRPFLLNVWSHLII

SEQ ID NO: 186645 - protein, 180 aa, Zea Mays
MQIFPKIKKFNNNKATFPLFDALGELYDDDEVDDALNERNEDVLKGRANTLSRDEESGQQISIASRNKQEKELKKLRKSDNIENMMGRYLKMRSKQVEYESAREKEARENEAREMEVTQSDDFSIKRCISVMNTIEEVTKLEKAKAYSIFAKTKENRETFICACEADQESALIWLRNGMS

SEQ ID NO: 186646 - protein, 100 aa, Zea Mays
MEGDSAAPVDFFGAVLIPGGIHLLLALIFLSALCRSEAPSRSPWRSVARLPSPAPISLQLQPPLRADLSHPHGVFPCWFAGARAPSAHQWPQPRSSSAFP

SEQ ID NO: 186647 - protein, 129 aa, Zea Mays
MLQAGMIVGGWDKYEGGQIFSVPLGGTILKQPFAIGGSGSSYLYALLDHEWKEGMSQEEAEKFVVKVVSLAMARDGASGGVVRTVTINADGVKRNFYPGDKLPLWHDELEPQNSLLDILAAGNPDPMVQ

SEQ ID NO: 186648 - protein, 163 aa, Zea Mays
MAPQSLDLGLSLGLGVAAFQPSFCHPAGNDAAEREASPTADERERRCSPAGSPTSSGSGKRVAAERSAGSGSGDEDDDGGARKKLRLSKDQAAVLEECFKTHHTLTPLALAGAWRRRRRRRCPPTGSSCAGSETAGRPPPQCTGPHRLSQRPSGRPDRRSRRH

SEQ ID NO: 186649 - protein, 246 aa, Zea Mays
MAPQSLDLGLSLGLGVAAFQPSFCHPAGNDAAEREASPTADERERRCSPAGSPTSSGSGKRVAAERSAGSGSGDEDDDGGARKKLRLSKDQAAVLEECFKTHHTLTPKQKAALASRLGLRARQVEVWFQNRRARTKLKQTEVDCEYLRRWCEQLAEENRRLGKEVAELRALSAAPAPAAPLTALTIWHWQERGGGGGDDVARPPAVLVRVQRRRGGRRRSVRDLIGSRKGPQGGQIGAVVVTSSLR

SEQ ID NO: 186650 - protein, 220 aa, Zea Mays
MAPQSLDLGLSLGLGVAAFQPSFCHPAGNDAAEREASPTADERERRCSPAGSPTSSGSGKRVAAERSAGSGSGDEDDDGGARKKLRLSKDQAAVLEECFKTHHTLTPKQKAALASRLGLRARQVEVWFQNRRARTKLKQTEVDCEYLRRWCEQLAEENRRLGKELALAGAWRRRRRRRCPPTGSSCAGSETAGRPPPQCTGPHRLSQRPSGRPDRRSRRH

SEQ ID NO: 186651 - protein, 59 aa, Zea Mays
MAYTPLDTLKWVVKEMEMNSVEVRQTVGHPTNSSYELQQLIDKILDLSDWLDMVAIQCA

SEQ ID NO: 186652 - protein, 441 aa, Zea Mays
MAKASGEMATAHDAAAEEEEEETRSKPTDSDISGAAIAVGDDHAERARRPVCYESSRRSDTCEAAGDVRVVGRAQTVLVGALDREWKVKPYCRKHDAFALSHVKEWTLRPLVGGSDGDEAPRCTVNSSATAFVLSTGGFTGNLFHDYTDVLIPAFITARRYGGDVQLLVSSHKPWWAAKYMPVLQQLSRHELVDADADGEVRCYPRVVVGPTFHRELGVGAETKAPGGEEEGVSMPEFRAMLRRALGLERAAAAPSGDRWDVRRRPRLLIISRRQSRRLLNERAMADMATSLGFDVRVGDPEASTDVARFARLVNSADVMVGVHGDGLTNMVFLPAGAVLVQVVPYGGLEWLARGMFRDPAAGMQVHYLEYVVRAGETTLSEEYGEDDPVIRDPAAVHRKGWDALKAVYLDKQDVRPHLGRLRNTLLQALKLLPHGRQSTD

SEQ ID NO: 186653 - protein, 165 aa, Zea Mays
MLGTVVTIAGATVITLYKGTPLLTETAHAEGTTHTLEGTHTLGGWVAGCLIMFANCICLSAWMVLQVPVLKKYPAKLSSFTITLALGFVQLAVVAPFFESDVERWKISSGGELFTILYAVILFFLISSSCVACLANCVRLLFKTFLLRYLIYCLNRSLWLRTCFS

SEQ ID NO: 186654 - protein, 305 aa, Zea Mays
MDVGRPLLPSMAASLVRWSACPLPSLPSSSPSARSVSSSLLSPEFPGRHAPCLAFQARRRSSTGRVHRFQLPLISGARPWLGSGARCPACSPRMRAAALPGCSLCSASISRARPCSMPSAPSCSAPWRLPVPGRPFGRAPHGARISLLPCARSAPCAQLRAPLGRSSLLAPALIQLHYAVSLCRVASAVRRQRPSAGGARSLDVELRPMSASPVRPGLAFGHRVCPARVPGWTGHRCLPGHMCSSRLTYLCSGLHHRCFGVCRDAVPAFCVQWENFVSSRCHQCHARSALCSAQLVESQESARTS

SEQ ID NO: 186655 - protein, 217 aa, Zea Mays
MPPPAPLFLSLASTPPPALMPVHHPRAPQSLTLVPPVASSRKAAAVPACPVASPRHSDYFDPRAPPPPRGDGGYGRPPNGAQDGRVFTSYSIYKGKAALSFDPRPPLFVPLDSGAYKVAKEGFVLLQFAPAVATRQYDWTRKQVFSLSVWEIGTLLTLGPTDSCEFFHDPFKGRRLVSFNVPDYLSSSESPPCCLVLRFPEKMLQMQIIMLCILLFS

SEQ ID NO: 186656 - protein, 180 aa, Zea Mays
MPPPAPLFLSLASTPPPALMPVHHPRAPQSLTLVPPVASSRKAAAVPACPVASPRHSDYFDPRAPPPPRGDGGYGRPPNGAQDGRVFTSYSIYKGKAALSFDPRPPLFVPLDSGAYKVAKEGFVLLQFAPAVATRQYDWTRKQVFSLSVWEIGTLLTLGPTDSCEFFHDPFKGRSGVGMQ

SEQ ID NO: 186657 - protein, 311 aa, Zea Mays
MYHLDRPMYLLGYLANQSRVYLIDKEFNIIGYTLLLSLIEYKTLVMRGDLEHANEILSSIPKAQYNSVAHFLESRGMLEEALEIATDADYKFDLAVQLGKLDVAKAIVIEAQSESKWKQLGELAMSTGKLEMAEECLLQAKDLSGLLLLYSSLGDAEGIEKLASLAKEHGKNNVAFLCLFMLGKVEDCIQLLVDSSRIPEAALMARSYLPSKVPEIVAIWRNDLSKINPKAAESLADPSEYPNLFEDWQVALTVEKSVASQRDHYPPADQYLNHAEKSGMILVEAFKRMQVIEHEEPEDAAEENGEPDQQC

SEQ ID NO: 186658 - protein, 606 aa, Zea Mays
MVIGYDEGAIMIKMGREVPIASMDTGGKIIWAKHNEIQTVNIKTVGAGFEVTDGERLPLAVKELGSCDLYPQSLKHNPNGRFVVVCGDGEYIIYTALAWRNRSFGSALEFVWSSEGEYAIRESTSRIKIFSKSFQEKKTIRPSFSAERIFGGVLLAMCSSDFICFYDWVDCRLIRRIDVNVKNVYWADSGDLVAIASDTSFYILKYNPVDEGVEDAFELLHEVNERVRTGIWVGDCFIYNNSLWRLNYCVGGEVTTMYHLDRPMYLLGYLANQSRVYLIDKEFNIIGYTLLLSLIEYKTLVMRGDLEHANEILSSIPKAQYNSVAHFLESRGMLEEALEIATDADYKFDLAVQLGKLDVAKAIVIEAQSESKWKQLGELAMSTGKLEMAEECLLQAKDLSGLLLLYSSLGDAEGIEKLASLAKEHGKNNVAFLCLFMLGKVEDCIQLLVDSSRIPEAALMARSYLPSKVPEIVAIWRNDLSKINPKAAESLADPSEYPNLFEDWQVALTVEKSVASQRDHYPPADQYLNHAEKSGMILVEAFKRMQVIEHEEPEDAAEENGEPDQQVSHASEEKEMHNTDDADEHEETVSVNGNEGEEQQVLTEHE

SEQ ID NO: 186659 - protein, 579 aa, Zea Mays
MVIGYDEGAIMIKMGREVPIASMDTGGKIIWAKHNEIQTVNIKTVGAGFEVTDGERLPLAVKELGSCDLYPQSLKHNPNGRFVVVCGDGEYIIYTALAWRNRSFGSALEFVWSSEGEYAIRESTSRIKIFSKSFQEKKTIRPSFSAERIFGGVLLAMCSSDFICFYDWVDCRLIRRIDVNVKNVYWADSGDLVAIASDTSFYILKYNRDVVASYLEGGKPVDEGVEDAFELLHEVNERVRTGIWVGDCFIYNNSLWRLNYCVGGEVTTMYHLDRPMYLLGYLANQSRVYLIDKEFNIIGYTLLLSLIEYKTLVMRGDLEHANEILSSIPKAQYNSVAHFLESRGMLEEALEIATDADYKFDLAVQLGKLDVAKAIVIEAQSESKWKQLGELAMSTGKLEMAEECLLQAKDLSGLLLLYSSLGDAEGIEKLASLAKEHGKNNVAFLCLFMLGKVEDCIQLLVDSSRIPEAALMARSYLPSKVPEIVAIWRNDLSKINPKAAESLADPSEYPNLFEDWQVALTVEKSVASQRDHYPPADQYLNHAEKSGMILVEAFKRMQVIEHEEPEDAAEENGEPDQQC

SEQ ID NO: 186660 - protein, 585 aa, Zea Mays
MKGSRRMVIGYDEGAIMIKMGREVPIASMDTGGKIIWAKHNEIQTVNIKTVGAGFEVTDGERLPLAVKELGSCDLYPQSLKHNPNGRFVVVCGDGEYIIYTALAWRNRSFGSALEFVWSSEGEYAIRESTSRIKIFSKSFQEKKTIRPSFSAERIFGGVLLAMCSSDFICFYDWVDCRLIRRIDVNVKNVYWADSGDLVAIASDTSFYILKYNRDVVASYLEGGKPVDEGVEDAFELLHEVNERVRTGIWVGDCFIYNNSLWRLNYCVGGEVTTMYHLDRPMYLLGYLANQSRVYLIDKEFNIIGYTLLLSLIEYKTLVMRGDLEHANEILSSIPKAQYNSVAHFLESRGMLEEALEIATDADYKFDLAVQLGKLDVAKAIVIEAQSESKWKQLGELAMSTGKLEMAEECLLQAKDLSGLLLLYSSLGDAEGIEKLASLAKEHGKNNVAFLCLFMLGKVEDCIQLLVDSSRIPEAALMARSYLPSKVPEIVAIWRNDLSKINPKAAESLADPSEYPNLFEDWQVALTVEKSVASQRDHYPPADQYLNHAEKSGMILVEAFKRMQVIEHEEPEDAAEENGEPDQQC

SEQ ID NO: 186661 - protein, 852 aa, Zea Mays
MVKSFEVSELPVRSAKFISRKQWVVAGADDMFIRVYNYNTMDKVKVFEAHTDYIRCVAVHPTLPYVLSSSDDMLIKLWDWDKGWMCTQIFEGHSHYVMQVTFNPKDINTFASASLDRTTKIWSLGSPDPNFTLDGHQKGVNCVDYFTGGDRPYLITGSDDSTAKVWDYQTKSCVQTLEGHTHNISAVCFHPELPIIITGSEDGTVRIWHSTTYRLENTLNYGLERVWAVGYMKGSRRMVIGYDEGAIMIKMGREVPIASMDTGGKIIWAKHNEIQTVNIKTVGAGFEVTDGERLPLAVKELGSCDLYPQSLKHNPNGRFVVVCGDGEYIIYTALAWRNRSFGSALEFVWSSEGEYAIRESTSRIKIFSKSFQEKKTIRPSFSAERIFGGVLLAMCSSDFICFYDWVDCRLIRRIDVNVKNVYWADSGDLVAIASDTSFYILKYNRDVVASYLEGGKPVDEGVEDAFELLHEVNERVRTGIWVGDCFIYNNSLWRLNYCVGGEVTTMYHLDRPMYLLGYLANQSRVYLIDKEFNIIGYTLLLSLIEYKTLVMRGDLEHANEILSSIPKAQYNSVAHFLESRGMLEEALEIATDADYKFDLAVQLGKLDVAKAIVIEAQSESKWKQLGELAMSTGKLEMAEECLLQAKDLSGLLLLYSSLGDAEGIEKLASLAKEHGKNNVAFLCLFMLGKVEDCIQLLVDSSRIPEAALMARSYLPSKVPEIVAIWRNDLSKINPKAAESLADPSEYPNLFEDWQVALTVEKSVASQRDHYPPADQYLNHAEKSGMILVEAFKRMQVIEHEEPEDAAEENGEPDQQASEEKEMHNTDDADEHEETVSVNGNEGEEQQVLTEHE

SEQ ID NO: 186662 - protein, 466 aa, Zea Mays
MVKSFEVSELPVRSAKFISRKQWVVAGADDMFIRVYNYNTMDKVKVFEAHTDYIRCVAVHPTLPYVLSSSDDMLIKLWDWDKGWMCTQIFEGHSHYVMQVTFNPKDINTFASASLDRTTKIWSLGSPDPNFTLDGHQKGVNCVDYFTGGDRPYLITGSDDSTAKVWDYQTKSCVQTLEGHTHNISAVCFHPELPIIITGSEDGTVRIWHSTTYRLENTLNYGLERVWAVGYMKGSRRMVIGYDEGAIMIKMGREVPIASMDTGGKIIWAKHNEIQTVNIKTVGAGFEVTDGERLPLAVKELGSCDLYPQSLKHNPNGRFVVVCGDGEYIIYTALAWRNRSFGSALEFVWSSEGEYAIRESTSRIKIFSKSFQEKKTIRPSFSAERIFGGVLLAMCSSDFICFYDWVDCRLIRRIDVNVKNVYWADSGDLVAIASDTSFYILKYNVESLWMKVSKMLLSCFTRSMSE

SEQ ID NO: 186663 - protein, 646 aa, Zea Mays
MVKSFEVSELPVRSAKFISRKQWVVAGADDMFIRVYNYNTMDKVKVFEAHTDYIRCVAVHPTLPYVLSSSDDMLIKLWDWDKGWMCTQIFEGHSHYVMQVTFNPKDINTFASASLDRTTKIWSLGSPDPNFTLDGHQKGVNCVDYFTGGDRPYLITGSDDSTAKVWDYQTKSCVQTLEGHTHNISAVCFHPELPIIITGSEDGTVRIWHSTTYRLENTLNYGLERVWAVGYMKGSRRMVIGYDEGAIMIKMGREVPIASMDTGGKIIWAKHNEIQTVNIKTVGAGFEVTDGERLPLAVKELGSCDLYPQSLKHNPNGRFVVVCGDGEYIIYTALAWRNRSFGSALEFVWSSEGEYAIRESTSRIKIFSKSFQEKKTIRPSFSAERIFGGVLLAMCSSDFICFYDWVDCRLIRRIDVNVKNVYWADSGDLVAIASDTSFYILKYNRDVVASYLEGGKPVDEGVEDAFELLHEVNERVRTGIWVGDCFIYNNSLWRLNYCVGGEVTTMYHLDRPMYLLGYLANQSRVYLIDKEFNIIGYTLLLSLIEYKTLVMRGDLEHANEILSSIPKAQYNSVAHFLESRGMLEEALEIATDADYKFDLAVQLGKLDVAKAIVIEAQSESKWKQLGELAMSTGKRWRRNAFFKRRI

SEQ ID NO: 186664 - protein, 903 aa, Zea Mays
MPLRLEIKRKFAQRSERVKSVDLHPTEPWILSSLYSGSVCIWDYQAQAMVKSFEVSELPVRSAKFISRKQWVVAGADDMFIRVYNYNTMDKVKVFEAHTDYIRCVAVHPTLPYVLSSSDDMLIKLWDWDKGWMCTQIFEGHSHYVMQVTFNPKDINTFASASLDRTTKIWSLGSPDPNFTLDGHQKGVNCVDYFTGGDRPYLITGSDDSTAKVWDYQTKSCVQTLEGHTHNISAVCFHPELPIIITGSEDGTVRIWHSTTYRLENTLNYGLERVWAVGYMKGSRRMVIGYDEGAIMIKMGREVPIASMDTGGKIIWAKHNEIQTVNIKTVGAGFEVTDGERLPLAVKELGSCDLYPQSLKHNPNGRFVVVCGDGEYIIYTALAWRNRSFGSALEFVWSSEGEYAIRESTSRIKIFSKSFQEKKTIRPSFSAERIFGGVLLAMCSSDFICFYDWVDCRLIRRIDVNVKNVYWADSGDLVAIASDTSFYILKYNRDVVASYLEGGKPVDEGVEDAFELLHEVNERVRTGIWVGDCFIYNNSLWRLNYCVGGEVTTMYHLDRPMYLLGYLANQSRVYLIDKEFNIIGYTLLLSLIEYKTLVMRGDLEHANEILSSIPKAQYNSVAHFLESRGMLEEALEIATDADYKFDLAVQLGKLDVAKAIVIEAQSESKWKQLGELAMSTGKLEMAEECLLQAKDLSGLLLLYSSLGDAEGIEKLASLAKEHGKNNVAFLCLFMLGKVEDCIQLLVDSSRIPEAALMARSYLPSKVPEIVAIWRNDLSKINPKAAESLADPSEYPNLFEDWQVALTVEKSVASQRDHYPPADQYLNHAEKSGMILVEAFKRMQVIEHEEPEDAAEENGEPDQQVSHASEEKEMHNTDDADEHEETVSVNGNEGEEQQVLTEHE

SEQ ID NO: 186665 - protein, 70 aa, Zea Mays
MATLLSSASSPPTPSSTNLPCTLVAPASPSASSDTTPTPSSSHPQQLGKFVIDTLTVCWCVCVEEEPDGG

SEQ ID NO: 186666 - protein, 124 aa, Zea Mays
MAETEIDEGDGNAVPSPIDDIGASSSAPRPRKKARVTGKEEAGLFGAFKDGAERLAMAIEKAGSDDLPPDLLQTLQSIPGFDDTHKAFYFAYLVKNPRLARQFPTLPLTYQISLLARFVSENFP

SEQ ID NO: 186667 - protein, 243 aa, Zea Mays
MESEGAGEHFVEQADGSGHVVWTSAMSAYMLSNLASLVVEGIRTSTGFKKVHLNMCAKALNDYFKMKLTGEQDHKSDAEFLNKPLENYKEMFIVFGNNMAIGKYAKGSSEALGTEDRKCMAETEIDEGDGNAVPSPIDDIGASSSAPRPRKKARVTGKEEAGLFGAFKDGAERLAMAIEKAGSDDLPPDLLQTLQSIPGFDDTHKAFYFAYLVKNPRLARQFPTLPLTYQISLLARFVSENFP

SEQ ID NO: 186668 - protein, 192 aa, Zea Mays
MLALASGSGSSSSSSRNIYHALLHLHCTTARELNVLVLVLPLPNTSDDSHCLFEICRVLSLVKMESEGAGEHFVEQADGSGHVVWTSAMSAYMLSNLASLVVEGIRTSTGFKKVHLNMCAKALNDYFKMKLTGEQVKNHLSILLLYFSILLLHVLLIYFSILLLHVLLLYFSILLLHVPLFVLLPLFFRSFL

SEQ ID NO: 186669 - protein, 319 aa, Zea Mays
MCVEEQVAMFLNTVGHNLRNRLVGTNYGRSGETVSRYFNKVLRAIGELRAELIRPPSLETPSKIAGNPRWDPYFKKMESEGAGEHFVEQADGSGHVVWTSAMSAYMLSNLASLVVEGIRTSTGFKKVHLNMCAKALNDYFKMKLTGEQDHKSDAEFLNKPLENYKEMFIVFGNNMAIGKYAKGSSEALGTEDRKCMAETEIDEGDGNAVPSPIDDIGASSSAPRPRKKARVTGKEEAGLFGAFKDGAERLAMAIEKAGSDDLPPDLLQTLQSIPGFDDTHKAFYFAYLVKNPRLARQFPTLPLTYQISLLARFVSENFP

SEQ ID NO: 186670 - protein, 337 aa, Zea Mays
MCVEEQVAMFLNTVGHNLRNRLVGTNYGRSGETVSRYFNKVLRAIGELRAELIRPPSLETPSKIAGNPRWDPYFKKMESEGAGEHFVEQADGSGHVVWTSAMSAYMLSNLASLVVEGIRTSTGFKKVHLNMCAKALNDYFKMKLTGEQVKNHLSILLLYFSILLLHDHKSDAEFLNKPLENYKEMFIVFGNNMAIGKYAKGSSEALGTEDRKCMAETEIDEGDGNAVPSPIDDIGASSSAPRPRKKARVTGKEEAGLFGAFKDGAERLAMAIEKAGSDDLPPDLLQTLQSIPGFDDTHKAFYFAYLVKNPRLARQFPTLPLTYQISLLARFVSENFP

SEQ ID NO: 186671 - protein, 205 aa, Zea Mays
MCVEEQVAMFLNTVGHNLRNRLVGTNYGRSGETVSRYFNKVLRAIGELRAELIRPPSLETPSKIAGNPRWDPYFKKMESEGAGEHFVEQADGSGHVVWTSAMSAYMLSNLASLVVEGIRTSTGFKKVHLNMCAKALNDYFKMKLTGEQVKNHLSILLLYFSILLLHVLLIYFSILLLHVLLLYFSILLLHVPLFVLLPLFFRSFL

SEQ ID NO: 186672 - protein, 336 aa, Zea Mays
MLALASGSGSSSSSSRNIYHALLHLHCTTARELNVLVLVLPLPNTSDDSHCLFEICRVLSLVKMESEGAGEHFVEQADGSGHVVWTSAMSAYMLSNLASLVVEGIRTSTGFKKVHLNMCAKALNDYFKMKLTGEQVKNHLSILLLYFSILLLHVLLIYFSILLLHDHKSDAEFLNKPLENYKEMFIVFGNNMAIGKYAKGSSEALGTEDRKCMAETEIDEGDGNAVPSPIDDIGASSSAPRPRKKARVTGKEEAGLFGAFKDGAERLAMAIEKAGSDDLPPDLLQTLQSIPGFDDTHKAFYFAYLVKNPRLARQFPTLPLTYQISLLARFVSENFP

SEQ ID NO: 186673 - protein, 190 aa, Zea Mays
MQLIVLVVLPLPSCYFYMQDHKSDAEFLNKPLENYKEMFIVFGNNMAIGKYAKGSSEALGTEDRKCMAETEIDEGDGNAVPSPIDDIGASSSAPRPRKKARVTGKEEAGLFGAFKDGAERLAMAIEKAGSDDLPPDLLQTLQSIPGFDDTHKAFYFAYLVKNPRLARQFPTLPLTYQISLLARFVSENFP

SEQ ID NO: 186674 - protein, 159 aa, Zea Mays
MRVIWRRGEPQTIFRWQRCPAKTSGRIRPRPSRDRKKSSCLPSLPYPLSFLSWRRRRRRRAAVQSRGQQGAAVRPGAGERPSVQRRLAAIRPGELRAGVRPNELRASVQASVQRAAQLFYAQHIPRTTVDFDLRFTYVLAGWEGSTHDALVLRDALERE

SEQ ID NO: 186675 - protein, 108 aa, Zea Mays
MLALASGSGSSSSSSRNIYHALLHLHCTTARELNVLVLVLPLPNTSDDSHCLFEICRVLSLVVSNLMRGQLYSCVVLWEIYSCVVLKKNYLKQKSAKNTILLYTICFL

SEQ ID NO: 186676 - protein, 362 aa, Zea Mays
MAYHHNLPGLLPNCIYGDEITITLLVSRNGFELCARTSQCIGIIGTRHSSQAYAMRNIHRFGAEISLFTCLLPKPSKKLACNTNWTLILYMIISFPVWFSFATALLFYREGSHDSLSETLSKEPTAESISDVSLVQRAAFYLSWVLCPSNDDQCEMLSNNILEISHSWARNNKKCLSYQITMNHRRKLQIPTAAKSEKFHVPINTAAALIAERWALIGAYLIFIWLDVVEDMSSLIFGCEDRCHRSVSQLRNKTAPYPAQGSRFARLAPNPDTQDHQLRIYQANGLPSSLNTLLVLVLVSSRYMVLGNEERIVYSERCTFPLLVLVETPEHKWTAVCRTSALISAAEFDIYLYSVAALSLSV

SEQ ID NO: 186677 - protein, 272 aa, Zea Mays
MIISFPVWFSFATALLFYREGSHDSLSETLSKEPTAESISDVSLVQRAAFYLSWVLCPSNDDQCEMLSNNILEISHSWARNNKKCLSYQITMNHRRKLQIPTAAKSEKFHVPINTAAALIAERWALIGAYLIFIWLDVVEDMSSLIFGCEDRCHRSVSQLRNKTAPYPAQGSRFARLAPNPDTQDHQLRIYQANGLPSSLNTLLVLVLVSSRYMVLGNEERIVYSERCTFPLLVLVETPEHKWTAVCRTSALISAAEFDIYLYSVAALSLSV

SEQ ID NO: 186678 - protein, 270 aa, Zea Mays
MEISRVLGGGIVPGSLILVGGDPGVGKSSLMLQLASNILEGFKAKESSPVVYVSGEESIEQIGNRADRMSITSSNLYLYSGTDIEDILDKIQPLSPRALIIDSIQTVYVRSFAGSAGNLSQVKECTSALLRFAKLTNIPVFLIGHVTKTGDIAGPRLLEHIVDVVLYMEGERCSSHRLLRSVKNRFGSADELGVFEMAEFGLQAVLNPSQMFLTEHDSDSEIMAGLAVAVILDGSRTFALEVQALCVSGYHRSGQVVGIPQSRADVIISA

SEQ ID NO: 186679 - protein, 97 aa, Zea Mays
MHQRFSTQLLSPNASYKVIKILKQQGGGKCTGACLSNTRLVLLGDVHLMIILVLALDQAGSSISITMRSSPHLRSTWLVFRITRLFIVPHEMHDAHV

SEQ ID NO: 186680 - protein, 60 aa, Zea Mays
MHTAYFSLSLGSPGPLACALSLSPSPSPPPPTYAKCPDLHPRDLRRQRTPTTRVLHDSNP

SEQ ID NO: 186681 - protein, 324 aa, Zea Mays
MKDKDGYTMHTLAQAQAHEASGYFFCLEDRALLCRDCDVAIHTVNSFVSVHQRFLLTGVQVGLDPADPVPPIAEKHVNASGGSVKQSVRHLPRRSPGVQFSVEGSASVPSKNVSNGDYSRQNSVPTARAEVVDWTKNNTTIQSVESPPKYMSEESPTLLQSSQTTTVFSNQINGNSDGTYHLSFSSGNVTDSLPDWPVDEFFSNSEYVPNLGFSEHGSSKGDNAKLESAGGSLQCRLAEGSIAEELLGQVPGLITDDYMSRVPENSWTVPEVPSPPTASGLNWHGNLCFPAYDSTMFVPEITSLQNSQNQFTVPSSFKRRRREY

SEQ ID NO: 186682 - protein, 310 aa, Zea Mays
MRIQCNACGAAEARVLCCADEAALCVACDEEVHAANKLAGKHQRVQLLTDSATAAASPAPAVPKCDICQEASGYFFCLEDRALLCRDCDVAIHTVNSFVSVHQRFLLTGVQVGLDPADPVPPIAEKHVNASGGSVKQSVRHLPRRSPGVQFSVEGSASVPSKNVSNGDYSRQNSVPTARAEVVDWTKNNTTIQSVESPPKYMSEESPTLLQSSQTTTVFSNQINGNSDGTYHLSFSSGNVTDSLPDWPVDEFFSNSEYVPNLGFSEHGSSKASCHVYIFFFYLFFLHIINSLLASTLRSFRLLINIGIVS

SEQ ID NO: 186683 - protein, 297 aa, Zea Mays
MDGGGQPPDTEMTDAGLGGGGQPPPPPQQPAGGAGMMENIHATLSHGGRFIQYNIFGNVFEVTSKYKPPILPIGKGAYGIVCSALNSETAEQVAIKKIANAFDNKIDAKRTLREIKLLRHMDHENIVAIRDIIPPPLREAFNDVYIAYELMDTDLHQIIRSNQALSEEHCQYFLYQILRGLKYIHSANVLHRDLKPSNLLLNANCDLKICDFGLARTTSETDFMTEYVVTRWYRAPELLLNSSEYTAAIDVWSVGCIFMELMDRKPLFPGRDHVHQLRLLMELKAHLHTLTWHHFMT

SEQ ID NO: 186684 - protein, 69 aa, Zea Mays
MGRRGVDNFTLNWPLLITLFQILLPLLHMSPWINIMWFRLEVCKVTRRVGLYQIRSLSNDIWHSMCIKS

SEQ ID NO: 186685 - protein, 278 aa, Zea Mays
MGWKDYFMRVVPTALGTALDINLSNASLVFISVTFATMCKSASPIFLLLFAFAFRLENPSIKLLGIIVVISTGVLLTVSKETEFDFWGFIFVTLAAVMSGFRWSMTQILLQKDNYGLKNPITLMSHVTPVMAIATMILSLLLDPWSEFQKNSYFDSPWHVMRSCLLMLIGGSLAFFMVLTEYILISATSAITVTIAGVVKEAVTILVAVFYFHDEFTWLKGFGLFTIMVGVSLFNWYKYERFKRGQINEDDVSSPFTGDVKYIIIDDLEYQNEFEEDT

SEQ ID NO: 186686 - protein, 179 aa, Zea Mays
MTTCILTGATPLLAQRSRYGASHVLRRCPPRLRLFLQRHRQGDACPPPRHPPPSPRTPPSPADHSRLYPSGSRARTHITRTMARGSGTRPRRLLEQRNLTERSNANLQSQIPAARKESSHKWYGSIEVIWICDAIEIHGFLGSVVYMHGLKIGVTSSRGWLSICCLASGLKAAAGITWL

SEQ ID NO: 186687 - protein, 107 aa, Zea Mays
MPVARALRKRGRVVRRRIEKKMTGSRVQHGVPDVLRVRRRQVQLPEQRAVRHAGRLRVLQPGGAPQLGRHPPHRGRVQADHRRLAQRALLPPGHSPQLKRQGGPINY

SEQ ID NO: 186688 - protein, 86 aa, Zea Mays
MSYEWRSIMIQINKNKGDIQSCTNYQRIKLISHTMKLCERVIKHHQREIMRVSMNQFGFMSKRSTMEAIFLARQVMGHYREQKDLK

SEQ ID NO: 186689 - protein, 170 aa, Zea Mays
MEGESDTPASMEGKSSRSALAASVDRIIGNMLPEAPCKSLDRHWRSPRPTVGCLPNCCASLTTPVLVVLLTVLDTQLPVKQAFKIMHDEGLALVPLWDDRQGTITGMLTASDFVLILRKLQRNIQVISNEEPIFAWKEAKLQFYGGPDGAAMQRRPLIHVLLHIFANSFI

SEQ ID NO: 186690 - protein, 118 aa, Zea Mays
MSRRRSPPRRADPAVLAPLSSLAAIPALSRPDHRHPIRVRALQNPIRLDPSLHGRGVLSTRLHVRNPIRIPLDLRPCCPWKENQTPQPPWKGSPLDLRWLPVSTASLATCYPRLPVRV

SEQ ID NO: 186691 - protein, 135 aa, Zea Mays
MFTLASWEFHICATSPYPCTSAWFLRVELPAPRQFLARCQRARQPPAPERAPSTTRYLCFHPVASAQATGRRRRVRLVALVLASASTSALHLLIAPHRARHHPQPHAALTGQHPPRRVELLNVAPQRRCCLLLAL

SEQ ID NO: 186692 - protein, 223 aa, Zea Mays
MTLAKAQSDDSGPITLSPIGDSESGAPASRLAVSSSSSCTSIPRLPSCASSAPTKATATAGGGDEAEAAGGPLGWPDPVLRPQDMFLVLILTRLSLELAQENAADLELDIDLVWSDIKNLNLKGVHVDTVVMNPPFGTRRNGADMEFLSMALQVASQAVYSLHKTSTREHIKKAALRGFNAISAEVLCELRYNLPRTYKLHKKKEIDIAVDLWRFVPNAQRRS

SEQ ID NO: 186693 - protein, 129 aa, Zea Mays
MKLKQLEGLLGGLTQFSDPKVLLTAPPPPPPPLGWPFFLPFSYPARFRLAQPRQKGGGKAEEYLTFATNGVFFYNEMALLGVAGAGAVCDGPSHRVADALHDMFLVLILTHSHLNLLKKMLLIWSWTSI

SEQ ID NO: 186694 - protein, 74 aa, Zea Mays
MLSEHVLGIDIDPQSLELAQENAADLELDIDLVWSDIKNLNLKGKSKWEVLSLADQTSSSTYTSFGSSFELLLS

SEQ ID NO: 186695 - protein, 283 aa, Zea Mays
MDEAAIDDLIRRLLEARGGRTPRNAQVTDAEIRRLCATAKDVFLSQPNLLELEAPIKICGDVHGQYSDLLRLFEYGGYPPDANYLFLGDYVDRGKQSIETICLLLAYKIKYPENFFLLRGNHECASINRIYGFFDECKRRFNNMDQIRNISRPVDVPDVGLLCDLLWSDPDKEIVGWGENDRGVSYTFGADIVAEFLQKHDLDLICRAHQVVEDGYEFFANRQLVTIFSAPNYCGEFDNAGALMSIDDSLVCSFQILKPSEKKRKAGAENMPKPGFLVSLTRC

SEQ ID NO: 186696 - protein, 552 aa, Zea Mays
MNQPGSNRKKNGSSGRKTKSQQSESSSTARVISESSDSEVHPISNKSPQHSPSPSKVKIGPKGGIRKITNRRIAERILMSVKKGQREMASSDSNFVSGYLLARDMKLRSDTRNGNKELIVSSQQSSPSTRSSKKKSTPQIGNSSAFAEAHNDSTEEANNRHSATDGYDSSRKEEFVNENLCKQEVYLRSWKAIEQGLLVKGLEIFGRNSCLIARNLLGGMKTCKDVFQYMNYIENNSASGALSGVDSLVKGYIKGTELRTRSRYFRRRGKVRRLKYTWKSAGYNFKRITERKDQPCRQYNPCGCQSTCGKQCPCLSNGTCCEKYCGCPKICKNRFRGCHCAKSQCRSRQCPCFAADRECDPDVCRNCWVGCGDGTLGVPNQRGDNYECRNMKLLLKQQQRVLLGRSDVSGWGAFLKNSVSKHEYLGEYTGELISHKEADKRGKIYDRENSSFLFNLNNEYVLDAYRMGDKLKFANHAPDPNCYAKVIMVTGDHRVGIFAKERILAGEELFYDYRYEPDRAPAWARKPEASGAKDDGQPFNGRAKKLAQNNRG

SEQ ID NO: 186697 - protein, 796 aa, Zea Mays
MEAEAAAAVVASSASASASAGRSRPSSSAAQVTSNSAVRAGEENAASLYVLSVIDSLKKRITADRLTYIKNRIGENKTNISSYTQRTYNLSKNRQISTSKGTDSASNLLTKRQDDALCTLHSLDIIPVDKDGGTFQDESPFSSSNVMFGGNLGPKNAIIRPIKLPEVPKLPPYTTWIFLDRNQRMTEDQSVLGRRRIYYDTSCGEALICSDSEDEAIEDEEEKKEFKHSEDHIIRMTVQECGMSDAVLQTLARHMERAADDIKARYEILHGEKTKDSCKKGTEHNVKVEDLYCDKDLDAALDSFDNLFCRRCLVFDCKLHGCSQDLVFPTEKQPAWSGVDDSVPCGIHCHKLASEPDAAAGADHMLFDVEEPTHSSDNVMNQPGSNRKKNGSSGRKTKSQQSESSSTARVISESSDSEVHPISNKSPQHSPSPSKVKIGPKGGIRKITNRRIAERILMSVKKGQREMASSDSNFVSGYLLARDMKLRSDTRNGNKELIVSSQQSSPSTRSSKKKSTPQIGNSSAFAEAHNDSTEEANNRHSATDGYDSSRKEEFVNENLCKQEVYLRSWKAIEQGLLVKGLEIFGRNSCLIARNLLGGMKTCKDVFQYMNYIENNSASGALSGVDSLVKGYIKGTELRTRSRYFRRRGKVRRLKYTWKSAGYNFKRITERKDQPCRQYNPCGCQSTCGKQCPCLSNGTCCEKYCGCPKICKNRFRGCHCAKSQCRSRQCPCFAADRECDPDVCRNCWVGCGDGTLGVPNQRGDNYECRNMKLLLKQQQRVLLGRSDVSGWGAFLKC

SEQ ID NO: 186698 - protein, 664 aa, Zea Mays
MKFCMVRKLRILARKGLSIMSKWKICTVTKIWMQHWILLTISSVDDVFDCKLHGCSQDLVFPTEKQPAWSGVDDSVPCGIHCHKLASEPDAAAGADHMLFDVEEPTHSSDNVMNQPGSNRKKNGSSGRKTKSQQSESSSTARVISESSDSEVHPISNKSPQHSPSPSKVKIGPKGGIRKITNRRIAERILMSVKKGQREMASSDSNFVSGYLLARDMKLRSDTRNGNKELIVSSQQSSPSTRSSKKKSTPQIGNSSAFAEAHNDSTEEANNRHSATDGYDSSRKEEFVNENLCKQEVYLRSWKAIEQGLLVKGLEIFGRNSCLIARNLLGGMKTCKDVFQYMNYIENNSASGALSGVDSLVKGYIKGTELRTRSRYFRRRGKVRRLKYTWKSAGYNFKRITERKDQPCRQYNPCGCQSTCGKQCPCLSNGTCCEKYCGCPKICKNRFRGCHCAKSQCRSRQCPCFAADRECDPDVCRNCWVGCGDGTLGVPNQRGDNYECRNMKLLLKQQQRVLLGRSDVSGWGAFLKNSVSKHEYLGEYTGELISHKEADKRGKIYDRENSSFLFNLNNEYVLDAYRMGDKLKFANHAPDPNCYAKVIMVTGDHRVGIFAKERILAGEELFYDYRYEPDRAPAWARKPEASGAKDDGQPFNGRAKKLAQNNRG

SEQ ID NO: 186699 - protein, 670 aa, Zea Mays
MEAEAAAAVVASSASASASAGRSRPSSSAAQVTSNSAVRAGEENAASLYVLSVIDSLKKRITADRLTYIKNRIGENKTNISSYTQRTYNLSKNRQISTSKGTDSASNLLTKRQDDALCTLHSLDIIPVDKDGGTFQDESPFSSSNVMFGGNLGPKNAIIRPIKLPEVPKLPPYTTWIFLDRNQRMTEDQSVLGRRRIYYDTSCGEALICSDSEDEAIEDEEEKKEFKHSEDHIIRMTVQECGMSDAVLQTLARHMERAADDIKARYEILHGEKTKDSCKKGTEHNVKVEDLYCDKDLDAALDSFDNLFCRRCLVFDCKLHGCSQDLVFPTEKQPAWSGVDDSVPCGIHCHKLASEPDAAAGADHMLFDVEEPTHSSDNVMNQPGSNRKKNGSSGRKTKSQQSESSSTARVISESSDSEVHPISNKSPQHSPSPSKVKIGPKGGIRKITNRRIAERILMSVKKGQREMASSDSNFVSGYLLARDMKLRSDTRNGNKELIVSSQQSSPSTRSSKKKSTPQIGNSSAFAEAHNDSTEEANNRHSATDGYDSSRKEEFVNENLCKQEVYLRSWKAIEQGLLVKGLEIFGRNSCLIARNLLGGMKTCKDVFQYMNYIENNSASGALSGVDSLVKGYIKGTELRTRSRYFRRRGKVRRLKYTWKSAVSMSFKWDML

SEQ ID NO: 186700 - protein, 111 aa, Zea Mays
MQHGILIWHAQFCLNAAKATRGGHVQVQRQTMATQVGVDASFTLRARCTASGWPRRGGGGGNECCAWLIKRAVAVTQRDHVTPGWPADATVHHARDATEPRGVRCRRGPSS

SEQ ID NO: 186701 - protein, 1308 aa, Zea Mays
MWNGVPPPPPPPLQMAAAPPPPGTTVPGAGQPPPPPPPPAGASQGGKPLTPMELEAQLVEKARKWHQLNSKRYGDKRKFGFVEAQKEDMPPEHVRKITRDHGDMTSKKYRHDKRVYLGALKFVPHAVYKLLENMPMPWEQVRHVKILYHITGAITFVNEIPWVVEPIYLAQWGTMWIMMRREKRDRRHFKRMRFPPFDDEEPPLDYADNLLDVEPLEAIQLELDEEEDAAVYEWFYDHKPLMKTKLINGPSYRKWHLSLPIMATLYRLAGQLLSDLIDRNYFYLFDMESFFTAKALNMCIPGGPKFEPLYRDMEKGDEDWNEFNDINKLIIRQPLRTEYRIAFPHLYNNRPRKVKLGIYHTPMIMYIKTEDPDLPAFYYDPLINPITSTNKVDRRERKAAEEEDDEDFCLPEDVEPLLKQTELYTDTTAAGISLLFAPKPFNMRSGRTRRAEDIPLVSEWYKEHCPPAYPVKVRVSYQKLLKCYVLNELHHRPPKAQKKKHLFRSLQATKFFQTTELDWAEAGLQVCKQGYNMLNLLIHRKNLNYLHLDYNFNLKPVKTLTTKERKKSRFGNAFHLCREILRLTKLVVDANIQFRLGNVDAFQLADGLQYIFSHVGQLTGMYRYKYRLMRQIRMCKDLKHLIYYRFNTGPVGKGPGCGFWAPMWRVWLFFLRGVMIGIDLAYNLHSAFGNWFPGSKPLLQQAMNKIMKSNPALYVLRERIRKGLQLYSSEPTEPYLSSQNYGEIFSNQIIWFVDDTNVYRVTIHKTFEGNLTTKPINGAIFIFNPRTGQLFLKVIHTSVWAGQKRLGQLAKWKTAEEVAALVRSLPVEEQPKQIIVTRKGMLDPLEVHLLDFPNIVIKGSELQLPFQACLKIEKFGDLILKATEPQMVLYNIYDDWLKSISSYTAFSRIVLILRALHVNNEKAKMLLKPDKTIVTEPHHIWPTLNDEQWLKVECALRDLILSDYAKKNNVNTSALTQSEMRDIILGAEIAPPSQQRQQIAEIEKQSRETTQLTAVTTRTTNVHGDELIITTTSPYEQQAFASKTDWRVRAISATNLYLRVNHIYVNSDDIKETGYTYIMPKNILKKFICIADLRTQIAGFLYGLSPQDNPQVKEIRCIAMPPQHGTHQMVTLPANLPEHEFLNDLEPLGWMHTQPNEAPQLSPQDLTSHAKILENNKQWDGEKCIILTCSFTPGSCSLTAYKLTPSGYEWGRSNKDNGSNPHGYLPTHYEKVQMLLSDRFLGFYMVPDNAPWNFNFMGVKHDPQMKYNMKLGMPRDFYHEDHRPTHFLEFSNIEEGEAAEGDREDTFT

SEQ ID NO: 186702 - protein, 100 aa, Zea Mays
MAYLLRRHDNTTSPPCPLRWRPPYLQRPGARVEDAHQCTALPFPTLLSPLKGRSLLLLTIGPCILHPIRWCTCPCYCSPLDISEANGINYAKKIFRLLQN

SEQ ID NO: 186703 - protein, 80 aa, Zea Mays
MAYLLRRHDNTTSPPCPLRWRPPYLQRPGARVEDAHQCTALPFPTLLSPLKGRSLLLLTIGPCILHPIRWCTCPCYCSPL

SEQ ID NO: 186704 - protein, 80 aa, Zea Mays
MYHVVVSLSSRLSATPAPRPYLALRPHHRASWPIFFDDTTTRPLRPVLYDGGPLISSVQGQGWRTHTNAPPFPFLLFSLL

SEQ ID NO: 186705 - protein, 75 aa, Zea Mays
MFYVVQIESDGPCFPTDGDRLKGHVLDRLCKNFFSFIKKVGLEDSYFSYFEKRNNKKLSGEPLYTSVLYTLASIK

SEQ ID NO: 186706 - protein, 175 aa, Zea Mays
MSRRYDSRTTIFSPEGRLYQRYALSYQEPIPVEQLVQSLCDTKQGYTQFGGLRPFGVSFLFAGWDKHHGFQLYMSDPSGNYGGWKAAAVGANSQAAQSMLKQDYKDALTREEAVGLALKVLSKTMDSTSLTAEKLELAEVFLQPDTGEVQYQVCSPEALGKLLANSGLTQPTPEA

SEQ ID NO: 186707 - protein, 715 aa, Zea Mays
MYRHFNERSGLMAPLVAEDVYEIIMNNAARLDSEIIYDRDFDYDYFGFKTLERSYLLKLGGKVVERPQHMLMRVSVGIHKEDIESAIRTYHLMSQRWFTHASPTLFNAGTPRPQLSSCFLICMKDDSIEGIYETLKECAVISKSAGGIGVSVHNIRATGSYIRGTNGTSNGIVPMLRVFNDTARYVDQGGGKRKGAFAVYLEPWHADIFEFLDLRKNHGKEENRARDLFYALWVPDLFMQRVQSNGEWSLFCPNEAPGLADCWGEEFDNLYKKYESQGKAKKVVPAQTLWFDILKAQIETGTPYMLYKDTCNRKSNQQNLGTIKSSNLCTEIIEFTSPTETAVCNLASIALPRFVREKGVPLESHPSKLVGSSDSKNRYFDFEKLAEVTSTVTYNLNKIIDINYYPVETAKRSNMRHRPIGIGVQGLADTFILLGMPFDSLEAHQLNKDIFETIYYHALKSSAELAVKEGPYETYEGSPVSKGILQPDMWNVVPSTRWNWPSLRETISKAGIRNSLLVAPMPTASTSQILGNNECFEPYTSNIYSRRVLSGEFVVVNKHLLHDLTEMGIWTPTLKNQIIYDDGSVQKIAEIPDDLKAIYKTVWEIKQKTLVDMAVDRGCYIDQSQSLNVHMEQANFGKLTSLHFHAWSKGLKTGMYYLRTRAAADAIKFTVDTTLLKENGNGMNDGKPTEEDVEAKMAQMVCSFNNREECLACGS

SEQ ID NO: 186708 - protein, 603 aa, Zea Mays
MTWFRAASGAARLALRRSLATRTPPAAATRCGRCFHSTAMRPRSAAPVPRAVPLSRLSDSFLDGTSSVYLEELQRTWEADPSSVDESWDNFFRNFVAQASPSAGVSGQTIQESMQLLLLVRAYQVNGHMMAKLDPLGLDDRAVPEDLRLGLYGFTEADLDREFFLGVWRMSGFLSENRPVLTLREILNKLQQAYCGPIGYEYMHIPDRDKCNWLREKIETAKPKEYNKDRRLVMLDRLIWSTQFENFLATKWATAKRFGLEGGETLIPGMKEMFDRAADLGVENIVIGMPHRGRLNVLGNVVRKPLSQIFSEFTGGTRPVEGEDGLYTGTGDVKYHLGTSYDRPTRGGNRIHLSLVANPSHLEAVDPVVIGKTRAKQFYSNDADRTKNMGILIHGDGSFAGQGVVYETLHLSALPNYTTGGTIHIVVNNQVAFTTDPRAGRSSQYCTDVAKALNAPIFHVNGDDLEAVVCVCELAAEWRQTFHSDVVVDLICYRRFGHNEIDEPSFTQPKMYQVIKNHPSSLKLYEQKLLGTGEVMKEDVQRIHDKVNRILNEEFAKSKDYVPNKRDWLSAYWTGFKSPEQISRVRNTGQLLHCLKTSNHTEQ

SEQ ID NO: 186709 - protein, 1005 aa, Zea Mays
MTWFRAASGAARLALRRSLATRTPPAAATRCGRCFHSTAMRPRSAAPVPRAVPLSRLSDSFLDGTSSVYLEELQRTWEADPSSVDESWDNFFRNFVAQASPSAGVSGQTIQESMQLLLLVRAYQVNGHMMAKLDPLGLDDRAVPEDLRLGLYGFTEADLDREFFLGVWRMSGFLSENRPVLTLREILNKLQQAYCGPIGYEYMHIPDRDKCNWLREKIETAKPKEYNKDRRLVMLDRLIWSTQFENFLATKWATAKRFGLEGGETLIPGMKEMFDRAADLGVENIVIGMPHRGRLNVLGNVVRKPLSQIFSEFTGGTRPVEGEDGLYTGTGDVKYHLGTSYDRPTRGGNRIHLSLVANPSHLEAVDPVVIGKTRAKQFYSNDADRTKNMGILIHGDGSFAGQGVVYETLHLSALPNYTTGGTIHIVVNNQVAFTTDPRAGRSSQYCTDVAKALNAPIFHVNGDDLEAVVCVCELAAEWRQTFHSDVVVDLICYRRFGHNEIDEPSFTQPKMYQVIKNHPSSLKLYEQKLLGTGEVMKEDVQRIHDKVNRILNEEFAKSKDYVPNKRDWLSAYWTGFKSPEQISRVRNTGVKPEILKRVGQAITTLPENFKPHRAVKKIFELRAAMIESGQGIDWAVAEALAFATLIVEGNHVRLSGQDVERGTFSHRHAVLHDQETGAKYCPLDHVAMDQNEELFTVSNSSLSEFAVLGFELGYSMENPNSLVLWEAQFGDFANGAQVMFDQFLSSGEAKWLRQTGLVVLLPHGYDGQGPEHSSARLERFLQMEPTLRKQIQECNWQVVNVTTPANYFHLLRRQIHREFRKPLIVTAPKNLLRHKDCKSNLSEFDDVEGHLGFDKQGTRFKRLIKDRNDHKQVEEGVNRLILCSGKVYYELDEERKKSERGDVAICRVEQLCPFPYDLIQRELKRYPNAEIVWCQEEPMNMGAYSYISPRLFTAMKALGRGSFEDIKYVGRAPSAATATGFLSVHAQEQSELVKKALQAEPIKFL

SEQ ID NO: 186710 - protein, 356 aa, Zea Mays
MSRLGLSLPQIPWALGLPLFGKRGIEKQPFQLPDFIAATGIEKIRQAYIEKEDSKKLKQKQRERMQPKMGKMDIDYQVLHDAFFKYQTKPKLSSHGDLYYEGKEFEVKLREMKPGMLSHELKDALGMPDGAPPPWLINMQRYGPPPSYPQLKIPGLNAPIPPGASFGYRPGEWGKPPVDEDEPVDRSKHWGDLEEEEEEEEEEEEEEPMEDEEMEDGIQSVDTISSTPTGVETPDVIDLRKLQRKETDKQAERPLYQVLEQKDKRIAPGTLYGSSHTYVLGAQDKSSAPKRVDLLKNQKSDKVDVTIQPDAMDDVVAAKYEEAREEEKLRNQKEDFSDMVAENAHKRKRKQEKEGK

SEQ ID NO: 186711 - protein, 377 aa, Zea Mays
MSRLGLSLPQIPWALGLPLFGKRGIEKQPFQLPDFIAATGIEKIRQAYIEKEDSKKLKQKQRERMQPKMGKMDIDYQVLHDAFFKYQTKPKLSSHGDLYYEGKEFEVKLREMKPGMLSHELKDALGMPDGAPPPWLINMQRYGPPPSYPQLKIPGLNAPIPPGASFGYRPGEWGKPPVDEHGRPLYGDVFGVLQQDEPSYDDEPVDRSKHWGDLEEEEEEEEEEEEEEPMEDEEMEDGIQSVDTISSTPTGVETPDVIDLRKLQRKETDKQAERPLYQVLEQKDKRIAPGTLYGSSHTYVLGAQDKSSAPKRVDLLKNQKSDKVDVTIQPDAMDDVVAAKYEEAREEEKLRNQKEDFSDMVAENAHKRKRKQEKEGK

SEQ ID NO: 186712 - protein, 483 aa, Zea Mays
MAAARIAACTTSARTALALADDPAPPDTLDVVRRQRQLLRRAAALCLDPIAEESDVICPLPVPRMAVFSASKAVSDESAFRVAGRVFVFVSSRLVPNTRTRHADTRIVPPNFCSEISSSRLISLFQSITSSNLYPKPYTGGRGMVKKAVSTAPADAEADERRRLRSLAFSNGLLQRGDPAAPRAPLAPAAAVTRLQGRDVVRRGGQRKSRYLFSFPGLLAPAASGGRVGELADLGTKNPLLYLEFPQGRMKLFGTHVYPKNKYLTLQMTRSAKGVVCEDVFESLIVFSEAWWVGTKEDNPEELKLEFPKEFQNDGTTADCDFRGGAGGAIDEATGSKAGKEIAEPRSPKFASDDDAPEDSNHKDENNTQTMSGTPVRQSARNAGKTLKRYTDLSSGGESSDNNNETDISEDLDDKEVESPEIKDEIESEDVKPADSSAISLSSKKEPLVQATLSSMFIRAEEKKARVQNHLPLSITNRQPACL

SEQ ID NO: 186713 - protein, 357 aa, Zea Mays
MAAARIAACTTSARTALALADDPAPPDTLDVVRRQRQLLRRAAALCLDPIAEESDVICPLPVPRMAVFSASKAVSDESAFRVAGRVFVFVSSRLVPNTRTRHADTRIVPPNFCSEISSSRLISLFQSITSSNLYPKPYTGGRGMVKKAVSTAPADAEADERRRLRSLAFSNGLLQRGDPAAPRAPLAPAAAVTRLQGRDVVRRGGQRKSRYLFSFPGLLAPAASGGRVGELADLGTKNPLLYLEFPQGRMKLFGTHVYPKNKYLTLQMTRSAKGVVCEDVFESLIVFSEAWWVGTKEDNPEELKLEFPKEFQNVVPSMKQLEAKLERKLQNLVPQSLHLMTMLLRIQIIRMRITHRL

SEQ ID NO: 186714 - protein, 241 aa, Zea Mays
MFAHKSLLIPLPGMPMPSLNACGQRTIRTCAPNHRQKRDAPKSRQQGASSAMNTLQRYYGLTPPQKGGNTMDSSTELSVYHKGGGFQSNLSETLLNPSAAPGTDSSWNFEALGFSATEGDGGAPKPEQDGSMRRRQKVEAESNAQGDFLVKAIKSLLISSVRLDTYAGSPGSSQKSGFRSVTVRKSPSAPSFADADNGVSMWSSSKWTFSHDSFTRPLLDGLPKPASARRTNQNRVGLKLN

SEQ ID NO: 186715 - protein, 226 aa, Zea Mays
MVTNASHTHGEREREREREREGEGRHRNSESPPRRSHHHRGLRPVRLRRSFCSRMSTESGELLGIDPVELRFPFELNKQISCTLQLTNKTDKQVAFKVKTTSPKKYCVRPNNSMVVPRSKADIVVTMQAQWDAPPYMHCKDKFLVQSAIMAKEIMSKEVTGDMFTKDSGNIVDEVKLKVVYTAPSSSQSEGFEDGNLGSLSYQEQSILEAINFAKPGIGKMVLPGD

SEQ ID NO: 186716 - protein, 254 aa, Zea Mays
MAVELAKQLLAVIGSYTPPLWATLIAGVFVIISVSLSLYLLFNHLSAYKNPEEQKFLVGVILMVPCYAVESYISLVNPSISVDIEIMRDGYEAFAMYCFGRYLVACLGGEDRTIEFLNREGGSGSAAPLLGQASEQRYVNHPFPMNYVLKPWPLGEWFYLVIKFGLVQYMIIKSICAILAVILESFGVYCEGEFKLNCGYSNRIALQLGFVERSYRSRTAVQVKYPRLHYLHRDGCCCRCPPVCLPCEAVRADR

SEQ ID NO: 186717 - protein, 394 aa, Zea Mays
MRDGYEAFAMYCFGRYLVACLGGEDRTIEFLNREGGSGSAAPLLGQASEQRYVNHPFPMNYVLKPWPLGEWFYLVIKFGLVQYMIIKSICAILAVILESFGVYCEGEFKLNCGYSYTAVVLNFSQSWALYCLVQFYTVIKDELAHIKPLAKFLTFKSIVFLTWWQGIAIALLFNWGLLRGPIAQELQFKSSIQDFIICIEMGVAAVAHLYVFPAKPYELIGDRLVGDVSVLGDYASVDCPLDPDEVKDSERPTKFRLPQPDDHVRCSTAIKESVRDVVLGGGEYIVNDLKFTVNHAVEPINEKLHMISENIKKREKGKKKTNDDSCIGSPTSLTRVISGIDDPLLNGSLSDNSGPKKARRQHRKSGYAGAESGGESSDHGLGGFEIRGNRWITS

SEQ ID NO: 186718 - protein, 323 aa, Zea Mays
MVLLGHQIWASSMIIKSICAILAVILESFGVYCEGEFKLNCGYSYTAVVLNFSQSWALYCLVQFYTVIKDELAHIKPLAKFLTFKSIVFLTWWQGIAIALLFNWGLLRGPIAQELQFKSSIQDFIICIEMGVAAVAHLYVFPAKPYELIGDRLVGDVSVLGDYASVDCPLDPDEVKDSERPTKFRLPQPDDHVRCSTAIKESVRDVVLGGGEYIVNDLKFTVNHAVEPINEKLHMISENIKKREKGKKKTNDDSCIGSPTSLTRVISGIDDPLLNGSLSDNSGPKKARRQHRKSGYAGAESGGESSDHGLGGFEIRGNRWITS

SEQ ID NO: 186719 - protein, 163 aa, Zea Mays
MTDEIRNARGGCTDGPDVDPGRHDRLHEGAAGEDQAAAGGDRAAGGGAGGHAQRLPGAQPQRDGGQEHPQVGRGAEGGRRHPGGDLLRRQRQAGAAAVHGEHAGRARAGHPAVRRQLLQRLRHARLLLRGRGTMTSQMQRDMISADAIKQELLKTAGYGGGCM

SEQ ID NO: 186720 - protein, 162 aa, Zea Mays
MTDEIRNARGGCTDGPDVDPGRHDRLHEGAAGEDQAAAGGDRAAGGGAGGHAQRLPGAQPQRDGGQEHPQVGRGAEGGRRHPGGDLLRRQRQAGAAAVHGEHAGRARAGHPAVRRQLLQRLRHARLLLRGGTMTSQMQRDMISADAIKQELLKTAGYGGGCM

SEQ ID NO: 186721 - protein, 162 aa, Zea Mays
MTDEIRNARGGCTDGPDVDPGRHDRLHEGAAGEDQAAAGGDRAAGGGAGGHAQRLPGAQPQRDGGQEHPQVGRGAEGGRRHPGGDLLRRQRQAGAAAVHGEHAGRARAGHPAVRRQLLQRLRHARLLLRDAEGHDQRRRDKAGAVEDRWIWRRLHVEGMARL

SEQ ID NO: 186722 - protein, 120 aa, Zea Mays
MRPWSSTSRPSWRRSSPCAGTPGTAMCPWGTSSPRRRPPPLTAPSTTSRRPPSASSPPSPPPAPSRRPSTASARSTAPPPRSAGPMPATRWRSSTSRSPWMRCSWTTTPASGLCKVEPGL

SEQ ID NO: 186723 - protein, 324 aa, Zea Mays
MQLRERQEKVERVISLFKATKVGPFAEESTRVKGVVNVAGSLPRDISEAESCISSRFVFEAPVRKKDSLFAELSTEHRYVSQENDHIETPFVLSKLMYLSNISDSFSVAVVPKGARCKDFSTDQNIREEHWLASLRSSLRPPLLSKSHRYAGGLILRSKNFAVSIAQLISVAARPVNGGEASRVCTEFGQISYQFPDDIKLTLSAALHGPSVVPRKRKPTAGGCVGLELEIDEDSRIGAWIELNKKSSSRLLRWALTLSDTPEGDLGWGVSLRRGTEEKPQLFQVEGFLNLHLGKAAAVQPGIVFNVDGRRCRPGLVFHSSWSL

SEQ ID NO: 186724 - protein, 122 aa, Zea Mays
MVLWMPAPLLDAPARFHGRRCPSHLLGDRPRPCPSHSFPFGPIAASTQPLLWHMVLIQPLSTGVCTISLVLDEMTMRSFVLCVAPPATPSTPEVRSVRRLPSVRWKVRTGNLAFLADLRVGL

SEQ ID NO: 186725 - protein, 94 aa, Zea Mays
MVLWMPAPLLDAPARFHGRRCPSHLLGDRPRPCPSHSFPFGPIAASTQPLLWHMVLIQPLSTGVCTISLVLDEMTMRSFVLCVAPPATPSTPGS

SEQ ID NO: 186726 - protein, 95 aa, Zea Mays
MVLWMPAPLLDAPARFHGRRCPSHLLGDRPRPCPSHSFPFGPIAASTQPLLWHMVLIQPLSTGVCTISLVLDEMTMRSFVLCVAPPATPSTPVNR

SEQ ID NO: 186727 - protein, 83 aa, Zea Mays
MFDGIHRVSSSSTPVKKQPTVQFHVQNCVSHRCYLKHMMVLLLISRHVIFTLFVLNNILSLNVSVPFVEMVIKIIYIIIKWPN

SEQ ID NO: 186728 - protein, 604 aa, Zea Mays
MGCVCSRHFPEDAPGTLAAAYDARRGRYGPGNFDSGELAIPPPHSNKVSDTGTFLGRASIAAVEVLDTLGSSMTSLNPGSGFLSGGTNRGNRACILAFEVANTIAKASSLWMSCSDESIEELKKEILHSDGVQVLVSSNTIELLHIAVVDKREELAVFSREVIRFGNLCKDPIWHNLGRYFDKLTTDNTPQDHSKETMEATVQQLINLAQNTSELYHELHALDRFEQDFKKKFHEEEPVPAARRESIMILHSELKRQRKLVKNLKKKSLWSRTLEEIVEKLVDIVVFLHRQIRESFNEAGTDFCASEQTQNKRLGSCGLALHYANIINQIENIISRPLSLPPSARDNLYHGLPVTVKLALRSRLQTYNTEEERTVAQIKAEMQKTLRWLLPVAENTIRAHQGFGWVGEWANLDMGKKSGYQHRHSVIRIQTLHHADKAKTEHYMLELVVLLHHLVMQVKSRGYGTGKPSRHEHDASSRSRKAAPGLHPETETETRRNTSPVNSRVASSPLSDCERAALDHLGFRRATYGRSQSCEPPPPGRRSLARRSWGLCRSHGGSPARALGSKTPAVGRDAAMDLDVIDGLDLDRLTSSYSHPPSPHVLLE

SEQ ID NO: 186729 - protein, 357 aa, Zea Mays
MILHSELKRQRKLVKNLKKKSLWSRTLEEIVEKLVDIVVFLHRQIRESFNEAGTDFCASEQTQNKRLGSCGLALHYANIINQIENIISRPLSLPPSARDNLYHGLPVTVKLALRSRLQTYNTEEERTVAQIKAEMQKTLRWLLPVAENTIRAHQGFGWVGEWANLDMGKKSGYQHRHSVIRIQTLHHADKAKTEHYMLELVVLLHHLVMQVKSRGYGTGKPSRHEHDASSRSRKAAPGLHPETETETRRNTSPVNSRVASSPLSDCERAALDHLGFRRATYGRSQSCEPPPPGRRSLARRSWGLCRSHGGSPARALGSKTPAVGRDAAMDLDVIDGLDLDRLTSSYSHPPSPHVLLE

SEQ ID NO: 186730 - protein, 240 aa, Zea Mays
MLYHVAQPNIVARAESEEDAAAAEVVEGADLGIVGDDTQVSSDGPLSPAPGVETVVVFPKNAGKSEETELLVGLQNDGESILNVVAVHSTLHLPFDHNMYGQNLTVQNFFNSSVPVSVQATFPYKFVVSKFLQPGAYDLVGYIVYEIDQHPYQNVFYNGTIEVVEAGGLLSVESVFLITLGFALLGLFGLWAYGQVQQLSKKTKKAPKVELGTGTTDANIDEWLEGTSFVQRSKSKKKQT

SEQ ID NO: 186731 - protein, 73 aa, Zea Mays
MDVQWEAEDGCHGTSQDIRPTYRCLCSEDLRQSHRCTQWLGRSDYLYLHLIAQERLSHNIDITHHQSKRKELQ

SEQ ID NO: 186732 - protein, 56 aa, Zea Mays
MYTTHAKLTKINLSLATIVERCFFLTYKYLIWYRLNCGQRTFVAFRIVLLLLMLHR

SEQ ID NO: 186733 - protein, 63 aa, Zea Mays
MENDEEEEGYVKVGTRFYRVAMRPSGAVARHRLHYLESCYLCKESIARDRDVFMYKCARPLKL

SEQ ID NO: 186734 - protein, 268 aa, Zea Mays
MGSSEPSSRSVQNLVLYAASAALSCLVLLAGLRHLDPNRAASQKAQQQKKEIAKRLGRPLVSTTPYEDVIACDVINPDSIDVEFDSIGGLDKVKQALYELVILPLRRPELFASGKLLSPQKGVLLYGPPGTGKTMLAKAIARESGAVFINVRISNLMSKWFGDAQKLVSAVFSLAHKLQPAIIFIDEVDSFLGQRRTTDHEAMTNMKTEFMSLWDGFTTDRYGFKAAFLHLWEECLPWFISSPDPTHVEASNPGECSCNGPSCYKQAF

SEQ ID NO: 186735 - protein, 269 aa, Zea Mays
MGSSEPSSRSVQNLVLYAASAALSCLVLLAGLRHLDPNRAASQKAQQQKKEIAKRLGRPLVSTTPYEDVIACDVINPDSIDVEFDSIGGLDKVKQALYELVILPLRRPELFASGKLLSPQKGVLLYGPPGTGKTMLAKAIARESGAVFINVRISNLMSKWFGDAQKLVSAVFSLAHKLQPAIIFIDEVDSFLGQRRTTDHEAMTNMKTEFMSLWDGFTTDLTRLRIQSSLSAFVGGMFALVYLFSRSHSCGSLQPWVCPLYLSEMRMLV

SEQ ID NO: 186736 - protein, 364 aa, Zea Mays
MGSSEPSSRSVQNLVLYAASAALSCLVLLAGLRHLDPNRAASQKAQQQKKEIAKRLGRPLVSTTPYEDVIACDVINPDSIDVEFDSIGGLDKVKQALYELVILPLRRPELFASGKLLSPQKGVLLYGPPGTGKTMLAKAIARESGAVFINVRISNLMSKWFGDAQKLVSAVFSLAHKLQPAIIFIDEVDSFLGQRRTTDHEAMTNMKTEFMSLWDGFTTDQNARVMVLAATNRPSELDEAILRRFTQIFEIGIPVQSERNKILQVVLKGENVEPNVDYDHIARLCEGFTGSDILEVCKQAAFYPIRELLDNERNGRKLDKPRPLRQSDLERALSTSRKCKKAASSGLQSPLWVRPTDSEDDQIA

SEQ ID NO: 186737 - protein, 320 aa, Zea Mays
MGQCYGKAGGASSRRADHDDHAHAVAPPSPLPANGAPPPQPATPGRRKSGSATPVHHQAATTAWPSPYPAGGASPLPAGVSPSPARSTPRRFFKRPFPPPSPAKHIKATLAKRLGGGKPKEGTIPEEGGAGVAADSAEAERPLDKTFGFANNFGAKYDLGKEVGRGHFGHTCSALVKKGEYKGHAVAVKIISKAKMTTAISIEDVRREVKILKALSGHNNLVKFYDACEDALNVYIVMELCEGGELLDRILARGGRYTEEDAKAIVVQILSVVSFCHLQGVVHRDLKPEMKGSMILLEAHIMSLQRFYTDRTVWKQTFGV

SEQ ID NO: 186738 - protein, 521 aa, Zea Mays
MGQCYGKAGGASSRRADHDDHAHAVAPPSPLPANGAPPPQPATPGRRKSGSATPVHHQAATTAWPSPYPAGGASPLPAGVSPSPARSTPRRFFKRPFPPPSPAKHIKATLAKRLGGGKPKEGTIPEEGGAGVAADSAEAERPLDKTFGFANNFGAKYDLGKEVGRGHFGHTCSALVKKGEYKGHAVAVKIISKAKMTTAISIEDVRREVKILKALSGHNNLVKFYDACEDALNVYIVMELCEGGELLDRILARGGRYTEEDAKAIVVQILSVVSFCHLQGVVHRDLKPENFLFATRDESAPMKLIDFGLSDFIRPDERLNDIVGSAYYVAPEVLHRSYSMEADIWSIGVITYILLCGSRPFWARTESGIFRSVLRADPNFDDSPWPSVSAEAKDFVKRFLNKDYRKRMTAVQALTHPWLRDEQRQIPLDILVFRLVKQYLRATPLKRLALKALSKALREDELLYLRLQFKLLEPRDGLVSLDNFRTALTRYVTDAMRESRVLEFLHAVRVRRCDPKQRITQ

SEQ ID NO: 186739 - protein, 891 aa, Zea Mays
MGALLRSVPKEMWRLLGEKSTVKEAWEAVKSMRVGADRVKDANAQRLLMDFENIIFNDGETVDDFAMRINGMASDLRSMGETVEDAKVVKKMLRVLPKRYAQIAISIETLLDLKSLTLEELVGRLRMAEDRMEKEFVTEKTGKLMLTEEEWVSKNRHRLLPEPSSTGGGEKRNGFNPAKHKGVARDGSGRGDRKEPVIKFTSEGTPRRKGRCRNCGIYGHWKVDCKRPKKGERGEEAHHVQAEKEPALLLATVNAVRIQGGTRRALSQVVHLNEEKVIPADREEDSDVWVLDTGASNHMTGRREAMVSLDTSVGGAVRFGDGSLVAIEGMGSVILQTKKNGHKVLTEVYFIPKLKSNIVSLGQLEEGGCKIVLEDGYCKVFDVERSLLAHAPRVGNRLYLLKLHLAAPVCLAAKTTDKAWLWHGRYGHLNFRALRELGVKGMVEGLPLLDRVEEFCDGCALGKQHRQPFPQVASYRADSQLDLFHADLCGQIKPRTPGGKNYFLLLVDDYSRYMWIELLATKDEAFMCFKRVKTLAETELGGKLRAFRSDRGGEFNSMEFKEYCDQHGVKHFTTTPYTPQQNGVVERRNRTVVEMARCLLKSKNLPGEFWGEAVTTAVYLLNRAPTKSLQGRTPYEAWYNRKPSVHHLRTFGCVVHVNKVGPGISKLTNRSTPMVFIGYEKGTKGYRVYDPVAKKLHISRDVIFEEAKAWDWIGTEQQSPSASVIDVEHYSIAEPGTATESVENGTEETTAAVDSDPQSPNQSQWQIDTDYSAGSNQNTPQGSPTEQGMVFATPPSNVASGELRFRTLDSVYDDTDEVTDFQYSGLCYLAAEEPGSVDEALGEQCWREAMKAEMESIQSNKTWELTDLPAGHRAIGLKWVFKVKKDPEGMY

SEQ ID NO: 186740 - protein, 107 aa, Zea Mays
MIVPIFPEKTNETNIKSKSLPIIFDLLIFYFIGFALFWLEAFLSMWVIQLSGLLEIIVFLLMGISMKEQRQKVQYIYYRDYEGDQRKFSLVHFIYFPFLWYGVNKWN

SEQ ID NO: 186741 - protein, 73 aa, Zea Mays
MVWSQQMELNRAHAKFGPSHHERKESIGAPIKLDVEAHAHIQKHRLWSCCYLNFLPHRKLQEDLTDEMVKLTR

SEQ ID NO: 186742 - protein, 130 aa, Zea Mays
MIVPIFPEKTNETNIKSKSLPIIFDLLIFYFIGFALFWLEAFLSMWVIQVLEGGAVVRTLRDHSIPSNGDINESKVSYLLLLYSCWCNLKMKSQLLKAEMKSLMKEQRQKVQYIYYRDYEGDQRCGLVVT

SEQ ID NO: 186743 - protein, 92 aa, Zea Mays
MIVPIFPEKTNETNIKSKSLPIIFDLLIFYFIGFALFWLEAFLSMWVIQVLEGGAVVRTLRDHSIPSNGDINERAKAKSPIYLLSGLRRRST

SEQ ID NO: 186744 - protein, 108 aa, Zea Mays
MIVPIFPEKTNETNIKSKSLPIIFDLLIFYFIGFALFWLEAFLSMWVIQPITESGDEISYEGAKAKSPIYLLSGLRRRSTLWSCCYLNFLPHRKLQEDLTDEMVKLTR

SEQ ID NO: 186745 - protein, 145 aa, Zea Mays
MIVPIFPEKTNETNIKSKSLPIIFDLLIFYFIGFALFWLEAFLSMWVIQVLEGGAVVRTLRDHSIPSNGDINESKVSYLLLLYSCWCNLKMKSQLLKAEMKSLMKEQRQKVQYIYYRDYEGDQRKFSLVHFIYFPFLWYGVNKWN

SEQ ID NO: 186746 - protein, 80 aa, Zea Mays
MIVPIFPEKTNETNIKSKSLPIIFDLLIFYFIGFALFWLEAFLSMWVIQPITESGDEISYEGAKAKSPIYLLSGLRRRST

SEQ ID NO: 186747 - protein, 97 aa, Zea Mays
MVLEGGAVVRTLRDHSIPSNGDINESKVSYLLLLYSCWCNLKMKSQLLKAEMKSLMKEQRQKVQYIYYRDYEGDQRKFSLVHFIYFPFLWYGVNKWN

SEQ ID NO: 186748 - protein, 74 aa, Zea Mays
MVWSQQMELNRAHAKFGPSHHERKESIGAPIKLDVEAHAHIQKHSVILHIQNQRLMNWQHQKWQLHIAPRIGYY

SEQ ID NO: 186749 - protein, 247 aa, Zea Mays
MFKMFTQFHNFMEVEYLPVVYPPEIKQENALHFAEDTSYAMARALNALPTYYSYGDSMIMARAVEAGKVNCSNYMVEMAWVKDVYGISTAEVMELLEHFLAMNPDNDGRVKAEDFWAHFGLDCSPLCKKIFHYFDLDIKGLITFRQFLVGCAHLRKQPLFQGSCETAFEKCRGPETSEISRAQLADLLRLSMVPPSDDKMLELFKTFDVDGDEKISRDDFMACLGRFPFLIAFFAALINGEVYIEIV

SEQ ID NO: 186750 - protein, 534 aa, Zea Mays
MASTSPNPASLSAPLLSDSISPAHAANGHAANHRHHHDGAVAASVCGDAGDPFAFLSEDRPPRDRGPSPADPFRNGTPAWCGGAYAWARTLLLLPVAAVRLALFGLAIAIGYAATWVALRGWADTHVRPREGGGPMPAWRRRLMWITRISARCILFSFGYHWIRKKGRPAPRELAPIVVSNHISYIEPIFFFYELFPTIVSSDSHDALPFVGTIIRAMQVIYVDRFSPASRKAAVNEIKRKAACNSFPRVLLFPEGTTTNGRFLISFQHGAFIPGYPVQPVVVHYPHVHFDQSWGNISLLKLMFKMFTQFHNFMEVEYLPVVYPPEIKQENALHFAEDTSYAMARALNALPTYYSYGDSMIMARAVEAGKVYGISTAEVMELLEHFLAMNPDNDGRVKAEDFWAHFGLDCSPLCKKIFHYFDLDIKGLITFRQFLVGCAHLRKQPLFQGSCETAFEKCRGPETSEISRAQLADLLRLSMVPPSDDKMLELFKTFDVDGDEKISRDDFMACLGRFPFLIAFFAALINGEVYIEIV

SEQ ID NO: 186751 - protein, 381 aa, Zea Mays
MASTSPNPASLSAPLLSDSISPAHAANGHAANHRHHHDGAVAASVCGDAGDPFAFLSEDRPPRDRGPSPADPFRNGTPAWCGGAYAWARTLLLLPVAAVRLALFGLAIAIGYAATWVALRGWADTHVRPREGGGPMPAWRRRLMWITRISARCILFSFGYHWIRKKGRPAPRELAPIVVSNHISYIEPIFFFYELFPTIVSSDSHDALPFVGTIIRAMQVIYVDRFSPASRKAAVNEIKRKAACNSFPRVLLFPEGTTTNGRFLISFQHGAFIPGYPVQPVVVHYPHVHFDQSWGNISLLKLMFKMFTQFHNFMEVEYLPVVYPPEIKQENALHFAEDLCYGTCPECLADLLFIWRFYDYGTSSRSWKGELLKLYGRNGLG

SEQ ID NO: 186752 - protein, 345 aa, Zea Mays
MASTSPNPASLSAPLLSDSISPAHAANGHAANHRHHHDGAVAASVCGDAGDPFAFLSEDRPPRDRGPSPADPFRNGTPAWCGGAYAWARTLLLLPVAAVRLALFGLAIAIGYAATWVALRGWADTHVRPREGGGPMPAWRRRLMWITRISARCILFSFGYHWIRKKGRPAPRELAPIVVSNHISYIEPIFFFYELFPTIVSSDSHDALPFVGTIIRAMQVIYVDRFSPASRKAAVNEIKRKAACNSFPRVLLFPEGTTTNGRFLISFQHGAFIPGYPVQPVVVHYPHVHFDQSWGNISLLKLMFKMFTQFHNFMESTFLLSTLLRSSKRMPFILQRIPAMLWHVP

SEQ ID NO: 186753 - protein, 314 aa, Zea Mays
MSFQRKAACNSFPRVLLFPEGTTTNGRFLISFQHGAFIPGYPVQPVVVHYPHVHFDQSWGNISLLKLMFKMFTQFHNFMEVEYLPVVYPPEIKQENALHFAEDTSYAMARALNALPTYYSYGDSMIMARAVEAGKVNCSNYMVEMAWVKDVYGISTAEVMELLEHFLAMNPDNDGRVKAEDFWAHFGLDCSPLCKKIFHYFDLDIKGLITFRQFLVGCAHLRKQPLFQGSCETAFEKCRGPETSEISRAQLADLLRLSMVPPSDDKMLELFKTFDVDGDEKISRDDFMACLGRFPFLIAFFAALINGEVYIEIV

SEQ ID NO: 186754 - protein, 353 aa, Zea Mays
MGKEGVVAGPAADGSKSRPECINSSNPYHECTDYCLRKIAEARQRLDDELPDSWKRPPEHRTVHRDCINACNPYHECSDYCFKRIADAKSGLERGEQQPPADVATAAGTSDAVEQQQLEDNDADGQEGAAADDGYPQMTEKQKKLFELRLKMNEARKANQQAMVAEKKRMEPRGESRGVSKQKWLDDRKKKIGKLLDSNGLDMSKAYMLDTQETAEAKYKKWEKEPAPYGWDVFNQKTLYDAYKKRTKDIEVDMEAYNKAKEADPEFYRDASSLQYGKVSNVPEENIDKMVKELKEREEKRKSFSRRRKFNEDKDIDSINDRNEHFNKKVERAFGKYTLEIKNNLERGTGLPD

SEQ ID NO: 186755 - protein, 120 aa, Zea Mays
MVYFSVLFVLWSYGYRLMRSTDFARSSLVLAIRNCLLGCAGPLLNRASWYLENSSDKKLWNLIAMVTNRYIESYKDGSILCSDSHHDSLKFALILISSLLSFVIHAFFPLSLCLFSSFVV

SEQ ID NO: 186756 - protein, 423 aa, Zea Mays
MEFFTEYGEASQYQIQEVIGKGSYGVVAAAVDTRTGERVAIKKINDVFEHVSDATRILREIKLLRLLRHPDIVEIKHIMLPPSRREFQDIYVVFELMESDLHQVIKANDDLTPEHHQFFLYQLLRALKYIHAANVFHRDLKPKNILANSDCKLKICDFGLARASFNDAPSAIFWTDYVATRWYRAPELCGSFFSKYTPAIDIWSIGCIFAELLTGRPLFPGKNVVHQLDIITDLLGTPSSETLSRIRNEKARRYLSCMRKKYPVPFTHKFRNADPLALRLLERLLAFDPKDRPTAEEALADPYFASLANVEREPSRHPISKLEFEFERRKLAKDDVRELIYREILEYHPQMLEEHMQGGEQISFLYPSLHILRSIIAREKEVLHCKESMLLYQGKEWLYRRTVILINILMTRREVQILSPAPL

SEQ ID NO: 186757 - protein, 519 aa, Zea Mays
MLLPLSSNACAVSLVLDSVEMEFFTEYGEASQYQIQEVIGKGSYGVVAAAVDTRTGERVAIKKINDVFEHVSDATRILREIKLLRLLRHPDIVEIKHIMLPPSRREFQDIYVVFELMESDLHQVIKANDDLTPEHHQFFLYQLLRALKYIHAANVFHRDLKPKNILANSDCKLKICDFGLARASFNDAPSAIFWTDYVATRWYRAPELCGSFFSKYTPAIDIWSIGCIFAELLTGRPLFPGKNVVHQLDIITDLLGTPSSETLSRIRNEKARRYLSCMRKKYPVPFTHKFRNADPLALRLLERLLAFDPKDRPTAEEALADPYFASLANVEREPSRHPISKLEFEFERRKLAKDDVRELIYREILEYHPQMLEEHMQGGEQISFLYPSGVDRFKRQFAHLEEHYSKGERGSPLQRKHASLPRERVVVSKDGDTDQHINDQERSADSVARTTVSPPRSEDDDMSDVKSTSLSSRSYLKSASISASKCVVATKKHPEDDGIAEEMEGAVNGLSEKVSRMHS

SEQ ID NO: 186758 - protein, 204 aa, Zea Mays
MHASCMCVGVPGMAACLPMHAHDAERGCPCTAPRRSRSSPSSSPSLPVSPAGHSTRSTGASGDRSEADGYGQASDGAGAAVRRPAGGDGGRRGGGGVVVQPVGAERVRARVVRQGGHAGVLRVAARAAAVPLPVQARPREPRLRQRPRRAALHPRLRPHPDEVLMDREPACAPPAAGDVVVCAATCMYYYYESTAGPWTYIRAV

SEQ ID NO: 186759 - protein, 63 aa, Zea Mays
MRAAGGGVSDSGEGGALEGRCSGRGEGRCSGIGLRAAGRGPPDRDARWLPCAGRSDNSRPPAD

SEQ ID NO: 186760 - protein, 65 aa, Zea Mays
MAVHCPWLQLNIRRRSILLALVHIRFKLFALSPAAAAVPGFSQLAGSYERPPPMLCCQVTTKLVY

SEQ ID NO: 186761 - protein, 237 aa, Zea Mays
MVLIFMSPTKLSMKIHLMINLMGRNLASSPANIIYSTWTVLVASFRSKWIRLVKQHSSPPLALARISSVMNIRQSKDASVEALLAQRAAAMEEYQQVHQQQQQQGGRGSNKIRDIVRLQQLLKKWKKLATVTPSAASSGGRSSVPRGSFAVYVGEEMRRFVIPTEYLGHWAFADLLREAEEEFGFRHEGALRIPCDVDSFQGILRLVQQGQGGRRNEPAAMCDCDCSCSSETEILCR

SEQ ID NO: 186762 - protein, 54 aa, Zea Mays
MSKCTSLTGLGSSFTSAVQLTLVVKVSRILVPFRLKIEVVLALGLYIQVFDEYF

SEQ ID NO: 186763 - protein, 231 aa, Zea Mays
MHRWTSIQEGVNRFTGCLAQVERRRQSGATMQDKLTQACALYKSEDKQHKAFPYMHCWNKLRTQRKWEMKLEELAVGKSSNKKQKMNSNETSPPHLPSATETSEPTTPNETVTTRPPGKKKAKAAAFQAEKKGYTETLNKLFEKKKETDEFKEMKKDERFRLALAVEQERAANEKLNMQLRSKELELRQQEVEQHKKREEERIMTLDLSVMPADQKQYYMRLRSKILSENA

SEQ ID NO: 186764 - protein, 54 aa, Zea Mays
MVLIFMSPTKLSMKIHLMINLMGRNLASSPANIIYSTWTVLVASFRIRTSVKLD

SEQ ID NO: 186765 - protein, 66 aa, Zea Mays
MCTHPCFTTKHQVVHIATTAQEKTKSWKETSRSFKTTTNSRCGLAATPSQLPVKALSLLCFASTLI

SEQ ID NO: 186766 - protein, 168 aa, Zea Mays
MTKWARVFVLPSEGIIADSSLSNHHEDSLGSGLPSISTSKPFDSDEVPPGVTLTTQFLYHLANKMDLKLDIFSLGDTSKPANGEAASPKKQSPSGSRSPDSLELSALQERKAFSAGNWFAEDKPEGSSAEDNHPSCCSAERQRRKVNKRRKKRICGCPAASGGGYINK

SEQ ID NO: 186767 - protein, 524 aa, Zea Mays
MVMVMEVTQLQLLLETMGSQCECMVTNLARQVVWPHVLAGVFVAQAAGNGGPFPKTLVSFSPWITTVAAGVDDRRYKNHLTLGNGKLLSGLGVSPATHGNMSFSLISAADALLGSSATKYSALDCQRPELLNKRKVQGRILLCGYSFNYISGTASIKKVSQTARNLGAAGFVVAVENNYPGTKFDPVPFSIPGILITDVSKTEDLIDYYNSSTIRDWAGRATAFKATAGIADGLAPTLYNSAPQVALFSSRGPDVKDFSFQDADVLKPDILAPGNLIWAAWAPNGTDESNYAGEGFAMVSGTSMAAPHIAGIAALIKQKNPKWSPSAIKSAMMTTANTLDKGSRPLRAQQYTASEMMTLSRATPFDCGSGAVNPKAALDPGLVLDATHEEYIAFLCSIPDVNQSEVSNIAGSACNSSSKGRQRPFDLNLPSIAISQLRGTVTVTRTVTSVSEETETYTIMTRMPPEVALEVTPPAVTVLPGASRELAVTLTARSVTGTYSFGEIAMKGDRGHLVRIPVVAMGFK

SEQ ID NO: 186768 - protein, 540 aa, Zea Mays
MELSESVLGKRGIGKKCLRLQWKKIENFVCPTVGSEDIFAVLFGHQSGEDTFWLDSSSVDQNRARFSFMGGKGGSLWKQMSFHLSGQRANCGGMLSIQDAYGFTAKKFIKDGFLEFLNKEIESIQYNEKDYEGLPFEFHGGFVGYLGYGLKVECDASSNKAKSSTPDACFVFADNTVVVDHSNGDVYILSLHDEFYSSNGDGICKNSTHTSWLVETEKKLLRLGGMPSGSPIIRKTHARSSSVHKQSFVVEKSKDQYVRDVQNCLDYIRDGESYELCLTTQMKRRADCINALQLYLKLRKQNPAPYAAWLNFSSENLSICCSSPERFLRLDRAGVLEAKPIKGTIARGRTPEEDECLRLQLRYSEKDQAENLMIVDLLRNDLGKVCEPGSVHVPRLMDVESYRSVHTMVSTVCGTKKPDLSPVDCVKAAFPGGSMTGAPKVRSMEILDSLETSPRGVYSGSIGFFSYNHTFDLNIVIRTVILHDGEASVGAGGAIVALSSPEAEYDEMLLKAKAPTEVVEDLVQTIYSSDRSDSMQTTIS

SEQ ID NO: 186769 - protein, 620 aa, Zea Mays
MGIRHSSRPHYGVQFHPESIATHHGRQIFRNFKKITGNFGLRSSWIQERKVHSIGKLEKSQVNSASHHDSIPKDLLHTERMELSESVLGKRGIGKKCLRLQWKKIENFVCPTVGSEDIFAVLFGHQSGEDTFWLDSSSVDQNRARFSFMGGKGGSLWKQMSFHLSGQRANCGGMLSIQDAYGFTAKKFIKDGFLEFLNKEIESIQYNEKDYEGLPFEFHGGFVGYLGYGLKVECDASSNKAKSSTPDACFVFADNTVVVDHSNGDVYILSLHDEFYSSNGDGICKNSTHTSWLVETEKKLLRLGGMPSGSPIIRKTHARSSSVHKQSFVVEKSKDQYVRDVQNCLDYIRDGESYELCLTTQMKRRADCINALQLYLKLRKQNPAPYAAWLNFSSENLSICCSSPERFLRLDRAGVLEAKPIKGTIARGRTPEEDECLRLQLRYSEKDQAENLMIVDLLRNDLGKVCEPGSVHVPRLMDVESYRSVHTMVSTVCGTKKPDLSPVDCVKAAFPGGSMTGAPKVRSMEILDSLETSPRGVYSGSIGFFSYNHTFDLNIVIRTVILHDGEASVGAGGAIVALSSPEAEYDEMLLKAKAPTEVVEDLVQTIYSSDRSDSMQTTIS

SEQ ID NO: 186770 - protein, 62 aa, Zea Mays
MGLAGISGALLLLSRRSSRASQFSFLQRYSTADVEMHVELHVSCDHGFLATSLAPDGLMAMK

SEQ ID NO: 186771 - protein, 941 aa, Zea Mays
MASSCIPAGGIRLPDLDMVKTAPPPAPHRPAASSTLSEASHSSPASSSSVASLSLKRPRTRTPRKRPSQTYNEAAALLASMYPSVFPVARGWGAPEAAPPRLLGLASALGDDPSCSDLLPPFPVPGGHAAFLLRDLPPPPPQSPAGVAKSCPSPAAVSSVFSEFRDPAPSPATPDDAAAAPDEPGELHFDVDDGFDADSILCGVDQSAAEGIDGIMGKLSMENSGTSVSSSSVNSNLPISKIHPYLRNLMVLGLSFRHDQNIFNQALKRHSVDHEWWMCPAIPVKDITPAPPPSVAMSKVTDKKTKKSLGTMYEEGVPESVNGDAGTLALPETGLGLSLNTDGVLKAWCGRGSVFADSNGSDLPLSSAHVVLLNGSPGIPIKHRRGLRQGDPLSPMLFVLVMDVLNSLFLLAENRGLLHRLEGANIRNRLSIYADDVVLFVQPVEEDLHCVRTILDCFGSASGLVSNLQKSYVIPIKCNQQAVLVGCNILQCSSSSFPCTYLGLPISDKKLRRNDLMVWVDKIADRLPNWKARLLNLAGRTAIVRFVLSAIPVYLLIAMNIPKWVINSIDKIRRGFLWKGRKEVTGGCCLVSWDIITRPLYLGGLGISNLLYQSWALQTKWLWLEKTDPNRPWVGLNFPIQQHVRRFFASSIITLVGDGSTTLFWTDRWLDGSCIQDLAPDVVACVGKRASSSRTVAHALENWQWVSDLETPLNLIGLQQYLQLWDTLRGVVLTQEADRHVWIHSSSGQFSSRSCYKAFFMGSITFEPWKRLWKSWAPPKCKFFLWLAIRNKCWTADRLQKRGLDHPEVCPLCDQEPENIQHLLCSCIFARQFWHCILAPLGLADLSPVSIEISFAEWWRKVCKQVHKSKRRGINSVIILGAWCLWIHRNKAVFEGVSPSISRIKKVFLEELECWGLAGAKHLEGLGLGAAIIRSRNFLGE

SEQ ID NO: 186772 - protein, 415 aa, Zea Mays
MMATGRSLAGVYSARATRPMPLRAGARAPCAGAAAAEPAAEHVRRLVAEFDPAVPLDSAVTPPSGWYTDPDFLQLEIDSVFFRGWQAVGHIWQVKNPNDFFTGRLGNVEFVVCRDANGKLHAFHNVCRHHASLLACGSGHKTCFQCPYHGWTYGLDGTLLKATRISGIKNFNKNDFGLIPIKVATWGPFVLIRFDDESTEDNVYDTVGNEWLGSASDLLGTNGIDTSLPHICRREYIINCNWKVFCDNYLDGGYHVPYAHGDLASGLQLQSYETLTYERVSVQRCESAPAEPDDFDRLGTKALYAFVYPNFMINRYGPWMDTNLAVPLDSTRCKVVFDYFLDKSLLDDQCFIKKSLEDSEQVQIEDIALCEGVQRGLESPAYSVGRYAPSVEMAMHHFHRLMHANLRSTTALCQR

SEQ ID NO: 186773 - protein, 123 aa, Zea Mays
MINRYGPWMDTNLAVPLDSTRCKVVFDYFLDKSLLDDQCFIKKSLEDSEQVQIEDIALCEGVQRGLESPAYSVGRYAPSVEMAMHHFHRLMHANLRHCMNTVLYCNLVNSATFQLHKKHVCWL

SEQ ID NO: 186774 - protein, 767 aa, Zea Mays
MALEFRSAVSVPLHVLPLLRGWHLGFPVARVEGCGLGGTIGEEEHMANNVARAMYLDHGILAPECCGVATVYLDVSYGCATFFTGPMPATKEIGSQHRVLHINEDLKVPEQSTKGARRKNALDPRNIAMSRPLDFAVLNYKNQRLAEQLEVHKFEFRALESRFNDLKEKQRTHNETLILVENYWERVFVVLCSFRNYIYDDKRFTCISPELAVYQLMIVKGQALCRMLPHKWDGICFRLGAGFLNGLLEAGASATESSGFSNCQLGNDVSSEESTTIDILQKMFLPSSGPWHANNELAGNYQKQRDSSAWNRAEQKRLKEELTSVVAKLEESKQKLAVLKAQGDNKQATPILVPMLGKKTAEKVGDKQTELQDLEATHKELMESISKRLEEIRRLHTERIGILNNLATFQNILTDFKSIHSSKAFQLVNDQLQKSQAELDGHQTLLEKLQVDMDTFVWRERQFNQKVDLAEISQKVSAYYVSRIADLEKDVQKLCNEKNMLVLKLEGALREPGRNQVISEFKALVSSLPREMGAVQTELSKHKDASLQLHSLRAEVHSLSSIRTRKEQEIEETSRSAHAGSDISQLQSLVHELRENTQELKLFVELYKHDSADSRQLMESRDRELAELAGVHVLRYSLNESKLEQRVIAANEAEAISQQRLATAEAEVAELGQKLETSRRNLVKQSDILKSKHEECEAYMVEIESIGHAYEDIMSQNQQLLQQIIERDDHNTKVWRHGVEIFSGLLKVCCCSLGSLVKELFIFGALK

SEQ ID NO: 186775 - protein, 768 aa, Zea Mays
MIVKGQALCRMLPHKWDGICFRLGAGFLNGLLEAGASATESSGFSNCQLGNDVSSEESTTIDILQKMFLPSSGPWHANNELAGNYQKQRDSSAWNRAEQKRLKEELTSVVAKLEESKQKLAVLKAQGDNKQATPILVPMLGKKTAEKVGDKQTELQDLEATHKELMESISKRLEEIRRLHTERIGILNNLATFQNILTDFKSIHSSKAFQLVNDQLQKSQAELDGHQTLLEKLQVDMDTFVWRERQFNQKVDLAEISQKVSAYYVSRIADLEKDVQKLCNEKNMLVLKLEGALREPGRNQVISEFKALVSSLPREMGAVQTELSKHKDASLQLHSLRAEVHSLSSIRTRKEQEIEETSRSAHAGSDISQLQSLVHELRENTQELKLFVELYKHDSADSRQLMESRDRELAELAGVHVLRYSLNESKLEQRVIAANEAEAISQQRLATAEAEVAELGQKLETSRRNLVKQSDILKSKHEECEAYMVEIESIGHAYEDIMSQNQQLLQQIIERDDHNTKLFMEGVKAKQSHDALHLEVCSLQRNLQHASTLMDLCNQKLIHLEDKLRGWSERLRRLSEDGMQQSISLGISQTKLTGMHGEAPKLGQALNVLQAKVGSNRLEVAELLIELETERFSKKRLDDDLDLMSSKASSLREKADNSQVLQKLLHEAKEYRGILKCGICHDRQKEVVIAKCYHLFCNQCIQKSLGSRQKRRLAPVSHTPELPGALLIPGICAASQRLRYQKVLRSTEKHSQFSSRSQLPETFSNKQR

SEQ ID NO: 186776 - protein, 743 aa, Zea Mays
MALEFRSAVSVPLHVLPLLRGWHLGFPVARVEGCGLGGTIGEEEHMANNVARAMYLDHGILAPECCGVATVYLDVSYGCATFFTGPMPATKEIGSQHRVLHINEDLKVPEQSTKGARRKNALDPRNIAMSRPLDFAVLNYKNQRLAEQLEVHKFEFRALESRFNDLKEKQRTHNETLILVENYWERVFVVLCSFRNYIYDDKRFTCISPELAVYQLMIVKGQALCRMLPHKWDGICFRLGAGFLNGLLEAGASATESSGFSNCQLGNDVSSEESTTIDILQKMFLPSSGPWHANNELAGNYQKQRDSSAWNRAEQKRLKEELTSVVAKLEESKQKLAVLKAQGDNKQATPILVPMLGKKTAEKVGDKQTELQDLEATHKELMESISKRLEEIRRLHTERIGILNNLATFQNILTDFKSIHSSKAFQLVNDQLQKSQAELDGHQTLLEKLQVDMDTFVWRERQFNQKVDLAEISQKVSAYYVSRIADLEKDVQKLCNEKNMLVLKLEGALREPGRNQVISEFKALVSSLPREMGAVQTELSKHKDASLQLHSLRAEVHSLSSIRTRKEQEIEETSRSAHAGSDISQLQSLVHELRENTQELKLFVELYKHDSADSRQLMESRDRELAELAGVHVLRYSLNESKLEQRVIAANEAEAISQQRLATAEAEVAELGQKLETSRRNLVKQSDILKSKHEECEAYMVEIESIGHAYEDIMSQNQQLLQQIIERDDHNTKVMIQRTNLSN

SEQ ID NO: 186777 - protein, 831 aa, Zea Mays
MPTCLHVQDPRNIAMSRPLDFAVLNYKNQRLAEQLEVHKFEFRALESRFNDLKEKQRTHNETLILVENYWERVFVVLCSFRNYIYDDKRFTCISPELAVYQLMIVKGQALCRMLPHKWDGICFRLGAGFLNGLLEAGASATESSGFSNCQLGNDVSSEESTTIDILQKMFLPSSGPWHANNELAGNYQKQRDSSAWNRAEQKRLKEELTSVVAKLEESKQKLAVLKAQGDNKQATPILVPMLGKKTAEKVGDKQTELQDLEATHKELMESISKRLEEIRRLHTERIGILNNLATFQNILTDFKSIHSSKAFQLVNDQLQKSQAELDGHQTLLEKLQVDMDTFVWRERQFNQKVDLAEISQKVSAYYVSRIADLEKDVQKLCNEKNMLVLKLEGALREPGRNQVISEFKALVSSLPREMGAVQTELSKHKDASLQLHSLRAEVHSLSSIRTRKEQEIEETSRSAHAGSDISQLQSLVHELRENTQELKLFVELYKHDSADSRQLMESRDRELAELAGVHVLRYSLNESKLEQRVIAANEAEAISQQRLATAEAEVAELGQKLETSRRNLVKQSDILKSKHEECEAYMVEIESIGHAYEDIMSQNQQLLQQIIERDDHNTKLFMEGVKAKQSHDALHLEVCSLQRNLQHASTLMDLCNQKLIHLEDKLRGWSERLRRLSEDGMQQSISLGISQTKLTGMHGEAPKLGQALNVLQAKVGSNRLEVAELLIELETERFSKKRLDDDLDLMSSKASSLREKADNSQVLQKLLHEAKEYRGILKCGICHDRQKEVVIAKCYHLFCNQCIQKSLGSRQKRCPSCGLSFGVNDVKPIYI

SEQ ID NO: 186778 - protein, 493 aa, Zea Mays
MDTFVWRERQFNQKVDLAEISQKVSAYYVSRIADLEKDVQKLCNEKNMLVLKLEGALREPGRNQVISEFKALVSSLPREMGAVQTELSKHKDASLQLHSLRAEVHSLSSIRTRKEQEIEETSRSAHAGSDISQLQSLVHELRENTQELKLFVELYKHDSADSRQLMESRDRELAELAGVHVLRYSLNESKLEQRVIAANEAEAISQQRLATAEAEVAELGQKLETSRRNLVKQSDILKSKHEECEAYMVEIESIGHAYEDIMSQNQQLLQQIIERDDHNTKLFMEGVKAKQSHDALHLEVCSLQRNLQHASTLMDLCNQKLIHLEDKLRGWSERLRRLSEDGMQQSISLGISQTKLTGMHGEAPKLGQALNVLQAKVGSNRLEVAELLIELETERFSKKRLDDDLDLMSSKASSLREKADNSQVLQKLLHEAKEYRGILKCGICHDRQKEVVIAKCYHLFCNQCIQKSLGSRQKRCPSCGLSFGVNDVKPIYI

SEQ ID NO: 186779 - protein, 473 aa, Zea Mays
MGTSIHAEIQAALVDDKGSLIQIDKVYELKRFRVAPSRNYYKPVDNSMMIQFTLYTQAKVVEDPPPTFPRYAYKLTSFENIGNNVDNKTYLIDVLGILTEIGSLYHVGYNNSNIIRDIFLKDINNTSTKVTLWGHQASSFSVDNICDENDNKPIVVLFVGCLAKRFKGEAYLSATTACTWYFNPDIPEAQVYYNKLLNTKLQMIRPQATKKELQASQTLNIEDKTIEELLQLDPDMFPEQGFKCTVIISRLVQDGRWWFPSCIKCNKSSSQTSTGYQCTLCNGTETEFRYKLSFIATDGTSEAEFFCFDTIAKRIVGKSCQTLFSTSGVSRGPPPDLAAIVSLKFTFAVTINMSAFSVTNRVFSILSVLTNHGRQASIPCATQNLSQQQMLTQDIIIDVITTQESPATSIAKLSTSTKQESVPRRRLTYSETLQDTNVDEQVSAELNKDSLTSPPKKIKSTQLGSTYPHNLNH

SEQ ID NO: 186780 - protein, 58 aa, Zea Mays
MHALSGKLHAPHPTIQWCFTGIASGFFHAISITSVDWIHGDAVQFVYDDTARRRYELR

SEQ ID NO: 186781 - protein, 58 aa, Zea Mays
MRQLSGKLHAPHPTIQWCFTGIASGFFHAISITSVDWIHGDAVQFVYDDTARRRYELR

SEQ ID NO: 186782 - protein, 310 aa, Zea Mays
MVAIKRMDEGATMFDFSSEFLAARLQHTNLIRLLGWCIHGKERILVYEFMHKGTLHSLIFDKRMGLLLDWSKRIDIIRGVAEGLLYLHKQAKLWIVHRDLKLQNVLLDHDMKPKLADFGSARSLSSDSAEECTSRVVGTSGYKAPEYTSRGVYSLKTDVFSFGVVVLVTISGRENTVLEKQGDSVGALVRDAWQLWNDGRLHELVDPVLGDGFELAEVVQYAQVALLCAQEEPADRPTMSDVVSLLNFESIGLLPDPKQPSELCKGGGGTSGDRLPTCGSQSSRTIDITITSSAPVSTRTRVRIIVDPET

SEQ ID NO: 186783 - protein, 93 aa, Zea Mays
MTTVTNLKNPVNKWRCGATPISYYYFIRLMGRKASHVALECALQSHPNMVKFSPLIQPLLRQFPGRLRIPSHRLIFEVCVSLNTNIASVENRN

SEQ ID NO: 186784 - protein, 59 aa, Zea Mays
MICQWVNKDLLYIHIDRNTTPHDFPLKQKEDIHIHHCNCKRKKIAGCASCSNCFFFSNS

SEQ ID NO: 186785 - protein, 328 aa, Zea Mays
MFFCEIQGLVISWFGGVRGAGACWAFSAVAAVEGINKIVTGSLISLSEQELIDCDKFQDQGCDGGLMDNAFVFMIKNGGIDTEADYPFTGHDGTCDLKLKNTRVVSIDSFERVPINYERALQKAVAHQPVSASIEASRRAFQLYSSGIFDGRCGTYLDHGVTVVGYGSEGGKDYWIVKNSWGTQWGEAGYVRMARNVRVRAGKCGIAMEPLYPVKEGPNPPPGPTPPSPVKPPNVCNAEYSCPEATTCCCVSEYRGKCLAYGCCELENATCCEDHSSCCPHDYPVCSVRDGTCRKSANSPMMVKALQRKPAMYTGGGGGGEQSGRSSW

SEQ ID NO: 186786 - protein, 335 aa, Zea Mays
MRPSSRYPPQPALLALALALALAAAAPELRPLAAAVTVTPPPERTDEEVRRLYEEWRSEHDAGPRRGATGGSLGPGEDDDARRLEVFRYNLRYIDAHNAEADAGLHGFRLGLTRFADLTLEEYRARLLLGSRGRNGTAVGVVGSRRYLPLAGEQLPDAVDWRERGAVAEVKDQGQCGACWAFSAVAAVEGINKIVTGSLISLSEQELIDCDKFQDQGCDGGLMDNAFVFMIKNGGIDTEADYPFTGHDGTCDLKLKNTRVVSIDSFERVPINYERALQKAVAHQPVSASIEASRRAFQLYSSSANSPMMVKALQRKPAMYTGGGGGGEQSGRSSW

SEQ ID NO: 186787 - protein, 367 aa, Zea Mays
MRPSSRYPPQPALLALALALALAAAAPELRPLAAAVTVTPPPERTDEEVRRLYEEWRSEHDAGPRRGATGGSLGPGEDDDARRLEVFRYNLRYIDAHNAEADAGLHGFRLGLTRFADLTLEEYRARLLLGSRGRNGTAVGVVGSRRYLPLAGEQLPDAVDWRERGAVAEVKDQGQCGACWAFSAVAAVEGINKIVTGSLISLSEQELIDCDKFQDQGCDGGLMDNAFVFMIKNGGIDTEADYPFTGHDGTCDLKLKNTRVVSIDSFERVPINYERALQKAVAHQPVSASIEASRRAFQLYSSRGRQGLLDREELVGHPVGRGRVRPDGAQRQGEGRQVRHRHGAAVPGEGGPEPAAGPDAAVAREAA

SEQ ID NO: 186788 - protein, 79 aa, Zea Mays
MALLPLFLRPVVRFAARVAAGGPAAAAATILHRAGALPRNRGLERLVRDDDVDDDDELHGRGHDDCIASFVVGVMRCLC

SEQ ID NO: 186789 - protein, 129 aa, Zea Mays
MAMRMAAAAVALVAVMGVLAPRAAAQTPNCAEKLIPCSPYMNTTGTPPDTCCGPLKDAVQNDLKCLCDLYASPEIFKAFNISLDQALGLSKRCGLSDTTAACKGLSPTQSPPGNPLLACCASVTTLWVL

SEQ ID NO: 186790 - protein, 157 aa, Zea Mays
MERTLPWTMSTSRPTMSTLTMKTRRPIASATTKTPVGRPTGTASGSTPSISGGAPSSCQDNKAAATATATDDDDLLGHCKVFMQSEDVGRTLDLSAVASYEELYQRLADMFGVDRAELTSHVFYRDGASGALKHAGDEPFSEFTKTARRLTIQTDAR

SEQ ID NO: 186791 - protein, 339 aa, Zea Mays
MLSQLSHKDMDCETPGESHGKKRSNECSKEKVVDVQELVDELIVFEHLDYGKDTVFPTRPLKCHASTSSVQIPGAIEKTFCPTDLNYVMTKNQSVHVGSAIGSGYPVYGGRLSTSGTIFGSIQTEIPSIQSSSYSPSNDWLAQCPSACIEQRIPMECNTISQSKAYLMMHSSSAFCAPEHEACSETQAPDLCSGSDAVFDPSQCYPVASFSDLGISDTLLTKGLLNDIALASLLNVNLKDQSHINRQEPTNDTSLGGASFLNANLKDQSHLNWQEHMNETSPVAGLLNANLEEQSHLNWQEPKNESSPEAGFLNANLEEQSHLNWPLQECEPWIERQMF

SEQ ID NO: 186792 - protein, 515 aa, Zea Mays
MTQLPSKFKNKMMVVRVDENPAPDGENSPLDDEYVSADDEHVDNEDKETDSIGDYENPSGAPQLKKGPWSPEEDKRLKDYVEVHGAGNWNKVQKNAMLNRCGKSCRLRWTNHLRPDLKKDPFDAEEEEKIIKLYIRWGPKWSMMASYLPGRTDNEIKNFWNTRKRRKQRCGSPLHPEYMLSQLSHKDMDCETPGESHGKKRSNECSKEKVVDVQELVDELIVFEHLDYGKDTVFPTRPLKCHASTSSVQIPGAIEKTFCPTDLNYVMTKNQSVHVGSAIGSGYPVYGGRLSTSGTIFGSIQTEIPSIQSSSYSPSNDWLAQCPSACIEQRIPMECNTISQSKAYLMMHSSSAFCAPEHEACSETQAPDLCSDAVFDPSQCYPVASFSDLGISDTLLTKGLLNDIALASLLNVNLKDQSHINRQEPTNDTSLGGASFLNANLKDQSHLNWQEHMNETSPVAGLLNANLEEQSHLNWQEPKNESSPEAGFLNANLEEQSHLNWPLQECEPWIERQMF

SEQ ID NO: 186793 - protein, 393 aa, Zea Mays
MTVVRVDENPAPDGENSPLDDEYVSADDEHVDDEDKETDSIDDYENPSGTPQMKKGPWSPEEDKRLKDYVEVHGAGNWNKVQQNARLNRCGKSCRLRWTNHLRPDLKKEPFNAEEEEKIIKLHIRRGPKWSMMASYLPGRTDNEIKNFWNTRKRRKQRCGSPLYPEYMLSQVSHKDMDFETLGESHGKKRSNECSKEKVVDVQELVDELIVFEHLDYGKDIVFPIRPLKCHASTGSVQISGDIRKTFCPTDLNYVMTKNQSVPVGSAIGSGYPVYGGRLSTSGTIFGSIQTEIPSIQSSSYSPSNDWLAQCPSACIEQRIPMECNTISQSKAYLMMHSSSAFCAPEHDACSETQAPDLCSGSDVVFDPSQCYPVASFSDLGISDTPLTSGTYQ

SEQ ID NO: 186794 - protein, 72 aa, Zea Mays
MARLKSQDQRDVPPTLFPALYAHSLRKNRTVREALTDNKWVMDVDHNMSQQIITEFVALWVRLQDIHLLQSQ

SEQ ID NO: 186795 - protein, 105 aa, Zea Mays
MHSLSLNSVCIPMSNICFNPHCKLEQFAKFLLVTCPVKFSRPTDVRRFYHLLMGSTRVEGLYITNLLVDLCYADVLWARVCKKPELWQDWTKNNQNIYYIFSPFY

SEQ ID NO: 186796 - protein, 223 aa, Zea Mays
MVITDQSAFIQDRCIYDNFIMVNQTNKMLHKKRIPALFLKLDIKKAFDSVCWAFLLEILQHLGFGQVWCNLILNLLMTSSTQILVDGVPGQPISHKIRLRQGDPLSPLLSILVMDVLNSLFTKADECGLLHPLAGRNISQRVSMFIDDVAVFVKPVSEDLEVVREILRGFGVASGLQTNLQKSFSYPIWCDNERVELAVQTLGCASKNFSTTYPGLSLRSKKT

SEQ ID NO: 186797 - protein, 60 aa, Zea Mays
MSDAIQIQFFCALVVEGSVGFGLKSCALQDQLLVWTSKLKPGPGNRQIILPSCDTVSKPA

SEQ ID NO: 186798 - protein, 86 aa, Zea Mays
MLRRCILRSPCTTFRSKIVCFARSASCLDFETETWSRQSANHPAILRYCIQASLNSPGSDVLIFWALSAGTCLLLQPFMLLFSAVA

SEQ ID NO: 186799 - protein, 351 aa, Zea Mays
MGSSSQHDSISASGSSERADGSRSSISMWTKITSTDSWRWCLGLIYIVAVASIWIAASYIVQSVVDAGVSPFLITYICNSLFVVYIPIVEAARYFEDSIGDLWTKLKFKDAESLQQASDMESVNLLQSGGHEINVASDQSQTRLSGDASVPDTCFPAQAELTVVDCSKGLDAKGRWTRARVAQVSMLISPFWFLAQLTFNLSLRYTTVTSNTILSSTSSLFTFLVALVFLGETFTWLKLISVLLCMGGTIIVSLADSSSSVNAIATNPPLGDFLSIVSAGLYAVYITLIRKKLPDEKEGQGQVSMAQFLGFLGLFNMLFFFPVALVLNFAKLEPFHRLTWEQAGLVVGKGR

SEQ ID NO: 186800 - protein, 271 aa, Zea Mays
MNCSRFYKVEAARYFEDSIGDLWTKLKFKDAESLQQASDMESVNLLQSGGHEINVASDQSQTRLSGDASVPDTCFPAQAELTVVDCSKGLDAKGRWTRARVAQVSMLISPFWFLAQLTFNLSLRYTTVTSNTILSSTSSLFTFLVALVFLGETFTWLKLISVLLCMGGTIIVSLADSSSSVNAIATNPPLGDFLSIVSAGLYAVYITLIRKKLPDEKEGQGQVSMAQFLGFLGLFNMLFFFPVALVLNFAKLEPFHRLTWEQAGLVVGKGR

SEQ ID NO: 186801 - protein, 294 aa, Zea Mays
MWFGKIGPFQAHTEASKVKVKIRLNLHGLVSVESAVLINDYQRNGSSTDHMEVDSSGDDMQGHKSRSERSIQRQELPITEYIYGAMSKHELLEAQEQEQQLAYQDKLVEWTKDRKNALESYVYDTRNKLSERYRSFATDSEREQISVNLQQTEDWLYEEGDDETEAVYSSKLEELKKLVDPIENRCKDDEVRAEAMRDLLKCIVDHRNAAKSLSTPERDAVDNECNKAEQWLREGSQLQESLPKNVDPVLWSCEIKRKEEELDTFCRNITRHKGSPARTDGSRGSDYMPTPDRD

SEQ ID NO: 186802 - protein, 816 aa, Zea Mays
MRSQEKSNYTTSPQQAKGSCPTCRRQASRHGRGRLLLATAACADRASVPSGSGAPLRSAHSISIHRAPNRTASPPHSRRSNPESAAMSVVGFDVGNDTLVAAAARQRGIDVLLNAESKRESPAAVAFSHNARLIGCHAASASSAHAPFSSVKRLSWAPRGGTRTPPSSATSPASLSPSPTPPVAAPSSTLTTSGRRIALSPTHLLSMLLAYLKQLAEADLGGAPVADCVISVPCYFTQAQRRAYLDAAAVAGLRPLRLMHDLAAAALGYGLYRSDLGGAGGPTCVAFVDVGQCDTQVAVVSFDMSGMKVLSHGFDADLGGRDFDEVLFEHFAEEFRDRYRIDVVRNVKASMRLRAACEKAKKVLSANAEAVVNIECLMEEKDVRGVIRREDFEKLCARLLERVVEPCKRAVEDSGIGLERLHSVELVGSGSRVPAITKVLAGFFRREPSRTLNASECVARGCALQCAMLSPTFRVREYEVQDAIPASIGFNTSDGPVSTLSSDALFRRGLHFPSVKIITLEKNDSFSFDAYYVDANELPPGTSTDIGSFQIGPFQAHTEASKVKVKIRLNLHGLVSVESAVLINDYQRNGSSTDHMEVDSSGDDMQGHKSRSERSIQRQELPITEYIYGAMSKHELLEAQEQEQQLAYQDKLVEWTKDRKNALESYVYDTRNKTEDWLYEEGDDETEAVYSSKLEELKKLVDPIENRCKDDEVRAEAMRDLLKCIVDHRNAAKSLSTPERDAVDNECNKAEQWLREGSQLQESLPKNVDPVLWSCEIKRKEEELDTFCRNITRHKGSPARTDGSRGSDYMPTPDRD

SEQ ID NO: 186803 - protein, 840 aa, Zea Mays
MRSQEKSNYTTSPQQAKGSCPTCRRQASRHGRGRLLLATAACADRASVPSGSGAPLRSAHSISIHRAPNRTASPPHSRRSNPESAAMSVVGFDVGNDTLVAAAARQRGIDVLLNAESKRESPAAVAFSHNARLIGCHAASASSAHAPFSSVKRLSWAPRGGTRTPPSSATSPASLSPSPTPPVAAPSSTLTTSGRRIALSPTHLLSMLLAYLKQLAEADLGGAPVADCVISVPCYFTQAQRRAYLDAAAVAGLRPLRLMHDLAAAALGYGLYRSDLGGAGGPTCVAFVDVGQCDTQVAVVSFDMSGMKVLSHGFDADLGGRDFDEVLFEHFAEEFRDRYRIDVVRNVKASMRLRAACEKAKKVLSANAEAVVNIECLMEEKDVRGVIRREDFEKLCARLLERVVEPCKRAVEDSGIGLERLHSVELVGSGSRVPAITKVLAGFFRREPSRTLNASECVARGCALQCAMLSPTFRVREYEVQDAIPASIGFNTSDGPVSTLSSDALFRRGLHFPSVKIITLEKNDSFSFDAYYVDANELPPGTSTDIGSFQQIGPFQAHTEASKVKVKIRLNLHGLVSVESAVLINDYQRNGSSTDHMEVDSSGDDMQGHKSRSERSIQRQELPITEYIYGAMSKHELLEAQEQEQQLAYQDKLVEWTKDRKNALESYVYDTRNKLSERYRSFATDSEREQISVNLQQTEDWLYEEGDDETEAVYSSKLEELKKLVDPIENRCKDDEVRAEAMRDLLKCIVDHRNAAKSLSTPERDAVDNECNKAEQWLREGSQLQESLPKNVDPVLWSCEIKRKEEELDTFCRNITRHKGSPARTDGSRGSDYMPTPDRD

SEQ ID NO: 186804 - protein, 733 aa, Zea Mays
MRSQEKSNYTTSPQQAKGSCPTCRRQASRHGRGRLLLATAACADRASVPSGSGAPLRSAHSISIHRAPNRTASPPHSRRSNPESAAMSVVGFDVGNDTLVAAAARQRGIDVLLNAESKRESPAAVAFSHNARLIGCHAASASSAHAPFSSVKRLSWAPRGGTRTPPSSATSPASLSPSPTPPVAAPSSTLTTSGRRIALSPTHLLSMLLAYLKQLAEADLGGAPVADCVISVPCYFTQAQRRAYLDAAAVAGLRPLRLMHDLAAAALGYGLYRSDLGGAGGPTCVAFVDVGQCDTQVAVVSFDMSGMKVLSHGFDADLGGRDFDEVLFEHFAEEFRDRYRIDVVRNVKASMRLRAACEKAKKVLSANAEAVVNIECLMEEKDVRGVIRREDFEKLCARLLERVVEPCKRAVEDSGIGLERLHSVELVGSGSRVPAITKVLAGFFRREPSRTLNASECVARGCALQCAMLSPTFRVREYEVQDAIPASIGFNTSDGPVSTLSSDALFRRGLHFPSVKIITLEKNDSFSFDAYYVDANELPPGTSTDIGSFQIGPFQAHTEASKVKVKIRLNLHGLVSVESAVLINDYQRNGSSTDHMEVDSSGDDMQGHKSRSERSIQRQELPITEYIYGAMSKHELLEAQEQEQQLAYQDKLVEWTKDRKNALESYVYDTRNKLSERYRSFATDSEREQISVNLQQTEDWLYEEGDDETEAVYSSKLEELKKIQLKIVVKMTK

SEQ ID NO: 186805 - protein, 814 aa, Zea Mays
MRSQEKSNYTTSPQQAKGSCPTCRRQASRHGRGRLLLATAACADRASVPSGSGAPLRSAHSISIHRAPNRTASPPHSRRSNPESAAMSVVGFDVGNDTLVAAAARQRGIDVLLNAESKRESPAAVAFSHNARLIGCHAASASSAHAPFSSVKRLSWAPRGGTRTPPSSATSPASLSPSPTPPVAAPSSTLTTSGRRIALSPTHLLSMLLAYLKQLAEADLGGAPVADCVISVPCYFTQAQRRAYLDAAAVAGLRPLRLMHDLAAAALGYGLYRSDLGGAGGPTCVAFVDVGQCDTQVAVVSFDMSGMKVLSHGFDADLGGRDFDEVLFEHFAEEFRDRYRIDVVRNVKASMRLRAACEKAKKVLSANAEAVVNIECLMEEKDVRGVIRREDFEKLCARLLERVVEPCKRAVEDSGIGLERLHSVELVGSGSRVPAITKVLAGFFRREPSRTLNASECVARGCALQCAMLSPTFRVREYEVQDAIPASIGFNTSDGPVSTLSSDALFRRGLHFPSVKIITLEKNDSFSFDAYYVDANELPPGTSTDIGSFQIGPFQAHTEASKVKVKIRLNLHGLVSVESAVGHKSRSERSIQRQELPITEYIYGAMSKHELLEAQEQEQQLAYQDKLVEWTKDRKNALESYVYDTRNKLSERYRSFATDSEREQISVNLQQTEDWLYEEGDDETEAVYSSKLEELKKLVDPIENRCKDDEVRAEAMRDLLKCIVDHRNAAKSLSTPERDAVDNECNKAEQWLREGSQLQESLPKNVDPVLWSCEIKRKEEELDTFCRNITRHKGSPARTDGSRGSDYMPTPDRD

SEQ ID NO: 186806 - protein, 839 aa, Zea Mays
MRSQEKSNYTTSPQQAKGSCPTCRRQASRHGRGRLLLATAACADRASVPSGSGAPLRSAHSISIHRAPNRTASPPHSRRSNPESAAMSVVGFDVGNDTLVAAAARQRGIDVLLNAESKRESPAAVAFSHNARLIGCHAASASSAHAPFSSVKRLSWAPRGGTRTPPSSATSPASLSPSPTPPVAAPSSTLTTSGRRIALSPTHLLSMLLAYLKQLAEADLGGAPVADCVISVPCYFTQAQRRAYLDAAAVAGLRPLRLMHDLAAAALGYGLYRSDLGGAGGPTCVAFVDVGQCDTQVAVVSFDMSGMKVLSHGFDADLGGRDFDEVLFEHFAEEFRDRYRIDVVRNVKASMRLRAACEKAKKVLSANAEAVVNIECLMEEKDVRGVIRREDFEKLCARLLERVVEPCKRAVEDSGIGLERLHSVELVGSGSRVPAITKVLAGFFRREPSRTLNASECVARGCALQCAMLSPTFRVREYEVQDAIPASIGFNTSDGPVSTLSSDALFRRGLHFPSVKIITLEKNDSFSFDAYYVDANELPPGTSTDIGSFQQIGPFQAHTEASKVKVKIRLNLHGLVSVESAVLINDYQRNGSSTDHMEVDSSGDDMGHKSRSERSIQRQELPITEYIYGAMSKHELLEAQEQEQQLAYQDKLVEWTKDRKNALESYVYDTRNKLSERYRSFATDSEREQISVNLQQTEDWLYEEGDDETEAVYSSKLEELKKLVDPIENRCKDDEVRAEAMRDLLKCIVDHRNAAKSLSTPERDAVDNECNKAEQWLREGSQLQESLPKNVDPVLWSCEIKRKEEELDTFCRNITRHKGSPARTDGSRGSDYMPTPDRD

SEQ ID NO: 186807 - protein, 839 aa, Zea Mays
MRSQEKSNYTTSPQQAKGSCPTCRRQASRHGRGRLLLATAACADRASVPSGSGAPLRSAHSISIHRAPNRTASPPHSRRSNPESAAMSVVGFDVGNDTLVAAAARQRGIDVLLNAESKRESPAAVAFSHNARLIGCHAASASSAHAPFSSVKRLSWAPRGGTRTPPSSATSPASLSPSPTPPVAAPSSTLTTSGRRIALSPTHLLSMLLAYLKQLAEADLGGAPVADCVISVPCYFTQAQRRAYLDAAAVAGLRPLRLMHDLAAAALGYGLYRSDLGGAGGPTCVAFVDVGQCDTQVAVVSFDMSGMKVLSHGFDADLGGRDFDEVLFEHFAEEFRDRYRIDVVRNVKASMRLRAACEKAKKVLSANAEAVVNIECLMEEKDVRGVIRREDFEKLCARLLERVVEPCKRAVEDSGIGLERLHSVELVGSGSRVPAITKVLAGFFRREPSRTLNASECVARGCALQCAMLSPTFRVREYEVQDAIPASIGFNTSDGPVSTLSSDALFRRGLHFPSVKIITLEKNDSFSFDAYYVDANELPPGTSTDIGSFQIGPFQAHTEASKVKVKIRLNLHGLVSVESAVLINDYQRNGSSTDHMEVDSSGDDMQGHKSRSERSIQRQELPITEYIYGAMSKHELLEAQEQEQQLAYQDKLVEWTKDRKNALESYVYDTRNKLSERYRSFATDSEREQISVNLQQTEDWLYEEGDDETEAVYSSKLEELKKLVDPIENRCKDDEVRAEAMRDLLKCIVDHRNAAKSLSTPERDAVDNECNKAEQWLREGSQLQESLPKNVDPVLWSCEIKRKEEELDTFCRNITRHKGSPARTDGSRGSDYMPTPDRD

SEQ ID NO: 186808 - protein, 838 aa, Zea Mays
MRSQEKSNYTTSPQQAKGSCPTCRRQASRHGRGRLLLATAACADRASVPSGSGAPLRSAHSISIHRAPNRTASPPHSRRSNPESAAMSVVGFDVGNDTLVAAAARQRGIDVLLNAESKRESPAAVAFSHNARLIGCHAASASSAHAPFSSVKRLSWAPRGGTRTPPSSATSPASLSPSPTPPVAAPSSTLTTSGRRIALSPTHLLSMLLAYLKQLAEADLGGAPVADCVISVPCYFTQAQRRAYLDAAAVAGLRPLRLMHDLAAAALGYGLYRSDLGGAGGPTCVAFVDVGQCDTQVAVVSFDMSGMKVLSHGFDADLGGRDFDEVLFEHFAEEFRDRYRIDVVRNVKASMRLRAACEKAKKVLSANAEAVVNIECLMEEKDVRGVIRREDFEKLCARLLERVVEPCKRAVEDSGIGLERLHSVELVGSGSRVPAITKVLAGFFRREPSRTLNASECVARGCALQCAMLSPTFRVREYEVQDAIPASIGFNTSDGPVSTLSSDALFRRGLHFPSVKIITLEKNDSFSFDAYYVDANELPPGTSTDIGSFQIGPFQAHTEASKVKVKIRLNLHGLVSVESAVLINDYQRNGSSTDHMEVDSSGDDMGHKSRSERSIQRQELPITEYIYGAMSKHELLEAQEQEQQLAYQDKLVEWTKDRKNALESYVYDTRNKLSERYRSFATDSEREQISVNLQQTEDWLYEEGDDETEAVYSSKLEELKKLVDPIENRCKDDEVRAEAMRDLLKCIVDHRNAAKSLSTPERDAVDNECNKAEQWLREGSQLQESLPKNVDPVLWSCEIKRKEEELDTFCRNITRHKGSPARTDGSRGSDYMPTPDRD

SEQ ID NO: 186809 - protein, 96 aa, Zea Mays
MSVVRSSICYIQTLKYKFNSNQTRNVDGHFFRTVYSHFEARVTTHKVNWKKEEHFVNKLISVGTWEPSDGIRSNSKNMHLSFQLVNTITATNWALF

SEQ ID NO: 186810 - protein, 68 aa, Zea Mays
MLVCLKMLPQTSTQSCCPSMKMPYYGALLGLLLLGVFGNSLAFWLCFFIRFGCVLSFFLSFFLFVGAF

SEQ ID NO: 186811 - protein, 289 aa, Zea Mays
MDDSDGGLSFDFEGGLDSAPASGGGGPVPSSTDPGAGVGGGGDGLGMHGRGRGRGSYRQTVCRHWLRGLCMKGEACGFLHQFDKARMPVCRFFRDFGECREPDCAYKHSYDDVKECNMYKMGFCPNGPNCRYKHIKLPGPPPSVEEVLQKILQMRSFNRYSQNRNNNYNHQGERPQHPQGSGLPNQNSAENATAVDPPAGGQQAQTLNQQPPQQQQKPNTNDQAQGVSNGHQATRIATPLPQGPSRCTSLLKVAIGRIWKYQFSKEFGLHRGVTRLNSMKLLNPLRMLF

SEQ ID NO: 186812 - protein, 541 aa, Zea Mays
MGLPDDEELKYTMDKISDNFSNYSAWHNRSILLSNLLIQQSKGFESKQKIFSEEFELVTQALFTDPSDQSGWFYHLWLLAQTSSPDNPQLIASWPSNAAKLSFSFIKEKAEQHTLSSVWSRTVPIVLYFNEPVKGLNHSSVNLKSDLEFGKDIQWRPLTMADSGYSKCWATYLQITNECSSLQEYSVEMSIPCSDDIVSRSGSNYNCPVHFTFYIELISNNAAQGLDTFDKPVAWNCSDSFQSHGNRDPIPLDLLNITSALVEHDSDWHFERLSEEIDLFRELADDNSKFGKLTLARLLLACAAIKSRGRSLIERKGYCEEALGLFTDLIHLDPSHKQYYEDERSLALMDKLTCDMETFTKHCSVQVQPNSAPLHHVQFRRLSVTRIGFAERLLWVQMLDLSHNSLRSVEGLEALQRLVFLNISNNQISSFTALEPLTKIISLKVLDLSFNEIGAHSIDTARYICPSPFSHKTEASEAFEEYQEVNNINVTEYWDAILFFRSLKLAQLDIRGNAVASKDGFRTLVVTLIPCLKWFDGEGVS

SEQ ID NO: 186813 - protein, 249 aa, Zea Mays
MTIARLLLACAAIKSRGRSLIERKGYCEEALGLFTDLIHLDPSHKQYYEDERSLALMDKLTCDMETFTKHCSVQVQPNSAPLHHVQFRRLSVTRIGFAERLLWVQMLDLSHNSLRSVEGLEALQRLVFLNISNNQISSFTALEPLTKIISLKVLDLSFNEIGAHSIDTARYICPSPFSHKTEASEAFEEYQEVNNINVTEYWDAILFFRSLKLAQLDIRGNAVASKDGFRTLVVTLIPCLKWFDGEGVS

SEQ ID NO: 186814 - protein, 93 aa, Zea Mays
MYYCNEQNPVNVTYIKRDWIALLQLDFSYPGYQINLNLSSPGHVIKHAPRVSVTGCSFPVNLADVPMNTVSSFSGHPHCLLCQHDKNKRSLII

SEQ ID NO: 186815 - protein, 409 aa, Zea Mays
MVLLKNEELIIKTGNLMGKSHPTVTRIEALRLCQVFLRSSRGCNWLMTAHGQPIVQGITNAMSEINEKTLVREGCRTALLALRYSGNHHRCFWFNAIDKILYKILCGSCNSSSHAHQTLCHGELFNIDSKDIMDIHPYVWDILGYLAVHCDNEHFSVGTCQNNFLQGLISCACSLATDLTLKKSPLKLSKEEQEPALRAVLMMLLSPSQFIFSELDAGIVCHECRDHYNEGLVGVLKQALCQNMSPGPKSYIAHILSMFGLCGFPSKLGGNMRNVLCDSELVDLELLLADGESLSAHAAILSARCPKLLPSEKTFVRDGSVTYEWGRRSCYHVRMSDRVDSHALKKILEYAYTGLVTVDDATVKPVKTLAKYCHLRSLHLMLQKEQPRWHSCPIYDLTTALEPAKHSFS

SEQ ID NO: 186816 - protein, 495 aa, Zea Mays
MRPAFSASKPSPSGREKGRRKGASAAEQLLTGQAVPLRTRLHDALALGLTKSDGHGAKKWQSTDAGVQSHVLKSVGAFVGCLSNELLRLPPIKESISDILVALEGILKTENVSVLIQAADVSSKFFSTLGNSVRQYSVLEMVSCLSCHLSANQLRIALPCASALTCILNNQVTARASTQAEIWEALDKTNAVASVISTLQNYTEDVHPLNYLTEMISLLRSILWIWPSSRYHVWSNHNLMAKLAHYCLTAETTVSAKILKLYAALALCGNGAMVLLKNEELIIKTGNLMGKSHPTVTRIEALRLCQVFLRSSRGCNWLMTAHGQPIVQGITNAMSEINEKTLVREGCRTALLALRYSGNHHRCFWFNAIDKILYKILCGSCNSSSHAHQTLCHGELFNIDSKDIMDIHPYVWDILGYLAVHCDNEHFSVGTCQNNFLQGLISCACSLATDLTLKKSPLKLSKEEQEPALRAVLMMLLSPSQFIFSEGHHFGGPIK

SEQ ID NO: 186817 - protein, 490 aa, Zea Mays
MRPAFSASKPSPSGREKGRRKGASAAEQLLTGQAVPLRTRLHDALALGLTKSDGHGAKKWQSTDAGVQSHVLKSVGAFVGCLSNELLRLPPIKESISDILVALEGILKTENVSVLIQAADVSSKFFSTLGNSVRQYSVLEMVSCLSCHLSANQLRIALPCASALTCILNNQVTARASTQAEIWEALDKTNAVASVISTLQNYTEDVHPLNYLTEMISLLRSILWIWPSSRYHVWSNHNLMAKLAHYCLTAETTVSAKILKLYAALALCGNGAMVLLKNEELIIKTGNLMGKSHPTVTRIEALRLCQVFLRSSRGCNWLMTAHGQPIVQGITNAMSEINEKTLVREGCRTALLALRYSGNHHRCFWFNAIDKILYKILCGSCNSSSHAHQTLCHGELFNIDSKDIMDIHPYVWDILGYLAVHCDNEHFSVGTCQNNFLQGLISCACSLATDLTLKKSPLKLSKEEQEPALRAVLMMLLSPSQFIFSEMANL

SEQ ID NO: 186818 - protein, 495 aa, Zea Mays
MRPAFSASKPSPSGREKGRRKGASAAEQLLTGQAVPLRTRLHDALALGLTKSDGHGAKKWQSTDAGVQSHVLKSVGAFVGCLSNELLRLPPIKESISDILVALEGILKTENVSVLIQAADVSSKFFSTLGNSVRQYSVLEMVSCLSCHLSANQLRIALPCASALTCILNNQVTARASTQAEIWEALDKTNAVASVISTLQNYTEDVHPLNYLTEMISLLRSILWIWPSSRYHVWSNHNLMAKLAHYCLTAETTVSAKILKLYAALALCGNGAMVLLKNEELIIKTGNLMGKSHPTVTRIEALRLCQVFLRSSRGCNWLMTAHGQPIVQGITNAMSEINEKTLVREGCRTALLALRYSGNHHRCFWFNAIDKILYKILCGSCNSSSHAHQTLCHGELFNIDSKDIMDIHPYVWDILGYLAVHCDNEHFSVGTCQNNFLQGLISCACSLATDLTLKKSPLKLSKEEQEPALRAVLMMLLSPSQFIFSEKVRCGDCVP

SEQ ID NO: 186819 - protein, 787 aa, Zea Mays
MRPAFSASKPSPSGREKGRRKGASAAEQLLTGQAVPLRTRLHDALALGLTKSDGHGAKKWQSTDAGVQSHVLKSVGAFVGCLSNELLRLPPIKESISDILVALEGILKTENVSVLIQAADVSSKFFSTLGNSVRQYSVLEMVSCLSCHLSANQLRIALPCASALTCILNNQVTARASTQAEIWEALDKTNAVASVISTLQNYTEDVHPLNYLTEMISLLRSILWIWPSSRYHVWSNHNLMAKLAHYCLTAETTVSAKILKLYAALALCGNGAMVLLKNEELIIKTGNLMGKSHPTVTRIEALRLCQVFLRSSRGCNWLMTAHGQPIVQGITNAMSEINEKTLVREGCRTALLALRYSGNHHRCFWFNAIDKILYKILCGSCNSSSHAHQTLCHGELFNIDSKDIMDIHPYVWDILGYLAVHCDNEHFSVGTCQNNFLQGLISCACSLATDLTLKKSPLKLSKEEQEPALRAVLMMLLSPSQFIFSEASSKFLEAVLPLDNEYMNMFMSSLESNVTRNLTASFDCVKIMTNLMNIACLLVVQSNYSLNKRSAVDVLSNIIKECLHDHLYITRSNFASHLQFCFDGSSCCYLSEEWEGENIVLFYGLVVLFNLLKSDNFICFHCKRKLDAGIVCHECRDHYNEGLVGVLKQALCQNMSPGPKSYIAHILNGESLSAHAAILSARCPKLLPSEKTFVRDGSVTYEWGRRSCYHVRMSDRVDSHALKKILEYAYTGLVTVDDATVKPVKTLAKYCHLRSLHLMLQKEQPRWHSCPIYDLTTALEPAKHSFS

SEQ ID NO: 186820 - protein, 985 aa, Zea Mays
MRPAFSASKPSPSGREKGRRKGASAAEQLLTGQAVPLRTRLHDALALGLTKSDGHGAKKWQSTDAGVQSHVLKSVGAFVGCLSNELLRLPPIKESISDILVALEGILKTENVSVLIQAADVSSKFFSTLGNSVRQYSVLEMVSCLSCHLSANQLRIALPCASALTCILNNQVTARASTQAEIWEALDKTNAVASVISTLQNYTEDVHPLNYLTEMISLLRSILWIWPSSRYHVWSNHNLMAKLAHYCLTAETTVSAKILKLYAALALCGNGAMVLLKNEELIIKTGNLMGKSHPTVTRIEALRLCQVFLRSSRGCNWLMTAHGQPIVQGITNAMSEINEKTLVREGCRTALLALRYSGNHHRCFWFNAIDKILYKILCGSCNSSSHAHQTLCHGELFNIDSKDIMDIHPYVWDILGYLAVHCDNEHFSVGTCQNNFLQGLISCACSLATDLTLKKSPLKLSKEEQEPALRAVLMMLLSPSQFIFSEASSKFLEAVLPLDNEYMNMFMSSLESNVTRNLTASFDCVKIMTNLMNIACLLVVQSNYSLNKRSAVDVLSNIIKECLHDHLYITRSNFASHLQFCFDGSSCCYLSEEWEGENIVLFYGLVVLFNLLKSDNFICFHCKRKLDAGIVCHECRDHYNEGLVGVLKQALCQNMSPGPKSYIAHILNGESLSAHAAILSARCPKLLPSEKTFVRDGSVTYEWGRRSCYHVRMSDRVDSHALKKILEYAYTGLVTVDDATVKPVKTLAKYCHLRSLHLMLQKEQPRWHSCPIYDLTTALEPAKHSFSDIILEAQSNDKMECHHGSCQLSTPHIHSHKVILSVSCEYLRALFQSGMHESFAETIRVPVGWEALRKLVQWFYSGELPRVPPDCRWKATSTEEKLSILKSYAELSSLADFWFVDGMKEESLQVLTSCLNSSSTDASLAFIGFAANLGQWELVEAAISSVAHLYPRLRDSGRLEQLDEDVLNMLRTEHVRYLQHRSASK

SEQ ID NO: 186821 - protein, 426 aa, Zea Mays
MDFSTEISQSTQFLIQEIRKMFDAAEARLDWRFARLLQSNRDAVSPLPPLLVVDEPNRVVASPSPLPPVVYEPYRDEAMAGADARAHYGGYLPCERGGLATAWQPGDLFGRGVYSDEQRFEEPISADNCGADARREVALAARVLAADTCAAGILDGAAPFAATSEKQMAPVASPSPFSFLTTTSAARVAVMETTTSNSPPKCSAKCLNVSSTPNLALGDPEEPENIVASKPVVDKPVTSANTKTFQHEIKDLAVNVYGKWLRLGIYSEVRFQTCTKAHSGSLSHEEQDAKTFAAWGVDYLADPVSYSEEYELLFGIYHSTNTEDRILTTMPTSTSTLLHSSLTYALPGASLPNLALLSSMSLEHASLGAHHVLEELSTRTDDLFSNRIGSKPTLMAYGSELRVVRADKSRRSPVVSAAWEQVYVQQ

SEQ ID NO: 186822 - protein, 574 aa, Zea Mays
MDFSTEISQSTQFLIQEIRKMFDAAEARLDWRFARLLQSNRDAVSPLPPLLVVDEPNRVVASPSPLPPVVYEPYRDEAMAGADARAHYGGYLPCERGGLATAWQPGDLFGRGVYSDEQRFEEPISADNCGADARREVALAARVLAADTCAAGILDGAAPFAATSEKQMAPVASPSPFSFLTTTSAARVAVMETTTSNSPPKCSAKCLNVSSTPNLALGDPEEPENIVASKPVVDKPVTSANTKTFQHEIKDLAVNVYGKWLRLGIYSEVRFQTCTKAHSGSLSHEEQDAKTFAAWGVDYLADPVSYSEEYELLFGIYHSTNTEDRILTTMPTSTSTLLHSSLTYALPGASLPNLALLSSMSLEHASLGAHHVLEELSTRTDDLFSNRIGSKPTLMAYGSELRVVRADKSRRSPVGKIRELNEDIIVPEYYYAGGDELQSLNAWFGPEGNIQIIVELQSLNLNSRPSLSLVVSLETSTSPPILWPSRGPLNMFAMVLCTLEEADQSFIFYSIGSLGASVCAAIEMTMGSRSKDSTKEIQMPWDPGLQKTNEFGDQGNFSIFVWDPGDHNVQPIKG

SEQ ID NO: 186823 - protein, 126 aa, Zea Mays
MFDAAEARLDWRFARLLQSNRDAGGDLLRQRGREGGRLQGAGVRVHAELQPRQVAAPGVPRARQGREEPERGPEAQRRPGHRRRAELPAHELRAAHHPLRPQAEQCPPRGGHDRAHRRLRPRQAAP

SEQ ID NO: 186824 - protein, 530 aa, Zea Mays
MSVLIVTSVGDIEVDLHTDRCALTTKNFLKLCKMKYYNGCLFHKVEKDFLAQTGDPTGTGTGGDSVYKFLYGDQARFFDDEIRPELRHSKTGTVAMASAGENCNASQFYITLRDDVDYLDDKHTVFGMVAEGFDTLTKINEAYVDDNGRPFKDIRIKHTYVLDDPFDDPPQLAELIPENSPTGKPRDEVAEERLEDTWVPLDQTVAPEELEEMIRSKEAHTNAVILESLADIPDAEVKPPDNVLFVCKLNPVTQDEDLYTIFSRFGTVTSAEIIRDYKTGDSLCYAFIEFDTKEACERAYFKMDNCLIDDRRIHVDFSQSVSKLWGQFRQSKRNAKKDGCFKCGAPDHLARDCDQDGEQKNKGPSYVLKDENTQRGGNHRRSYDLVFDEDEADCSEERDHENGHRRKNRRIDDRKSELPPRGGRDRNSHERTHSDEKGSKHGKDDRNRGDRKHDDYHSYSRSGDRSSGRNDDRDYSKRHDRSRSGEEEKGYRRRDKSDDSKHRREDGGHHVRNQQSDDRSYKERRHRDGR

SEQ ID NO: 186825 - protein, 247 aa, Zea Mays
MESAVEGKGRTASDGTDSESNSFDKRDDMSEDELVVLGGKIDDSVDNVNIDESEDNRSKQGVKRRRKRVKMKATTETERSKKAKSKVWDAFTKVTVPDTTEKGKMISKAKCNYCKKLYSYIQGSTTSHLSRHMRICAVYLKHVAKQQDQSLLNFAPSTADVRSELEKLYGDFEVQHRERKESQSKSNASSSLSVERSCSLPSASCQFPSFLSSTQSNPSKSELLIYLEETNEEDDEDNVVNIMFPKA

SEQ ID NO: 186826 - protein, 302 aa, Zea Mays
MTISSERARARLFGVTVGCRDCEEAGALVVNGGAAEQRKAPAPKRHLRAVAVQQRSPALPPGNARDQPDGLAAQAAGCQAAIRRPPPIPPGSSDGIGCQASPRQLLRSGRGARLSSLQEPISRVVAASLVRLLSGYLLLLMESAVEGKGRTASDGTDSESNSFDKRDDMSEDELVVLGGKIDDSVDNVNIDESEDNRSKQGVKRRRKRVKMKATTETERSKKAKSKVWDAFTKVTVPDTTEKGKMISKAKCNYCKKLYSYIQGSTTSHLSRHMRICAVYLKHVAKQQDQSLLNFAPSTAGRR

SEQ ID NO: 186827 - protein, 363 aa, Zea Mays
MTISSERARARLFGVTVGCRDCEEAGALVVNGGAAEQRKAPAPKRHLRAVAVQQRSPALPPGNARDQPDGLAAQAAGCQAAIRRPPPIPPGSSDGIGCQASPRQLLRLLSGYLLLLMESAVEGKGRTASDGTDSESNSFDKRDDMSEDELVVLGGKIDDSVDNVNIDESEDNRSKQGVKRRRKRVKMKATTETERSKKAKSKVWDAFTKVTVPDTTEKGKMISKAKCNYCKKLYSYIQGSTTSHLSRHMRICAVYLKHVAKQQDQSLLNFAPSTADVRSELEKLYGDFEVQHRERKESQSKSNASSSLSVERSCSLPSASCQFPSFLSSTQSNPSKSELLIYLEETNEEDDEDNVVNIMFPKA

SEQ ID NO: 186828 - protein, 172 aa, Zea Mays
MESAVEGKGRTASDGTDSESNSFDKRDDMSEDELVVLGGKIDDSVDNVNIDESEDNRSKQGVKRRRKRVKMKATTETERSKKAKSKVWDAFTKVTVPDTTEKGKMISKAKCNYCKKLYSYIQGSTTSHLSRHMRICAVYLKHVAKQQDQSLLNFAPSTADKEFDLLNWWKVN

SEQ ID NO: 186829 - protein, 235 aa, Zea Mays
MESAVEGKGRTASDGTDSESNSFDKRDDMSEDELVVLGGKIDDSVDNVNIDESEDNRSKQGVKRRRKRVKMKATTETERSKKAKSKVWDAFTKVTVPDTTEKGKMISKAKCNYCKKLYSYIQGSTTSHLSRHMRICAVYLKHVAKQQDQSLLNFAPSTADNASNNDGAIRGLRARFSARQGSAFVAKYFHIRCCAHIINLVVKDGTAALDSLISNLRSTVKYVMVIATILDPRYK

SEQ ID NO: 186830 - protein, 992 aa, Zea Mays
MRPESPRSTKLKTVVPHSAAEALHEAAKEADVSPHHPSYVHPSKNEISEAVSCSDPSILSNGTKVISTSKGTKLEDTLYSPRVHSSLATERFQSAHDDAFKVAVQASSYLSQSESLVQSSSCLPSRSNEVSSTNLYGSSVDSLVRSAQEKTECDGKHVDHKSEVTKDRILPSAIPTDMLQSAISKNGGVMKNGGGECYVYNRNLLGGTSYEWPSVTPSHFVSPQMQQRPAAADRLHLDVGYRWPTQFNQPFLPANHQVRNPPIDAGHNQMLPSLAVPLSFDWPPVFRGYGKNASVSYDPLYTPQMQSSAWSGFPAQLVQRGGICSDSDVADDTESYWFSEEESDSRAHSGRDINQYFGGGVMYWSPAEHAGTGFSRPPSLSSDDSAWAWHEADVIRVVDDVANGIPSTYTNGVSSPPSTPSCSQNESLDPAAHLITGNEINNEALTSPSSVQDSPEDKIMQVAKAVSCGSEVVKADTLPYAMLRPIVVPSISRRSSRSEIKGAHDHRRSPCVPSTRRDIPILRRPPSPVVLSVPRVPRPPPPSPAGESRKRGFPIVRSGSSSPRHWGMRGLFSEDKIFHRAQFCLDGPEVVWPSWGNKGTSGTLVQTIEDTVLQDHLVKISQLSCDQHPDVALPVQPLDMLNGSSHKASLSLMHNALHEEIDQFCKQVAAGNLVRRPYINWAVKRVTRCLQVLWPRSRTNLFGSNATGLALPTSDVDLVVSLPPVRNLEPIKEAGILEGRNGIKETCLQHAARCLTNQDWVRSDSLKTVENTAIPVIMLVADVPCDTNMSNEYSSVLDGSQDYSVNMLGEQGSPPRSDTSSSEGSNMLMCSKLNKDDCDIVQSIRLDISFKSPSHTGLQTTELVRELSQQFPAVIPLALILKKFLADRSLDHPYSGGLSSYCLVLLIVRFLQHEHHLGRPINKNLGSLLMDFLYFFGNIFDPRHMRISIQGSGIYLNRERGQSIDPIHIDDPHCPANNVGRNCFRIHQCIKL

SEQ ID NO: 186831 - protein, 1033 aa, Zea Mays
MRPESPRSTKLKTVVPHSAAEALHEAAKEADVSPHHPSYVHPSKNEISEAVSCSDPSILSNGTKVISTSKGTKLEDTLYSPRVHSSLATERFQSAHDDAFKVAVQASSYLSQSESLVQSSSCLPSRSNEVSSTNLYGSSVDSLVRSAQEKTECDGKHVDHKSEVTKDRILPSAIPTDMLQSAISKNGGVMKNGGGECYVYNRNLLGGTSYEWPSVTPSHFVSPQMQQRPAAADRLHLDVGYRWPTQFNQPFLPANHQVRNPPIDAGHNQMLPSLAVPLSFDWPPVFRGYGKNASVSYDPLYTPQMQSSAWSGFPAQLVQRGGICSDSDVADDTESYWFSEEESDSRAHSGRDINQYFGGGVMYWSPAEHAGTGFSRPPSLSSDDSAWAWHEADVIRVVDDVANGIPSTYTNGVSSPPSTPSCSQNESLDPAAHLITGNEINNEALTSPSSVQDSPEDKIMQVAKAVSCGSEVVKADTLPYAMLRPIVVPSISRRSSRSEIKGAHDHRRSPCVPSTRRDIPILRRPPSPVVLSVPRVPRPPPPSPAGESRKRGFPIVRSGSSSPRHWGMRGLFSEDKIFHRAQFCLDGPEVVWPSWGNKGTSGTLVQTIEDTVLQDHLVKISQLSCDQHPDVALPVQPLDMLNGSSHKASLSLMHNALHEEIDQFCKQVAAGNLVRRPYINWAVKRVTRCLQVLWPRSRTNLFGSNATGLALPTSDVDLVVSLPPVRNLEPIKEAGILEGRNGIKETCLQHAARCLTNQDWVRSDSLKTVENTAIPVIMLVADVPCDTNMSNEYSSVLDGSQDYSVNMLGEQGSPPRSDTSSSEGSNMLMCSKLNKDDCDIVQSIRLDISFKSPSHTGLQTTELVRELSQQFPAVIPLALILKKFLADRSLDHPYSGGLSSYCLVLLIVRFLQHEHHLGRPINKNLGSLLMDFLYFFGNIFDPRHMRISIQGSGIYLNRERGQSIDPIHIDDPHCPANNVGRNCFRIHQCIKAFADAFAVLENELLQFSSECSMPVSSFNILKKIIPSIDSDEL

SEQ ID NO: 186832 - protein, 643 aa, Zea Mays
MASTAAAPRTTKELMDALTAHLSLYHAAANPSPATAAASTSSSSPRAAILRWLASLSPAARAAAATSLLSPAAAAALLSMVRRLRLRGHSSFFVLHSSSPSTSARGAEEPTVLSRLSRGLLARAAASSRAQALLFANTLLFPSSPASSRRPDVITVAEAFVADLDGFVAAMDEISGGRFLCCGEGEVDLAALACQDFPELPWLNAKGYYVIEEFLANRLDIALRMSWAAAGGGSAGGRKAVRIGKSAKEKAGLAANAFWREKGYADWWMRLEPRMRASLMGVFFGKGAMALANEMVEGSDSASRDNLGEPGSFVANESCECTRQSLFRKNCASSVDGANILSCSKKSVFYKELKRLKLVEEIVCLKSNITCCSGDAIFFTSLVSAATAAGDVLMKLQGLLMVVSTESINLELIGDEAPKKKDVEKTSGGSRKGKKKSNTLKKLTTSAKPSKDNGCSSSDNRNCSPLPNHCAPSVEGTAAGPPSEKTPYKEIVPTTKEQTVSLDGCKNQCNKKKNKRKGKTKLSNPMRPESPRSTKLKTVVPHSAAEALHEAAKEADVSPHHPSYVHPSKNEISEAVSCSDPSILSNGTKNVFRVPMMMPSKWLCRPHRTLAKVNPWFSHPLVYLPEAMRSLLLICMEVQLTPW

SEQ ID NO: 186833 - protein, 749 aa, Zea Mays
MLQSAISKNGGVMKNGGGECYVYNRNLLGGTSYEWPSVTPSHFVSPQMQQRPAAADRLHLDVGYRWPTQFNQPFLPANHQVRNPPIDAGHNQMLPSLAVPLSFDWPPVFRGYGKNASVSYDPLYTPQMQSSAWSGFPAQLVQRGGICSDSDVADDTESYWFSEEESDSRAHSGRDINQYFGGGVMYWSPAEHAGTGFSRPPSLSSDDSAWAWHEADVIRVVDDVANGIPSTYTNGVSSPPSTPSCSQNESLDPAAHLITGNEINNEALTSPSSVQDSPEDKIMQVAKAVSCGSEVVKADTLPYAMLRPIVVPSISRRSSRSEIKGAHDHRRSPCVPSTRRDIPILRRPPSPVVLSVPRVPRPPPPSPAGESRKRGFPIVRSGSSSPRHWGMRGLFSEDKIFHRAQFCLDGPEVVWPSWGNKGTSGTLVQTIEDTVLQDHLVKISQLSCDQHPDVALPVQPLDMLNGSSHKASLSLMHNALHEEIDQFCKQVAAGNLVRRPYINWAVKRVTRCLQVLWPRSRTNLFGSNATGLALPTSDVDLVVSLPPVRNLEPIKEAGILEGRNGIKETCLQHAARCLTNQDWVRSDSLKTVENTAIPVIMLVADVPCDTNMSNEYSSVLDGSQDYSVNMLGEQGSPPRSDTSSSEGSNMLMCSKLNKDDCDIVQSIRLDISFKSPSHTGLQTTELVRELSQQFPAVIPLALILKKFLADRSLDHPYSGGLSSYCLVLLIVRFLQHEHHLGRPINKEHI

SEQ ID NO: 186834 - protein, 846 aa, Zea Mays
MLQSAISKNGGVMKNGGGECYVYNRNLLGGTSYEWPSVTPSHFVSPQMQQRPAAADRLHLDVGYRWPTQFNQPFLPANHQVRNPPIDAGHNQMLPSLAVPLSFDWPPVFRGYGKNASVSYDPLYTPQMQSSAWSGFPAQLVQRGGICSDSDVADDTESYWFSEEESDSRAHSGRDINQYFGGGVMYWSPAEHAGTGFSRPPSLSSDDSAWAWHEADVIRVVDDVANGIPSTYTNGVSSPPSTPSCSQNESLDPAAHLITGNEINNEALTSPSSVQDSPEDKIMQVAKAVSCGSEVVKADTLPYAMLRPIVVPSISRRSSRSEIKGAHDHRRSPCVPSTRRDIPILRRPPSPVVLSVPRVPRPPPPSPAGESRKRGFPIVRSGSSSPRHWGMRGLFSEDKIFHRAQFCLDGPEVVWPSWGNKGTSGTLVQTIEDTVLQDHLVKISQLSCDQHPDVALPVQPLDMLNGSSHKASLSLMHNALHEEIDQFCKQVAAGNLVRRPYINWAVKRVTRCLQVLWPRSRTNLFGSNATGLALPTSDVDLVVSLPPVRNLEPIKEAGILEGRNGIKETCLQHAARCLTNQDWVRSDSLKTVENTAIPVIMLVADVPCDTNMSNEYSSVLDGSQDYSVNMLGEQGSPPRSDTSSSEGSNMLMCSKLNKDDCDIVQSIRLDISFKSPSHTGLQTTELVRELSQQFPAVIPLALILKKFLADRSLDHPYSGGLSSYCLVLLIVRFLQHEHHLGRPINKNLGSLLMDFLYFFGNIFDPRHMRISIQGSGIYLNRERGQSIDPIHIDDPHCPANNVGRNCFRIHQCIKNELLQFSSECSMPVSSFNILKKIIPSIDSDEL

SEQ ID NO: 186835 - protein, 1085 aa, Zea Mays
MASTAAAPRTTKELMDALTAHLSLYHAAANPSPATAAASTSSSSPRAAILRWLASLSPAARAAAATSLLSPAAAAALLSMVRRLRLRGHSSFFVLHSSSPSTSARGAEEPTVLSRLSRGLLARAAASSRAQALLFANTLLFPSSPASSRRPDVITVAEAFVADLDGFVAAMDEISGGRFLCCGEGEVDLAALACQDFPELPWLNAKGYYVIEEFLANRLDIALRMSWAAAGGGSAGGRKAVRIGKSAKEKAGLAANAFWREKGILSCSKKSVFYKELKRLKLVEEIVCLKSNITCCSGDAIFFTSLVSAATAAGDVLMKLQGLLMVVSTESINLELIGDEAPKKKDVEKTSGGSRKGKKKSNTLKKLTTSAKPSKDNGCSSSDNRNCSPLPNHCAPSVEGTAAGPPSEKTPYKEIVPTTKEQTVSLDGCKNQCNKKKNKRKGKTKLSNPMRPESPRSTKLKTVVPHSAAEALHEAAKEADVSPHHPSYVHPSKNEISEAVSCSDPSILSNGTKVISTSKGTKLEDTLYSPRVHSSLATERFQSAHDDAFKVAVQASSYLSQSESLVQSSSCLPSRSNEVSSTNLYGSSVDSLVRSAQEKTECDGKHVDHKSEVTKDRILPSAIPTDMLQSAISKNGGVMKNGGGECYVYNRNLLGGTSYEWPSVTPSHFVSPQMQQRPAAADRLHLDVGYRWPTQFNQPFLPANHQVRNPPIDAGHNQMLPSLAVPLSFDWPPVFRGYGKNASVSYDPLYTPQMQSSAWSGFPAQLVQRGGICSDSDVADDTESYWFSEEESDSRAHSGRDINQYFGGGVMYWSPAEHAGTGFSRPPSLSSDDSAWAWHEADVIRVVDDVANGIPSTYTNGVSSPPSTPSCSQNESLDPAAHLITGNEINNEALTSPSSVQDSPEDKIMQVAKAVSCGSEVVKADTLPYAMLRPIVVPSISRRSSRSEIKGAHDHRRSPCVPSTRRDIPILRRPPSPVVLSVPRVPRPPPPSPAGESRKRGFPIVRSGSSSPRHWGMRGLFSEDKIFHRAQFCLDGPEVVWPSWGNKGTSGTLVQTIEDTVLQDHLVKISQLSCDQHMWHCLYSH

SEQ ID NO: 186836 - protein, 1559 aa, Zea Mays
MASTAAAPRTTKELMDALTAHLSLYHAAANPSPATAAASTSSSSPRAAILRWLASLSPAARAAAATSLLSPAAAAALLSMVRRLRLRGHSSFFVLHSSSPSTSARGAEEPTVLSRLSRGLLARAAASSRAQALLFANTLLFPSSPASSRRPDVITVAEAFVADLDGFVAAMDEISGGRFLCCGEGEVDLAALACQDFPELPWLNAKGYYVIEEFLANRLDIALRMSWAAAGGGSAGGRKAVRIGKSAKEKAGLAANAFWREKGYADWWMRLEPRMRASLMGVFFGKGAMALANEMVEGSDSASRDNLGEPGSFVANESCECTRQSLFRKNCASSVDGANILSCSKKSVFYKELKRLKLVEEIVCLKSNITCCSGDAIFFTSLVSAATAAGDVLMKLQGLLMVVSTESINLELIGDEAPKKKDVEKTSGGSRKGKKKSNTLKKLTTSAKPSKDNGCSSSDNRNCSPLPNHCAPSVEGTAAGPPSEKTPYKEIVPTTKVEQTVSLDGCKNQCNKKKNKRKGKTKLSNPMRPESPRSTKLKTVVPHSAAEALHEAAKEADVSPHHPSYVHPSKNEISEAVSCSDPSILSNGTKVISTSKGTKLEDTLYSPRVHSSLATERFQSAHDDAFKVAVQASSYLSQSESLVQSSSCLPSRSNEVSSTNLYGSSVDSLVRSAQEKTECDGKHVDHKSEVTKDRILPSAIPTDMLQSAISKNGGVMKNGGGECYVYNRNLLGGTSYEWPSVTPSHFVSPQMQQRPAAADRLHLDVGYRWPTQFNQPFLPANHQVRNPPIDAGHNQMLPSLAVPLSFDWPPVFRGYGKNASVSYDPLYTPQMQSSAWSGFPAQLVQRGGICSDSDVADDTESYWFSEEESDSRAHSGRDINQYFGGGVMYWSPAEHAGTGFSRPPSLSSDDSAWAWHEADVIRVVDDVANGIPSTYTNGVSSPPSTPSCSQNESLDPAAHLITGNEINNEALTSPSSVQDSPEDKIMQVAKAVSCGSEVVKADTLPYAMLRPIVVPSISRRSSRSEIKGAHDHRRSPCVPSTRRDIPILRRPPSPVVLSVPRVPRPPPPSPAGESRKRGFPIVRSGSSSPRHWGMRGLFSEDKIFHRAQFCLDGPEVVWPSWGNKGTSGTLVQTIEDTVLQDHLVKISQLSCDQHPDVALPVQPLDMLNGSSHKASLSLMHNALHEEIDQFCKQVAAGNLVRRPYINWAVKRVTRCLQVLWPRSRTNLFGSNATGLALPTSDVDLVVSLPPVRNLEPIKEAGILEGRNGIKETCLQHAARCLTNQDWVRSDSLKTVENTAIPVIMLVADVPCDTNMSNEYSSVLDGSQDYSVNMLGEQGSPPRSDTSSSEGSNMLMCSKLNKDDCDIVQSIRLDISFKSPSHTGLQTTELVRELSQQFPAVIPLALILKKFLADRSLDHPYSGGLSSYCLVLLIVRFLQHEHHLGRPINKNLGSLLMDFLYFFGNIFDPRHMRISIQGSGIYLNRERGQSIDPIHIDDPHCPANNVGRNCFRIHQCIKAFADAFAVLENELLQFSSECSMPVSSFNILKKIIPSIDSDEL

SEQ ID NO: 186837 - protein, 631 aa, Zea Mays
MRPESPRSTKLKTVVPHSAAEALHEAAKEADVSPHHPSYVHPSKNEISEAVSCSDPSILSNGTKVISTSKGTKLEDTLYSPRVHSSLATERFQSAHDDAFKVAVQASSYLSQSESLVQSSSCLPSRSNEVSSTNLYGSSVDSLVRSAQEKTECDGKHVDHKSEVTKDRILPSAIPTDMLQSAISKNGGVMKNGGGECYVYNRNLLGGTSYEWPSVTPSHFVSPQMQQRPAAADRLHLDVGYRWPTQFNQPFLPANHQVRNPPIDAGHNQMLPSLAVPLSFDWPPVFRGYGKNASVSYDPLYTPQMQSSAWSGFPAQLVQRGGICSDSDVADDTESYWFSEEESDSRAHSGRDINQYFGGGVMYWSPAEHAGTGFSRPPSLSSDDSAWAWHEADVIRVVDDVANGIPSTYTNGVSSPPSTPSCSQNESLDPAAHLITGNEINNEALTSPSSVQDSPEDKIMQVAKAVSCGSEVVKADTLPYAMLRPIVVPSISRRSSRSEIKGAHDHRRSPCVPSTRRDIPILRRPPSPVVLSVPRVPRPPPPSPAGESRKRGFPIVRSGSSSPRHWGMRGLFSEDKIFHRAQFCLDGPEVVWPSWGNKGTSGTLVQTIEDTVLQDHLVKISQLSCDQHVRV

SEQ ID NO: 186838 - protein, 1086 aa, Zea Mays
MASTAAAPRTTKELMDALTAHLSLYHAAANPSPATAAASTSSSSPRAAILRWLASLSPAARAAAATSLLSPAAAAALLSMVRRLRLRGHSSFFVLHSSSPSTSARGAEEPTVLSRLSRGLLARAAASSRAQALLFANTLLFPSSPASSRRPDVITVAEAFVADLDGFVAAMDEISGGRFLCCGEGEVDLAALACQDFPELPWLNAKGYYVIEEFLANRLDIALRMSWAAAGGGSAGGRKAVRIGKSAKEKAGLAANAFWREKGILSCSKKSVFYKELKRLKLVEEIVCLKSNITCCSGDAIFFTSLVSAATAAGDVLMKLQGLLMVVSTESINLELIGDEAPKKKDVEKTSGGSRKGKKKSNTLKKLTTSAKPSKDNGCSSSDNRNCSPLPNHCAPSVEGTAAGPPSEKTPYKEIVPTTKVEQTVSLDGCKNQCNKKKNKRKGKTKLSNPMRPESPRSTKLKTVVPHSAAEALHEAAKEADVSPHHPSYVHPSKNEISEAVSCSDPSILSNGTKVISTSKGTKLEDTLYSPRVHSSLATERFQSAHDDAFKVAVQASSYLSQSESLVQSSSCLPSRSNEVSSTNLYGSSVDSLVRSAQEKTECDGKHVDHKSEVTKDRILPSAIPTDMLQSAISKNGGVMKNGGGECYVYNRNLLGGTSYEWPSVTPSHFVSPQMQQRPAAADRLHLDVGYRWPTQFNQPFLPANHQVRNPPIDAGHNQMLPSLAVPLSFDWPPVFRGYGKNASVSYDPLYTPQMQSSAWSGFPAQLVQRGGICSDSDVADDTESYWFSEEESDSRAHSGRDINQYFGGGVMYWSPAEHAGTGFSRPPSLSSDDSAWAWHEADVIRVVDDVANGIPSTYTNGVSSPPSTPSCSQNESLDPAAHLITGNEINNEALTSPSSVQDSPEDKIMQVAKAVSCGSEVVKADTLPYAMLRPIVVPSISRRSSRSEIKGAHDHRRSPCVPSTRRDIPILRRPPSPVVLSVPRVPRPPPPSPAGESRKRGFPIVRSGSSSPRHWGMRGLFSEDKIFHRAQFCLDGPEVVWPSWGNKGTSGTLVQTIEDTVLQDHLVKISQLSCDQHMWHCLYSH

SEQ ID NO: 186839 - protein, 1336 aa, Zea Mays
MASTAAAPRTTKELMDALTAHLSLYHAAANPSPATAAASTSSSSPRAAILRWLASLSPAARAAAATSLLSPAAAAALLSMVRRLRLRGHSSFFVLHSSSPSTSARGAEEPTVLSRLSRGLLARAAASSRAQALLFANTLLFPSSPASSRRPDVITVAEAFVADLDGFVAAMDEISGGRFLCCGEGEVDLAALACQDFPELPWLNAKGYYVIEEFLANRLDIALRMSWAAAGGGSAGGRKAVRIGKSAKEKAGLAANAFWREKGILSCSKKSVFYKELKRLKLVEEIVCLKSNITCCSGDAIFFTSLVSAATAAGDVLMKLQGLLMVVSTESINLELIGDEAPKKKDVEKTSGGSRKGKKKSNTLKKLTTSAKPSKDNGCSSSDNRNCSPLPNHCAPSVEGTAAGPPSEKTPYKEIVPTTKVEQTVSLDGCKNQCNKKKNKRKGKTKLSNPMRPESPRSTKLKTVVPHSAAEALHEAAKEADVSPHHPSYVHPSKNEISEAVSCSDPSILSNGTKVISTSKGTKLEDTLYSPRVHSSLATERFQSAHDDAFKVAVQASSYLSQSESLVQSSSCLPSRSNEVSSTNLYGSSVDSLVRSAQEKTECDGKHVDHKSEVTKDRILPSAIPTDMLQSAISKNGGVMKNGGGECYVYNRNLLGGTSYEWPSVTPSHFVSPQMQQRPAAADRLHLDVGYRWPTQFNQPFLPANHQVRNPPIDAGHNQMLPSLAVPLSFDWPPVFRGYGKNASVSYDPLYTPQMQSSAWSGFPAQLVQRGGICSDSDVADDTESYWFSEEESDSRAHSGRDINQYFGGGVMYWSPAEHAGTGFSRPPSLSSDDSAWAWHEADVIRVVDDVANGIPSTYTNGVSSPPSTPSCSQNESLDPAAHLITGNEINNEALTSPSSVQDSPEDKIMQVAKAVSCGSEVVKADTLPYAMLRPIVVPSISRRSSRSEIKGAHDHRRSPCVPSTRRDIPILRRPPSPVVLSVPRVPRPPPPSPAGESRKRGFPIVRSGSSSPRHWGMRGLFSEDKIFHRAQFCLDGPEVVWPSWGNKGTSGTLVQTIEDTVLQDHLVKISQLSCDQHPDVALPVQPLDMLNGSSHKASLSLMHNALHEEIDQFCKQVAAGNLVRRPYINWAVKRVTRCLQVLWPRSRTNLFGSNATGLALPTSDVDLVVSLPPVRNLEPIKEAGILEGRNGIKETCLQHAARCLTNQDWVRSDSLKTVENTAIPVIMLVADVPCDTNMSNEYSSVLDGSQDYSVNMLGEQGSPPRSDTSSSEGSNMLMCSKLNKDDCDIVQSIRLDISFKSPSHTGLQTTELVNQKFIIYLNIFSTLHKSYLYVS

SEQ ID NO: 186840 - protein, 820 aa, Zea Mays
MLQSAISKNGGVMKNGGGECYVYNRNLLGGTSYEWPSVTPSHFVSPQMQQRPAAADRLHLDVGYRWPTQFNQPFLPANHQVRNPPIDAGHNQMLPSLAVPLSFDWPPVFRGYGKNASVSYDPLYTPQMQSSAWSGFPAQLVQRGGICSDSDVADDTESYWFSEEESDSRAHSGRDINQYFGGGVMYWSPAEHAGTGFSRPPSLSSDDSAWAWHEADVIRVVDDVANGIPSTYTNGVSSPPSTPSCSQNESLDPAAHLITGNEINNEALTSPSSVQDSPEDKIMQVAKAVSCGSEVVKADTLPYAMLRPIVVPSISRRSSRSEIKGAHDHRRSPCVPSTRRDIPILRRPPSPVVLSVPRVPRPPPPSPAGESRKRGFPIVRSGSSSPRHWGMRGLFSEDKIFHRAQFCLDGPEVVWPSWGNKGTSGTLVQTIEDTVLQDHLVKISQLSCDQHPDVALPVQPLDMLNGSSHKASLSLMHNALHEEIDQFCKQVAAGNLVRRPYINWAVKRVTRCLQVLWPRSRTNLFGSNATGLALPTSDVDLVVSLPPVRNLEPIKEAGILEGRNGIKETCLQHAARCLTNQDWVRSDSLKTVENTAIPVIMLVADVPCDTNMSNEYSSVLDGSQDYSVNMLGEQGSPPRSDTSSSEGSNMLMCSKLNKDDCDIVQSIRLDISFKSPSHTGLQTTELVRELSQQFPAVIPLALILKKFLADRSLDHPYSGGLSSYCLVRSHPSPCCCSNHKHLHPLATMVGTSSYVEECAHVKEVVVFRKKIDDMLAATQAGKGGCQRMRSHQGSHFLLEQEKIVVALEQMVVVARQGMGL

SEQ ID NO: 186841 - protein, 370 aa, Zea Mays
MALPSMSLVAKGVLPFSARTSSGVTQRPVSVTASLEHKTSDARRKFLKLALGNLGVGLPTLLGAKKALADEQGVSSSRMSYSRFLEYLDKDRVRVQLPGLSQELLQKTPGFSGADLANLLNEAAILAGRRGRTAISSKEIDDSIDRIVAGMEGTVMTDGKSKSLVAYHEVGHAICGTLTPGHDPVQKVTLVPRGQARGLTWFIPMDDPTLISRQQLFARIVGGLGGRAAEEVIFGEPEVTTGAAGDLQQITGLAKQMVVTFGMSEIGPWSLMEGGAQSGDVIMRMMARNSMSEKLAEDIDSAVKQLSDEAYEIALRHIRNNREAIDKIVEVLIEKETVTGDEFRAILSEFAEIPVENRVPPATPAAALPA

SEQ ID NO: 186842 - protein, 649 aa, Zea Mays
MALPSMSLVAKGVLPFSARTSSGVTQRPVSVTASLEHKTSDARRKFLKLALGNLGVGLPTLLGAKKALADEQGVSSSRMSYSRFLEYLDKDRVRVQLPGLSQELLQKLREKNIDFAAHSNQEDSGSLLFNLIGNLAFPLILIGGLFLLSRRAQGGLGGPNGPGFPLGFGQSRAKFQMEPNTGVTFDDVAGVDEAKQDFMEVVEFLKKPERFTAVGARIPKGVLLVGPPGTGKTLLAKAIAGEAGVPFFSISGSEFVEMFVGVGASRVRDLFKKAKENAPCIVFVDEIDAVGRQRGTGIGGGNDEREQTLNQLLTEMDGFEGNTGIIVIAATNRADILDSALLRPGRFDRQVSVDVPDVRGRTEILKVHGSNKKFDSDVSLDVIAMRTPGFSGADLANLLNEAAILAGRRGRTAISSKEIDDSIDRIVAGMEGTVMTDGKSKSLVAYHEVGHAICGTLTPGHDPVQKVTLVPRGQARGLTWFIPMDDPTLISRQQLFARIVGGLGGRAAEEVIFGEPEVTTGAAGDLQQITGLAKQMVVTFGMSEIGPWSLMEGGAQSGDVIMRMMARNSMSEKLAEDIDSAVKQLSDEAYEIALRHIRNNREAIDKIVEVLIEKETVTGDEFRAILSEFAEIPVENRVPPATPAAALPA

SEQ ID NO: 186843 - protein, 265 aa, Zea Mays
MRTPGFSGADLANLLNEAAILAGRRGRTAISSKEIDDSIDRIVAGMEGTVMTDGKSKSLVAYHEVGHAICGTLTPGHDPVQKVTLVPRGQARGLTWFIPMDDPTLISRQQLFARIVGGLGGRAAEEVIFGEPEVTTGAAGDLQQITGLAKQMVVTFGMSEIGPWSLMEGGAQSGDVIMRMMARNSMSEKLAEDIDSAVKQLSDEAYEIALRHIRNNREAIDKIVEVLIEKETVTGDEFRAILSEFAEIPVENRVPPATPAAALPA

SEQ ID NO: 186844 - protein, 87 aa, Zea Mays
MPSVYLYIPNIIGYFRIIINFIAFAVCYSNKALFAVLYFFSFVLDGVDGWFARKFNQASTFGAVLDMVTDRYSLNESLKSAGFTDLV

SEQ ID NO: 186845 - protein, 60 aa, Zea Mays
MLETYRGSNICIASNKWSDPRQVLLFRVRVDSQFCVLMQFFPGWGLDRMFFYIHTIGRVM

SEQ ID NO: 186846 - protein, 302 aa, Zea Mays
MVSMSTTPKPLDSAVVSAAVDGGDEGGGGGGGGKKQAHGAVMAPPPMVVPAAAPAAEEEVRKVRKPYTITKSRESWTEPEHDKFLEALQLFDRDWKKIEAYVGSKTVIQIRSHAQKYFLKVQKNGTGEHLPPPRPKRKAAHPYPQKASKNVSQAILSQEQPTQREQGSVMPMDTATVRNTNANVAVPSWDNTLAQPFSAGHVQGAAATNNCSSSMESPSGTWPTSEAVEQENMVPPLRAMPDFAQVYNFLGSIFDPDTSGHLQRLKAMDPVDIETALLLMRNLSMNLRSPDFEQHVVFGDID

SEQ ID NO: 186847 - protein, 305 aa, Zea Mays
MVSMSTTPKPLDSAVVSAAVDGGDEGGGGGGGGKKQAHGAVMAPPPMVVPAAAPAAEEEVRKVRKPYTITKSRESWTEPEHDKFLEALQLFDRDWKKIEAYVGSKTVIQIRSHAQKYFLKVQKNGTGEHLPPPRPKRKAAHPYPQKASKNAPAVSQAILSQEQPTQREQGSVMPMDTATVRNTNANVAVPSWDNTLAQPFSAGHVQGAAATNNCSSSMESPSGTWPTSEAVEQENMVPPLRAMPDFAQVYNFLGSIFDPDTSGHLQRLKAMDPVDIETALLLMRNLSMNLRSPDFEQHVVFGDID

SEQ ID NO: 186848 - protein, 124 aa, Zea Mays
MNGARNSARGGTSGGGSRAPARGMRAPVGPEEEDEGRGRRLGGAGKAPSWATAGDLGERGSARRGRRPGAGTRQQGDERPSTWGEVERSKEEEEGERNVCEGDKGEGDETRLGLAGSRLPSAGR

SEQ ID NO: 186849 - protein, 107 aa, Zea Mays
MSKPGKHPSNPADARRQDEPEADEMRRQRRLGKKRAKGEERTWEGNGRAVLTSVRVRVFFWSPRILDIGGIFFFWSHSIMSTMKPNTLYTGTERLHTTIPSNQTLPN

SEQ ID NO: 186850 - protein, 276 aa, Zea Mays
MDHDGTNLAVNEAVRSVQLLKIDGYSATATMSELDFIKSRRNLAGHEWEVLFYPQFSRYGGCIALKLVLVSEPPRDKDKLLRASLRCRLVCPSQPHLHASIEKSVSHVFTSDSRCSSEVILIPKYELPSSGYLVNDSLTVECTVTVLRDLDATAKVLSLPVPLPPPSDLHQHFDELLQSKNGADVTFRVSGKSFAAHKAILAARSPVFMAQFFGGMKERSSAHVEIRDMDSAAFSSMLHFIYTDMVPELDGAQEPEAAAIMAQHLLVWAEQAEADM

SEQ ID NO: 186851 - protein, 351 aa, Zea Mays
MDHDGTNLAVNEAVRSVQLLKIDGYSATATMSELDFIKSRRNLAGHEWEVLFYPQFSRYGGCIALKLVLVSEPPRDKDKLLRASLRCRLVCPSQPHLHASIEKSVSHVFTSDSRCSSEVILIPKYELPSSGYLVNDSLTVECTVTVLRDLDATAKVLSLPVPLPPPSDLHQHFDELLQSKNGADVTFRVSGKSFAAHKAILAARSPVFMAQFFGGMKERSSAHVEIRDMDSAAFSSMLHFIYTDMVPELDGAQEPEAAAIMAQHLLVAADMLKLICECKLSGGIDIGTAASTLALAEQHDCSLLKAKCLEFITRSPETLEAVLATDGYAHLAASCPLVLAELLMAARGRKI

SEQ ID NO: 186852 - protein, 340 aa, Zea Mays
MTNQPASWRGTASDSSLSKHKAGPAAGHIRRTLAFSEKLSHTSPCSGSHVRRRTLLLASGSYLASIMEHDGTNLLAVNEVLRSVQLLKIDGYCATATMSELEFIKSRWCTNGHEWEVRFHPTYKWNGRWVAVKLILISEPLRDKLRVSLSCRMRPNNFQRDLGASYEQSLSHIFPSDSKCSPVLLLMSRAELGSSDYLVEDSLTVECTLTELRGFDASVKDPPLPVPQPQPLRSDLHQHLGELLQSKDGADVTFRVSGESFAAHRVILAARSPVFKAEFFGGMKERSSAYVEIRDMDAAVFRSMLHFIYTDMVPELDGAQDQEPEAAAGGGHGSAPTRSC

SEQ ID NO: 186853 - protein, 161 aa, Zea Mays
MREHERRVWSVDFSIMDPTKLVSGSDDGSVKLRDMNQAGSIGTIKTRANVCFVQFQPDTARSIAIGSADHKIYCYDLRHIRAPYCTLVGHTKTVSYVKYLDASTIVSASTDNSLKLWDLSMSTGRIIDSPVQTFKGHTNTKWAGVVCLAAGSTTTSNVWMN

SEQ ID NO: 186854 - protein, 254 aa, Zea Mays
MHCYSYPWQKYVKLGSVLRHFAYTVAALHGCLESEVQTPPSVRSLFRGPCTRVAREVAKVLQELAASIKHHRRCAPDVLSDHLHEALQDLNSAIRSQPRLFLGSKHACAANKRVLLMELNSGSGKLSASRAALRSFKTDATALSETRNARSDQPPPPSDRSERSGGLLRPTLSKIAITSLEFSEALPFAAFASLLVEMVVRLELVIEEVKNLERVANFRELATGHNHLIVDLGSKEKTRNSNAAALHPVSAAAE

SEQ ID NO: 186855 - protein, 256 aa, Zea Mays
MNSHAAGTSNGGPGDAAAARRNTRMPKYSKFTQQELPACKPILTPKWVVSVFFIVGVIFVPIGVVSLLAARDVVEIIDRYDEACVPGNMTENKLAYIQNETLSKECIRNLTVTKDMKQPIFVYYELGNFYQNHRRYVKSRNDAQLRDASKANQTSACEPEKTTANGQPIVPCGLIAWSLFNDTYNFTRGNENLTVDKKDISWKSDREHKFGKDVYPSNFQNGALKGGATLDPKIPHFLHSESYMGEYTLTSRRMTQ

SEQ ID NO: 186856 - protein, 168 aa, Zea Mays
MTENKLAYIQNETLSKECIRNLTVTKDMKQPIFVYYELGNFYQNHRRYVKSRNDAQLRDASKANQTSACEPEKTTANGQPIVPCGLIAWSLFNDTYNFTRGNENLTVDKKDISWKSDREHKFGKDVYPSNFQNGALKGGATLDPKIPHFLHSESYMGEYTLTSRRMTQ

SEQ ID NO: 186857 - protein, 254 aa, Zea Mays
MTENKLAYIQNETLSKECIRNLTVTKDMKQPIFVYYELGNFYQNHRRYVKSRNDAQLRDASKANQTSACEPEKTTANGQPIVPCGLIAWSLFNDTYNFTRGNENLTVDKKDISWKSDREHKFGKDVYPSNFQNGALKGGATLDPKIPLSEQEDLIVWMRTAALPTFRKLYGRIYIDLKENDTITVTLNNNYNTYSFGGKKKLVLSTATWLGGKNDFLGFAYLIVGGLCIFLAFAFTLLYFVKPSRTVNVMLAVK

SEQ ID NO: 186858 - protein, 455 aa, Zea Mays
MVDGNGLLHPRGFGLACHLGVLADIPTIGVGKNLHQVDGLNQSEVRRLLGSKENCNRELVLLTGQSGTKWGMVQPTIMVGMLLNAGRSNGRGGRRTSIQSPPQVLSSVPLLVYEYEDPAGSTPTAAAKMLMYSLPERSIVYTHDSRPQAMEGNFFSTPQGWLVILGHGEVTSEASMWHPLTGETITLPPIHDDHHIPTNCKCLLTHNSAAHPDCAVVLLDVADPLMWFCRVNGGADRRWGQHTYDIGDYEFPDEFRTPSTPTKNVIRSVAALKGKLHFCFMESHQNKMCVVDLDFPSDHGHPPTAEFHEFDVSPEFGIKFPDGVCSASIHLVESMDELFAVCVFYVGFDPTNVSAAGIFKMEDSCGEETVAWHRVDDIGDRAFLLMGTNMATWCSASTNNLKGSTLYFFLHFLLGDRDLYIYDVQEQSLETVQVHDQLDLKVVHTEPYWINVPPF

SEQ ID NO: 186859 - protein, 154 aa, Zea Mays
MDDAQGYQEGDDHDLVMQKQEWIKTQDMLKSKLILEDEFAWSLPSVGSGLDEPEWCKLKYIGGTDISFLKEDPSTACAAVVVLNADTLEVVHEEFNVVRLQVPYIPGFLAFREAPVLLGLLEKVKINAPHFCPQLLMVDGNGLLHPRATSGRWP

SEQ ID NO: 186860 - protein, 161 aa, Zea Mays
MDDAQGYQEGDDHDLVMQKQEWIKTQDMLKSKLILEDEFAWSLPSVGSGLDEPEWCKLKYIGGTDISFLKEDPSTACAAVVVLNADTLEVVHEEFNVVRLQVPYIPGFLAFREAPVLLGLLEKVKINAPHFCPQLLMVDGNGLLHPRAGFGLACHLGVLAD

SEQ ID NO: 186861 - protein, 136 aa, Zea Mays
MDDAQGYQEGDDHDLVMQKQEWIKTQDMLKSKLILEDEFAWSLPSVGSGLDEPEWCKLKYIGGTDISFLKEDPSTACAAVVVLNADTLEVVHEEFNVVRLQVPYIPGFLAFREAPVLLGLLEKVKINAPHFCPQVA

SEQ ID NO: 186862 - protein, 220 aa, Zea Mays
MDDAQGYQEGDDHDLVMQKQEWIKTQDMLKSKLILEDEFAWSLPSVGSGLDEPEWCKLKYIGGTDISFLKEDPSTACAAVVVLNADTLEVVHEEFNVVRLQVPYIPGFLAFREAPVLLGLLEKVKINAPHFCPQLLHPAGFGLACHLGVLADIPTIGVGKNLHQVDGLNQSEVRRLLGSKENCNRELVLLTGQSGTKWGMANNRQQLMAASAQLSPHQRT

SEQ ID NO: 186863 - protein, 148 aa, Zea Mays
MDDAQGYQEGDDHDLVMQKQEWIKTQDMLKSKLILEDEFAWSLPSVGSGLDEPEWCKLKYIGGTDISFLKEDPSTACAAVVVLNADTLEVVHEEFNVVRLQVPYIPGFLAFREAPVLLGLLEKVKINAPHFCPQLLMVDGNGLLHPRA

SEQ ID NO: 186864 - protein, 119 aa, Zea Mays
MDDAQGYQEGDDHDLVMQKQEWIKTQDMLKSKLILEDEFAWSLPSVGSGLDEPEWCKLKYIGGTDISFLKEDPSTACAAVVVLNADTLEVVHEEFNVVRLQVPYIPGFLAFRESQGILV

SEQ ID NO: 186865 - protein, 558 aa, Zea Mays
MGSGTWRKAYGALKDSTKVGLANFNSEYKDLDIAIVKATNHVECPPKERHFRRILFATSAHRPQADVAYSICTLARRLSKTKSWIVALKTLIVIHRLLREGDGTFKEDFLTYSYRGNVLQIPQFKDDSSPLAWDCSAWVRTYALYLDERLECFRILKYDVELDRLLKLPHASGKAHSRTRSLPLAELLVQLPALQKLLLRLIYCQPEGAACTNYLVQYALALVLKESFKIYCSINDGIINLVDMYFEMPKYDAIKALEIYKRAGQQAEKLSNFYDHCKLLELARTFQFPTLRQPPPSFLVTMEEYIREAPRADTESKSLGAEKPVEDEKYEPAEPEAEPQPSVDPLEEAVEPQPRATTGNLLNLDEEVNPMIADLETSNALALAIVAPGNENKMPTSQDLFALDKAGWELALVTAPSNHTNQQVDNQLAGGFDKLLLDSLYEDEARRQQIASVTYTGSTAANPFDHNDPFAMSNSFAPPSNVQLAMMAEQQQYYHAQQQQYYQIQQQHQMVMLPPQTYQQQSQYSAPSQSGLSNPFGDPFSSLVTMANPPKQSNSNLV

SEQ ID NO: 186866 - protein, 300 aa, Zea Mays
MGSGTWRKAYGALKDSTKVGLANFNSEYKDLDIAIVKATNHVECPPKERHFRRILFATSAHRPQADVAYSICTLARRLSKTKSWIVALKTLIVIHRLLREGDGTFKEDFLTYSYRGNVLQIPQFKDDSSPLAWDCSAWVRTYALYLDERLECFRILKYDVELDRLLKLPHASGKAHSRTRSLPLAELLVQLPALQKLLLRLIYCQPEGAACTNYLVQYALALVLKESFKIYCSINDGIINLVDMYFEMPKYDAIKALEIYKRAGQQAEKLSNFYDHCKLLELARTFQFPTLRQACPDIRY

SEQ ID NO: 186867 - protein, 332 aa, Zea Mays
MYFEMPKYDAIKALEIYKRAGQQAEKLSNFYDHCKLLELARTFQFPTLRQPPPSFLVTMEEYIREAPRADTESKSLENYEENQPSDNEAASPQGAEKPVEDEKYEPAEPEAEPQPSVDPLEEAVEPQPRATTGNLLNLDEEVNPMIADLETSNALALAIVAPGNENKMPTSQDLFALDKAGWELALVTAPSNHTNQQVDNQLAGGFDKLLLDSLYEDEARRQQIASVTYTGSTAANPFDHNDPFAMSNSFAPPSNVQLAMMAEQQQYYHAQQQQYYQIQQQHQMVMLPPQTYQQQSQYSAPSQSGLSNPFGDPFSSLVTMANPPKQSNSNLV

SEQ ID NO: 186868 - protein, 416 aa, Zea Mays
MAVKSSRSSDESYIEPLLCWKKEFRSSVIKIVDSSLNSSLMSADSICSIPASEYGFYFNKRMKMDEEYDHLLTNGNMKDSSTANFTTTGYVSSPERNMDGQSCMVSSTTEFLAGSHSNVNTGQPSSSSSAPSYISQSIKEAWECSLPDTNTPKPLTELISARDLCISILKRKICSAKDSELSRTSSTIDRDDNLNNPLFECTKCGLMEDPSKMLICDCCEGAFHLLCCNPHVKKIPEEEWYCLACKRKKPKRQRGKFANPKVESSKGIQRPRRGLGPIRDMLLDSESYESGVRIGTKFQAEVPKWSGPISSREDEFAEPTELDRSKTTMLSFEDKKTSIGNWIQCREVLDTGVVCGKWRRAPLFVVQSSDWDCSCSVVWDPIHADCAVPQELETVKVHEQLKYINKNRLGDSNQKR

SEQ ID NO: 186869 - protein, 446 aa, Zea Mays
MAVKSSRSSDESYIEPLLCWKKEFRSSVIKIVDSSLNSSLMSADSICSIPASEYGFYFNKRMKMDEEYDHLLTNGNMKDSSTANFTTTGYVSSPERNMDGQSCMVSSTTEFLAGSHSNVNTGQPSSSSSAPSYISQSIKEAWECSLPDTNTPKPLTELISARDLCISILKRKICSAKDSELSRTSSTIDRDDNLNNPLFECTKCGLMEDPSKMLICDCCEGAFHLLCCNPHVKKIPEEEWYCLACKRKKPKRQRGKFANPKVESSKGIQRPRRGLGPIRDMLLDSESYESGVRIGTKFQAEVPKWSGPISSREDEFAEPTELDRSKTTMLSFEDKKTSIGNWIQCREVLDTGVVCGKWRRAPLFVVQSSDWDCSCSVVWDPIHADCAVPQELETVKVHEQLKYINKGTLAVLHQCCPQMGVDTVYQFSSDASDEVRASRYEIRVYA

SEQ ID NO: 186870 - protein, 409 aa, Zea Mays
MAVKSSRSSDESYIEPLLCWKKEFRSSVIKIVDSSLNSSLMSADSICSIPASEYGFYFNKRMKMDEEYDHLLTNGNMKDSSTANFTTTGYVSSPERNMDGQSCMVSSTTEFLAGSHSNVNTGQPSSSSSAPSYISQSIKEAWECSLPDTNTPKPLTELISARDLCISILKRKICSAKDSELSRTSSTIDRDDNLNNPLFECTKCGLMEDPSKMLICDCCEGAFHLLCCNPHVKKIPEEEWYCLACKRKKPKRQRGKFANPKVESSKGIQRPRRGLGPIRDMLLDSESYESGVRIGTKFQAEVPKWSGPISSREDEFAEPTELDRSKTTMLSFEDKKTSIGNWIQCREVLDTGVVCGKWRRAPLFVVQSSDWDCSCSVVWDPIHADCAVPQELETVKVHEQLKYINKINR

SEQ ID NO: 186871 - protein, 325 aa, Zea Mays
MAVKSSRSSDESYIEPLLCWKKEFRSSVIKIVDSSLNSSLMSADSICSIPASEYGFYFNKRMKMDEEYDHLLTNGNMKDSSTANFTTTGYVSSPERNMDGQSCMVSSTTEFLAGSHSNVNTGQPSSSSSAPSYISQSIKEAWECSLPDTNTPKPLTELISARDLCISILKRKICSAKDSELSRTSSTIDRDDNLNNPLFECTKCGLMEDPSKMLICDCCEGAFHLLCCNPHVKKIPEEEWYCLACKRKKPKRQRGKFANPKVESSKGIQRPRRGLGPIRDMLLDSESYESGVRIGTKFQAEVPKWSGPISSPLLTFILHDSPIFN

SEQ ID NO: 186872 - protein, 648 aa, Zea Mays
MNAANLGGQLGSLGNFNAITSIELNNNNIGGSIPEDLPVTLQSLFLSANQITGSIPSSLSKLENLSAMSVNGNHLSGGLPDTFDSLNRLVNLDISSNNLTGVLPSSMKSLASLTSLHMQDNQLSGTLNVLQGLPLKDLNIENNIFSGPVPASLLNIPNFKKDGNPFNTTSASPPSTGPDPTLTPAPNTSNSTPPAPAPPSPSRATPPPKTTSNYPEGSTTRDSTSSSRKHNTSTLKIVGFVLAGVVLFIVIVFLVLFCLSKYQGRQSRYDRNRSQLGGVHHRVEPQIKPPPVQQSNDIKEGETPDRRVHQLSSSAAALPKKSPENQKEHIINFDQTDSDLFHVSLPPPPPPPPLTPIERVAANLIVPLEKRYIPPPKTSSSTSSASFSVASLQQYTDSLREENVIRESRLGRVYLAELPDGKLLEVLKIGNANGRISVDDFLEQIECISDIKHPNILELVGYCAEYGQRLLVYEHFSRTTLDDAIHDGKDTESALSWNARLQVALGSGKALEYLHHSFHSPIVHQNFEPANVLLDKKFSVCVAECGLAELMTSSSVTQLSGRMRASLDYEAPEFQDYGVISERGDVYSFGVVMLELLTGRKPYDSSRPRHEQHLVRWASWQLHDIESLSKMVDPPIRGHVLRSIVTFC

SEQ ID NO: 186873 - protein, 571 aa, Zea Mays
MNAANLGGQLGSLGNFNAITSIFLSANQITGSIPSSLSKLENLSAMSVNGNHLSGGLPDTFDSLNRLVNLDISSNNLTGVLPSSMKSLASLTSLHMQDNQLSGTLNVLQGLPLKDLNIENNIFSGPVPASLLNIPNFKKDGNPFNTTSASPPSTGPDPTLTPAPNTSNSTPPAPAPPSPSRATPPPKTTSNYPEGSTTRDSTSSSRKHNTSTLKIVGFVLAGVVLFIVIVFLVLFCLSKYQGRQSRYDRNRSQLGGVHHRVEPQIKPPPVQQSNDIKEGETPDRRVHQLSSSAAALPKKSPENQKEHIINFDQTDSDLFHVSLPPPPPPPPLTPIERVAANLIVPLEKRYIPPPKTSSSTSSASFSVASLQQYTDSLREENVIRESRLGRVYLAELPDGKLLEVLKIGNANGRISVDDFLEQIECISDIKHPNILELVGYCAEYGQRLLVYEHFSRTTLDDAIHDGKDTESALSWNARLQVALGSGKALEYLHHSFHSPIVHQNFEPANVLLDKKFSVCVAECGLAELMTSSSVTQHCSCQVGCVHHWTTKHLNSRIMGSFQKGVMSTALV

SEQ ID NO: 186874 - protein, 134 aa, Zea Mays
MNAANLGGQLGSLGNFNAITSIFLSANQITGSIPSSLSKLENLSAMSVNGNHLSGGLPDTFDSLNRLVNLDISSNNLTGVLPSSMKSLASLTSLHMQDNQLSGTLNVLQGLPLKDFLTDHDWLMSTIQKLVLGC

SEQ ID NO: 186875 - protein, 116 aa, Zea Mays
MNAANLGGQLGSLGNFNAITSIFLSANQITGSIPSSLSKLENLSAMSVNGNHLSGGLPDTFDSLNRLVNLDISSNNLTGVLPSSMKSLASLTSLHMQDNQLSGTLNVLQGLPLKDL

SEQ ID NO: 186876 - protein, 542 aa, Zea Mays
MKSLASLTSLHMQDNQLSGTLNVLQGLPLKDLNIENNIFSGPVPASLLNIPNFKKDGNPFNTTSASPPSTGPDPTLTPAPNTSNSTPPAPAPPSPSRATPPPKTTSNYPEGSTTRDSTSSSRKHNTSTLKIVGFVLAGVVLFIVIVFLVLFCLSKYQGRQSRYDRNRSQLGGVHHRVEPQIKPPPVQQSNDIKEGETPDRRVHQLSSSAAALPKKSPENQKEHIINFDQTDSDLFHVSLPPPPPPPPLTPIERVAANLIVPLEKRYIPPPKTSSSTSSASFSVASLQQYTDSLREENVIRESRLGRVYLAELPDGKLLEVLKIGNANGRISVDDFLEQIECISDIKHPNILELVGYCAEYGQRLLVYEHFSRTTLDDAIHDGKDTESALSWNARLQVALGSGKALEYLHHSFHSPIVHQNFEPANVLLDKKFSVCVAECGLAELMTSSSVTQLSGRMRASLDYEAPEFQDYGVISERGDVYSFGVVMLELLTGRKPYDSSRPRHEQHLVRWASWQLHDIESLSKMVDPPIRGHVLRSIVTFC

SEQ ID NO: 186877 - protein, 290 aa, Zea Mays
MNAANLGGQLGSLGNFNAITSIFLSANQITGSIPSSLSKLENLSAMSVNGNHLSGGLPDTFDSLNRLVNLDISSNNLTGVLPSSMKSLASLTSLHMQDNQLSGTLNVLQGLPLKDLNIENNIFSGPVPASLLNIPNFKKDGNPFNTTSASPPSTGPDPTLTPAPNTSNSTPPAPAPPSPSRATPPPKTTSNYPEGSTTRDSTSSSRKHNTSTLKIVGFVLAGVVLFIVIVFLVLFCLSKYQGRQSRYDRNRSQLGGVHHRVEPQIKPPPVQQSNDIKEVQARHRTGGSIN

SEQ ID NO: 186878 - protein, 138 aa, Zea Mays
MNAANLGGQLGSLGNFNAITSIELNNNNIGGSIPEDLPVTLQSLFLSANQITGSIPSSLSKLENLSAMSVNGNHLSGGLPDTFDSLNRLVNLDISSNNLTGVLPSSMKSLASLTSLHMQDNQLSGTLNVLQGLPLKDL

SEQ ID NO: 186879 - protein, 581 aa, Zea Mays
MSVNGNHLSGGLPDTFDSLNRLVNLDISSNNLTGVLPSSMKSLASLTSLHMQDNQLSGTLNVLQGLPLKDLNIENNIFSGPVPASLLNIPNFKKDGNPFNTTSASPPSTGPDPTLTPAPNTSNSTPPAPAPPSPSRATPPPKTTSNYPEGSTTRDSTSSSRKHNTSTLKIVGFVLAGVVLFIVIVFLVLFCLSKYQGRQSRYDRNRSQLGGVHHRVEPQIKPPPVQQSNDIKEGETPDRRVHQLSSSAAALPKKSPENQKEHIINFDQTDSDLFHVSLPPPPPPPPLTPIERVAANLIVPLEKRYIPPPKTSSSTSSASFSVASLQQYTDSLREENVIRESRLGRVYLAELPDGKLLEVLKIGNANGRISVDDFLEQIECISDIKHPNILELVGYCAEYGQRLLVYEHFSRTTLDDAIHDGKDTESALSWNARLQVALGSGKALEYLHHSFHSPIVHQNFEPANVLLDKKFSVCVAECGLAELMTSSSVTQLSGRMRASLDYEAPEFQDYGVISERGDVYSFGVVMLELLTGRKPYDSSRPRHEQHLVRWASWQLHDIESLSKMVDPPIRGHVLRSIVTFC

SEQ ID NO: 186880 - protein, 626 aa, Zea Mays
MNAANLGGQLGSLGNFNAITSIELNNNNIGGSIPEDLPVTLQSLFLSANQITGSIPSSLSKLENLSAMSVNGNHLSGGLPDTFDSLNRLVNLDISSNNLTGVLPSSMKSLASLTSLNIENNIFSGPVPASLLNIPNFKKDGNPFNTTSASPPSTGPDPTLTPAPNTSNSTPPAPAPPSPSRATPPPKTTSNYPEGSTTRDSTSSSRKHNTSTLKIVGFVLAGVVLFIVIVFLVLFCLSKYQGRQSRYDRNRSQLGGVHHRVEPQIKPPPVQQSNDIKEGETPDRRVHQLSSSAAALPKKSPENQKEHIINFDQTDSDLFHVSLPPPPPPPPLTPIERVAANLIVPLEKRYIPPPKTSSSTSSASFSVASLQQYTDSLREENVIRESRLGRVYLAELPDGKLLEVLKIGNANGRISVDDFLEQIECISDIKHPNILELVGYCAEYGQRLLVYEHFSRTTLDDAIHDGKDTESALSWNARLQVALGSGKALEYLHHSFHSPIVHQNFEPANVLLDKKFSVCVAECGLAELMTSSSVTQLSGRMRASLDYEAPEFQDYGVISERGDVYSFGVVMLELLTGRKPYDSSRPRHEQHLVRWASWQLHDIESLSKMVDPPIRGHVLRSIVTFC

SEQ ID NO: 186881 - protein, 709 aa, Zea Mays
MQRAPGCRRGAGPILLLALVALAAAAPRLVRAVTDAADVFAINGLYISLGSPPLPGWTGDGGDPCGEGWQGVLCTGSSITGITMNAANLGGQLGSLGNFNAITSIFLSANQITGSIPSSLSKLENLSAMSVNGNHLSGGLPDTFDSLNRLVNLDISSNNLTGVLPSSMKSLASLTSLHMQDNQLSGTLNVLQGLPLKDLNIENNIFSGPVPASLLNIPNFKKDGNPFNTTSASPPSTGPDPTLTPAPNTSNSTPPAPAPPSPSRATPPPKTTSNYPEGSTTRDSTSSSRKHNTSTLKIVGFVLAGVVLFIVIVFLVLFCLSKYQGRQSRYDRNRSQLGGVHHRVEPQIKPPPVQQSNDIKEGETPDRRVHQLSSSAAALPKKSPENQKEHIINFDQTDSDLFHVSLPPPPPPPPLTPIERVAANLIVPLEKRYIPPPKTSSSTSSASFSVASLQQYTDSLREENVIRESRLGRVYLAELPDGKLLEVLKIGNANGRISVDDFLEQIECISDIKHPNILELVGYCAEYGQRLLVYEHFSRTTLDDAIHDGKDTESALSWNARLQVALGSGKALEYLHHSFHSPIVHQNFEPANVLLDKKFSVCVAECGLAELMTSSSVTQLSGRMRASLDYEAPEFQDYGVISERGDVYSFGVVMLELLTGRKPYDSSRPRHEQHLVRWASWQLHDIESLSKMVDPPIRGHVLRSIVTFC

SEQ ID NO: 186882 - protein, 241 aa, Zea Mays
MATNENLPPNVIRQLAKELKNLNESPAEGINVTVNDDDFTTIFADIEGPAGTPYENGVFRMKLLLSHDFPQSPPKATSGEICVNTLKKDWNPSLGLRHVLLVVRCLLVEPFPESALNEQAGKMLLENYEEYARHARLYTGIHALKNKSKTGAISESTTALNVDKSSTAPNENAPSMPPAIPTSAASRALGTNLQDQSPTVSDPTVGAAAAAAARRKDGPMPSKVPVDRKKMDARKKSLKRL

SEQ ID NO: 186883 - protein, 193 aa, Zea Mays
MKLLLSHDFPQSPPKGFFLTKIFHPNIATSGEICVNTLKKDWNPSLGLRHVLLVVRCLLVEPFPESALNEQAGKMLLENYEEYARHARLYTGIHALKNKSKTGAISESTTALNVDKSSTAPNENAPSMPPAIPTSAASRALGTNLQDQSPTVSDPTVGAAAAAAARRKDGPMPSKVPVDRKKMDARKKSLKRL

SEQ ID NO: 186884 - protein, 204 aa, Zea Mays
MANGLVLRGILMRGEKGLGLVDTPLRPMRWGSALFPHVLLKNVIVEMQFSREDGLLPVDGYEPWASAFSQRNSEFGPSFEQNKCEVMMMVGLPATGKSTWAEKWVKEHQEKRYILLGTNLVLEQMKVPGLLRKNNYGERFERLMDCATWIFNKLLTRAANTPRNFIIDQTNVYKNARIRKLRPFANYRKVSCKREKGNDRFPVW

SEQ ID NO: 186885 - protein, 302 aa, Zea Mays
MANGLVLRGILMRGEKGLGLVDTPLRPMRWGSALFPHVLLKNVIVEMQFSREDGLLPVDGYEPWASAFSQRNSEFGPSFEQNKCEVMMMVGLPATGKSTWAEKWVKEHQEKRYILLGTNLVLEQMKVPGLLRKNNYGERFERLMDCATWIFNKLLTRAANTPRNFIIDQTNVYKNARIRKLRPFANYRKTDVVMFPTPSELKSRAAKRFNEMGKEIPAEAVNEMTANFVLPLSKDMPHSKEPFDEVIFTELSRDEAQRTLDDMQRVLPRNVTPSYGNSGNQKHCKYATLYNNVLMFWDCCST

SEQ ID NO: 186886 - protein, 226 aa, Zea Mays
MDEMMRGQRGWRELQALGDKINQFSGIIEGLIWSPKASDSNDRHDDWAFEEGPHSDFTGPNCGSTACVALIRNKQLVVANAGDSRCVISRNGQAYNLSRDHKPELEAERERIRSAGGFVLMGRVNGNLNLSRAIGDMKFKQNKFLPPDKQILTANPDINIVELCDDDEFIVLACDGIWDCMSSQQLVDFIREHIDTCRRKASRQYARECSIDAWLRRPWAARDAIT

SEQ ID NO: 186887 - protein, 268 aa, Zea Mays
MDEMMRGQRGWRELQALGDKINQFSGIIEGLIWSPKASDSNDRHDDWAFEEGPHSDFTGPNCGSTACVALIRNKQLVVANAGDSRCVISRNGQAYNLSRDHKPELEAERERIRSAGGFVLMGRVNGNLNLSRAIGDMKFKQNKFLPPDKQILTANPDINIVELCDDDEFIVLACDGIWDCMSSQQLVDFIREHIDTEESLSAVCERVLDRCLAPSTMGGEGCDNMTMILVQFKKPIAQVEDASGAEPAGDAGCCETHGAHENGSGKQV

SEQ ID NO: 186888 - protein, 212 aa, Zea Mays
MGEIGMDQLGLAEAAAAVKEEGILDDDEETSPIEQVRLTVPTTDDSSLPVWMFRMWSIGLLSCALMSFLNQFFSYRTEPLVVTQFTVQYPMQFLSLYAIFQHSALLDLDNDTAFFGVFDGHGGKVVAKFCAKYLHREVLRSEAYAAGDLGAAVHRAYFRMDEMMRGQRGWRELQALGDKINQFSGIIEGLIWSPKASDSNDRHDDWAFEEPV

SEQ ID NO: 186889 - protein, 392 aa, Zea Mays
MRPPPPPLPSLRSSVLVLVLLPLLAACSSPASGRAVPLSPGTASVAPAPPPVDTARGIMLAPILSKFNSLKTSRKGVVAMAMIEYPSLEAATGKFSASNVLGVGGFGCVYKAVFDGGVAAAVKRLEAGGPECEKEFENELDLLGRIRHPNIVTLLGFCVHEGNHYIVYELMHKGSLDTQLHGASRGSALSWHVRMKIALDMARGLEYLHEHCSPPVIHRDLKSSNILLDSDFNAKISDFGLAVTSGNIDKGSMKLSGTLGYVAPEYLLDGKLTEKSDVYAFGVVLLELLMGRKPVEKMSQTQCQSIVTWAMPQLTERTKLPNIVDPVIRDTMDPKHLYQVAAVAVLCVQPEPSYRPLITDVLHSLVPLVPVELGGTLRVAEPPSPNLKHSAC

SEQ ID NO: 186890 - protein, 377 aa, Zea Mays
MRPPPPPLPSLRSSVLVLVLLPLLAACSSPASGRAVPLSPGTASVAPAPPPVVIIVERRNRFHRELVVASALASIAIAAIILSALYAWVLWRRSRRLPRGNKGARSADTARGIMLAPILSKFNSLKTSRKGVVAMAMIEYPSLEAATGKFSASNVLGVGGFGCVYKAVFDGGVAAAVKRLEAGGPECEKEFENELDLLGRIRHPNIVTLLGFCVHEGNHYIVYELMHKGSLDTQLHGASRGSALSWHVRMKIALDMARGLEYLHEHCSPPVIHRDLKSSNILLDSDFNAKISDFGLAVTSGNIDKGSMKLSGTLGYVAPEYLLDGKLTEKSDVYAFGVVLLELLMGRKPVEKMSQTQCQSIVTWVRYKKNTLNLEYL

SEQ ID NO: 186891 - protein, 1172 aa, Zea Mays
MDDVCEGKDFSFPEQEERVLELWAKLDAFHEQLRRTEGGEEFVFYDGPPFATGLPHYGHILAGTIKDVVTRHQSMRGRHVSRRFGWDCHGLPVEFEIDKLLGITNRQQVFDLGIGKYNETCRSIVTKYVSEWEAMVTRTGRWIDFKNDYKTMDLNFMESVWWVFAQLWEKDLVYKGFKVMPYSTGCKTALSNFEAALDYRTVPDPAVMVSFPIVGDMDNAAFVAWTTTPWTLPSNLALCINANLMYAKVRDKSNGKVYVIAESRLGQLPVKAKASGKKQAPSKGSNAEAAQDGLDKESYELLVKIPGPYLVGLKYTPLFDFFIELQETAFRVIADNYVTDDSGTGVVHCAPAFGEDDHRVCLAAGIFETAGLVVAVDDDGCFIEKISDFKGRYVKEADKDIISAVKDKGRLVSKGSIEHSYPFCWRSGTPLIYRAVPSWFVKVEKIKDQLLECNKETYWVPDYVKEKRFHNWLEGARDWAISRSRFWGTPLPLWMSQDRKEIVVMDSIEKLEKLSGVKVTDLHRHYVDDITIPSKRGPKFGTLKRVDDVFDCWFESGSMPYAYIHYPFENRELFEKNFPGNFVAEGLDQTRGWFYTLMVLSTALFGKPAFKNLICNGLVLAEDGKKMSKSKKNYPSPKDLIDEFGADSLRLYLVNSPVVRAESLRFKRTGVFAVVKDVFLPWYNAYRFFVQNAKRLEVEGLASFSPMEQAVLLKSSNVLDHWINSATESLVSFVHQEMDAYRLYTVVPYLVKYIDYLTNIYVRLNRKRFKGRTGEEDCRISLSTLYHVLVTTCVVMAPFTPFFTEVLYQNLRKVSSKSEESIHFCKFPSTTGERDERVEQSVNRMVTIIDLARNIRERHNKALKTPLKEMVVVHPDNDFLEDITGKLKEYVMEEINVKTVTPCNDPLMYASLRAEPNFSVLGKRLGKDMGKVSNVVKKMTQEQILDFEKSGEISFFGHCLKLDDIKVVRQFKRPENVSEKEIDAAGDGDVLVILDLRADQSLFEAGVAREVVNRIQKLRKTAQLEPADPVDVYYESVGSDKNTLEEILKSQDQYIRDALGSPIMPKEMAPTDDVILGEESHNVHDMSFVICIARSTPILAPDLLSHASGKSNHVEALRVYLLSRSLSRLKNQFQAGKGMITVDCIEGYPPVSLLLGKHVFLSAGDFYLASRS

SEQ ID NO: 186892 - protein, 928 aa, Zea Mays
MYAKVRDKSNGKVYVIAESRLGQLPVKAKASGKKQAPSKGSNAEAAQDGLDKESYELLVKIPGPYLVGLKYTPLFDFFIELQETAFRVIADNYVTDDSGTGVVHCAPAFGEDDHRVCLAAGIFETAGLVVAVDDDGCFIEKISDFKGRYVKEADKDIISAVKDKGRLVSKGSIEHSYPFCWRSGTPLIYRAVPSWFVKVEKIKDQLLECNKETYWVPDYVKEKRFHNWLEGARDWAISRSRFWGTPLPLWMSQDRKEIVVMDSIEKLEKLSGVKVTDLHRHYVDDITIPSKRGPKFGTLKRVDDVFDCWFESGSMPYAYIHYPFENRELFEKNFPGNFVAEGLDQTRGWFYTLMVLSTALFGKPAFKNLICNGLVLAEDGKKMSKSKKNYPSPKDLIDEFGADSLRLYLVNSPVVRAESLRFKRTGVFAVVKDVFLPWYNAYRFFVQNAKRLEVEGLASFSPMEQAVLLKSSNVLDHWINSATESLVSFVHQEMDAYRLYTVVPYLVKYIDYLTNIYVRLNRKRFKGRTGEEDCRISLSTLYHVLVTTCVVMAPFTPFFTEVLYQNLRKVSSKSEESIHFCKFPSTTGERDERVEQSVNRMVTIIDLARNIRERHNKALKTPLKEMVVVHPDNDFLEDITGKLKEYVMEEINVKTVTPCNDPLMYASLRAEPNFSVLGKRLGKDMGKVSNVVKKMTQEQILDFEKSGEISFFGHCLKLDDIKVVRQFKRPENVSEKEIDAAGDGDVLVILDLRADQSLFEAGVAREVVNRIQKLRKTAQLEPADPVDVYYESVGSDKNTLEEILKSQDQYIRDALGSPIMPKEMAPTDDVILGEESHNVHDMSFVICIARSTPILAPDLLSHASGKSNHVEALRVYLLSRSLSRLKNQFQAGKGMITVDCIEGYPPVSLLLGKHVFLSAGDFYLASRS

SEQ ID NO: 186893 - protein, 972 aa, Zea Mays
MDDVCEGKDFSFPEQEERVLELWAKLDAFHEQLRRTEGGEEFVFYDGPPFATGLPHYGHILAGTIKDVVTRHQSMRGRHVSRRFGWDCHGLPVEFEIDKLLGITNRQQVFDLGIGKYNETCRSIVTKYVSEWEAMVTRTGRWIDFKNDYKTMDLNFMESVWWVFAQLWEKDLVYKGFKVMPYSTGCKTALSNFEAALDYRTVPDPAVMVSFPIVGDMDNAAFVAWTTTPWTLPSNLALCINANLMYAKVRDKSNGKVYVIAESRLGQLPVKAKASGKKQAPSKGSNAEAAQDGLDKESYELLVKIPGPYLVGLKYTPLFDFFIELQETAFRVIADNYVTDDSGTGVVHCAPAFGEDDHRVCLAAGIFETAGLVVAVDDDGCFIEKISDFKGRYVKEADKDIISAVKDKGRLVSKGSIEHSYPFCWRSGTPLIYRAVPSWFVKVEKIKDQLLECNKETYWVPDYVKEKRFHNWLEGARDWAISRSRFWGTPLPLWMSQDRKEIVVMDSIEKLEKLSGVKVTDLHRHYVDDITIPSKRGPKFGTLKRVDDVFDCWFESGSMPYAYIHYPFENRELFEKNFPGNFVAEGLDQTRGWFYTLMVLSTALFGKPAFKNLICNGLVLAEDGKKMSKSKKNYPSPKDLIDEFGADSLRLYLVNSPVVRAESLRFKRTGVFAVVKDVFLPWYNAYRFFVQNAKRLEVEGLASFSPMEQAVLLKSSNVLDHWINSATESLVSFVHQEMDAYRLYTVVPYLVKYIDYLTNIYVRLNRKRFKGRTGEEDCRISLSTLYHVLVTTCVVMAPFTPFFTEVLYQNLRKVSSKSEESIHFCKFPSTTGERDERVEQSVNRMVTIIDLARNIRERHNKALKTPLKEMVVVHPDNDFLEDITGKLKEYVMEEINVKTVTPCNDPLMYASLRAEPNFSVLGKRLGKDMGKVSNVVKKMTQEQILDFEKSGEISFFGHCLKLDDIKCNMFLL

SEQ ID NO: 186894 - protein, 428 aa, Zea Mays
MDDVCEGKDFSFPEQEERVLELWAKLDAFHEQLRRTEGGEEFVFYDGPPFATGLPHYGHILAGTIKDVVTRHQSMRGRHVSRRFGWDCHGLPVEFEIDKLLGITNRQQVFDLGIGKYNETCRSIVTKYVSEWEAMVTRTGRWIDFKNDYKTMDLNFMESVWWVFAQLWEKDLVYKGFKVMPYSTGCKTALSNFEAALDYRTVPDPAVMVSFPIVGDMDNAAFVAWTTTPWTLPSNLALCINANLMYAKVRDKSNGKVYVIAESRLGQLPVKAKASGKKQAPSKGSNAEAAQDGLDKESYELLVKIPGPYLVGLKYTPLFDFFIELQETAFRVIADNYVTDDSGTGVVHCAPAFGEDDHRVCLAAGIFETAGLVVAVDDDGCFIEKISDFKGRYVKEADKDIISAVKDKGRLVSKGSIEHSYPFCWRSG

SEQ ID NO: 186895 - protein, 389 aa, Zea Mays
MASEIEVLEDTTTSSTSLVAAASTAPSAAEGAGAPAENESLKNDVYTAAAYGDLEKLQRLVEGEGRPVTEPDGGGYYALQWAALNNRVAAAQYILEHGADTNAVDHTGQTALHWSAVRGHIQVAELLLKEGAKMDAADLYGYQATHVAAQYGQTAFIYRIVAKWNADPDIPDNDGRSPLHWAAYKGFADSIRLLLFLDAYRGRQDKEGCTPLHWAAIRGNLEACTVLVQVGKKDDLMVKDKTGLTPAQLAADKNHRQIAFFLDNARRVHDRGCGANTRFGKLSKLGLAPFLWCTIIGMLITYVHSVILGQYVMTMTAPFGMFAWSGVFLATAGLVMFYKCSRKDPGYISINTRGSQNQRDDEPLLKMELENPALLFGNWSQLCITCKDL

SEQ ID NO: 186896 - protein, 281 aa, Zea Mays
MASEIEVLEDTTTSSTSLVAAASTAPSAAEGAGAPAENESLKNDVYTAAAYGDLEKLQRLVEGEGRPVTEPDGGGYYALQWAALNNRVAAAQYILEHGADTNAVDHTGQTALHWSAVRGHIQVAELLLKEGAKMDAADLYGYQATHVAAQYGQTAFIYRIVAKWNADPDIPDNDGRSPLHWAAYKGFADSIRLLLFLDAYRGRQDKEGCTPLHWAAIRGNLEACTVLVQVGKKDDLMVKDKTGLTPAQLAADKNHRQIAFFLERSGLHQHKYKGLAKSKGR

SEQ ID NO: 186897 - protein, 286 aa, Zea Mays
MAATTVASRKRGTAAFLDDPFSFPGDLPCLQTKRGRCSSSIVAADLGLSFPLEFDPVEALHLIFPGEDRQVLQNHLQASGNVLDAAIRAYKDYLAERSKESASAINYVPSDNEEGDSILSESESDVYLKEETIPTNCSGWAEVIVKEMSSASDLTDAKNRAFKILKLFEKSADRSSSPDEKREVNKEHEIVKQMLGSLLHQNGVLKRAFLIQHNRLKEYQEMVQERSQFNQILEKYREQIKALEKHLLASQSRCLLIYTVVSKDIPLIPTCCYICMLQHVSSLGER

SEQ ID NO: 186898 - protein, 125 aa, Zea Mays
MSSASDLTDAKNRAFKILKLFEKSADRSSSPDEKREVNKEHEIVKQMLGSLLHQNGVLKRAFLIQHNRLKEYQEMVQERSQFNQILEKYREQIKALEEKNSALSFHLQNMNQCRNTYWHHNPDVF

SEQ ID NO: 186899 - protein, 227 aa, Zea Mays
MEAAGGGAEDEQVMSEVHLGCPPHFSGLLVSHFSFSSRPLGPYGHKGGGGGGGGSELVAATSGSGDSPDAVAVDEDGDLVLDRRRRNKYARGDRHLFTIQHGVTSSLKSVGLQVWKAALLLSDFILHESFSSPNFDGVTAIEIGLVGLALARVARRIFVTGSMKLKSVYENWTGKWHGLHLWVHMTLLIQVGIYGLQVKLRRLRKQQSCLLQMLFTVMISQICSSTR

SEQ ID NO: 186900 - protein, 231 aa, Zea Mays
MEAAGGGAEDEQVMSEVHLGCPPHFSGLLVSHFSFSSRPLGPYGHKGGGGGGGGSELVAATSGSGDSPDAVAVDEDGDLVLDRRRRNKYARGDRHLFTIQHGVTSSLKSVGLQVWKAALLLSDFILHESFSSPNFDGVTAIEIGAGTGLVGLALARVARRIFVTGSMKLKSVYENWTGKWHGLHLWVHMTLLIQVGIYGLQVKLRRLRKQQSCLLQMLFTVMISQICSSTR

SEQ ID NO: 186901 - protein, 225 aa, Zea Mays
MEAAGGGAEDEQVMSEVHLGCPPHFSGLLVSHFSFSSRPLGPYGHKGGGGGGGGSELVAATSGSVAVDEDGDLVLDRRRRNKYARGDRHLFTIQHGVTSSLKSVGLQVWKAALLLSDFILHESFSSPNFDGVTAIEIGAGTGLVGLALARVARRIFVTGSMKLKSVYENWTGKWHGLHLWVHMTLLIQVGIYGLQVKLRRLRKQQSCLLQMLFTVMISQICSSTR

SEQ ID NO: 186902 - protein, 262 aa, Zea Mays
MFWKRVVERYNFRRGANSERSLRSLQSRWTNNIKPEVGKFAGYYAEALRQNPSGMSDADKTSLAATNFAEVEGHAFGFMHCWGRMKDEPKWGNPTQLGTEAHLEGDGLEEDSNRVHGDADKSAGKRPVGRDRAKAANKKSKSVSGDTSSSEYASRMQDLSIQKINIMQEESVRKGERFQQLATIDEKRYQEMCSHNQSVLDIEQEKVRIMREKHDREEKKEDERILSINLDSCTPSLRMYYEALQEDIMAKLAARRQGRHAP

SEQ ID NO: 186903 - protein, 92 aa, Zea Mays
MCLSILLLWSQISALQLADGTIFKCPNPLVFALSWTIIAGSILFSGSMDPIFLRLFHNCMIISLTLSASSATGKSLMSLIQLLNTSAKLLVM

SEQ ID NO: 186904 - protein, 141 aa, Zea Mays
MRPLNCVSFLLGLAVVSDTLGPFVAIAHRELLSVTGSKGGADIKLELSVGKIRTGEETARSNVLTGRRLAFGDAVMEQKETENSGIRTDSGAKYAVGKCGHGGGKDLSMNCSKHTPKVYFDGHIPFTADYRSPRKHPPKNN

SEQ ID NO: 186905 - protein, 151 aa, Zea Mays
MESLGLFLVICGHAWSFTVVQKDFKHSNETISSKFSDVLNCMVAMSKRYIQPKDPNFHTVHRRITNDQRMWPHFKGCIGAIDDTHINATPPKKDFIRFMGRSGKPTQNVMGVVDFDMRFIYASIGQPGSMHNTTVLYHALEADEDLFPHPL

SEQ ID NO: 186906 - protein, 63 aa, Zea Mays
MTRMETMRPMMTRMKTMKNVKRFPLQLLKESVMFLLVKRTRVKSPVLELALRCKVIQWGCDVT

SEQ ID NO: 186907 - protein, 603 aa, Zea Mays
MPPVPKRWRGQCQGGDANSPSNFTCNRKVIGGRYYLSGYQTEEGGAIKFVSPRDSSGHGSHTASIAAGRFVRDMSYGGGLGTGGGRGGAPMARIAAYKACWETGCYDVDILAAFDDAIRDGVDIISVSLGPDYPQGDYLSDAISIGSFHATSNGILVVSSAGNAGRQGSATNLAPWMLTVAAGTTDRSFSSYVSLANGTSVMGESLSTYRMETPVRTIAASEVNAGYFTPYQSSLCLDSSLNRTKAKGKILICRRNQGSSESRLSTSMVVKEAGAAGMILIDEMEDHVANRFAVPGVTVGKAMGDKIVSYVKSTRRACTLILPAKTVLGLRDAPRVAAFSSRGPSSLTPEILKPDVAAPGLNILAAWSPAKNGMRFNVLSGTSMACPHVTGIAALVKSVYPSWSPSGIKSAIMTTATVLDTKRKTIARDPNGGAATPFDFGSGFMDPVKALSPGIIFDTHPEDYKSFLCAIISRDDHSVHLITGDNSSCTHRASSSATALNYPSITVPYLKQSYSVTRTMTNVGNPRSTYHAVVSAPPGTSVRVTPEVINFKSYGEKRMFAVSLHVDVPPRGYVFGSLSWHGNGSDARVTMPLVVKLQTSGKA

SEQ ID NO: 186908 - protein, 393 aa, Zea Mays
METPVRTIAASEVNAGYFTPYQSSLCLDSSLNRTKAKGKILICRRNQGSSESRLSTSMVVKEAGAAGMILIDEMEDHVANRFAVPGVTVGKAMGDKIVSYVKSTRRACTLILPAKTVLGLRDAPRVAAFSSRGPSSLTPEILKPDVAAPGLNILAAWSPAKNGMRFNVLSGTSMACPHVTGIAALVKSVYPSWSPSGIKSAIMTTATVLDTKRKTIARDPNGGAATPFDFGSGFMDPVKALSPGIIFDTHPEDYKSFLCAIISRDDHSVHLITGDNSSCTHRASSSATALNYPSITVPYLKQSYSVTRTMTNVGNPRSTYHAVVSAPPGTSVRVTPEVINFKSYGEKRMFAVSLHVDVPPRGYVFGSLSWHGNGSDARVTMPLVVKLQTSGKA

SEQ ID NO: 186909 - protein, 359 aa, Zea Mays
MPPVPKRWRGQCQGGDANSPSNFTCNRKVIGGRYYLSGYQTEEGGAIKFVSPRDSSGHGSHTASIAAGRFVRDMSYGGGLGTGGGRGGAPMARIAAYKACWETGCYDVDILAAFDDAIRDGVDIISVSLGPDYPQGDYLSDAISIGSFHATSNGILVVSSAGNAGRQGSATNLAPWMLTVAAGTTDRSFSSYVSLANGTSVMGESLSTYRMETPVRTIAASEVNAGYFTPYQSSLCLDSSLNRTKAKGKILICRRNQGSSESRLSTSMVVKEAGAAGMILIDEMEDHVANRFAVPGVTVGKAMGDKIVSYVKSTRRACTLILPAKTVLGLRDAPRVAAFSSRGPSSLTPEILKMLLLLG

SEQ ID NO: 186910 - protein, 312 aa, Zea Mays
MPPVPKRWRGQCQGGDANSPSNFTCNSGYQTEEGGAIKFVSPRDSSGHGSHTASIAAGRFVRDMSYGGGLGTGGGRGGAPMARIAAYKACWETGCYDVDILAAFDDAIRDGVDIISVSLGPDYPQGDYLSDAISIGSFHATSNGILVVSSAGNAGRQGSATNLAPWMLTVAAGTTDRSFSSYVSLANGTSVMGESLSTYRMETPVRTIAASEVNAGYFTPYQSSLCLDSSLNRTKAKGKILICRRNQGSSESRLSTSMVVKEAGAAGMILIDEMEDHVANRFAVPGVTVGKAMGDKIVSYVKSTRLSELYYI

SEQ ID NO: 186911 - protein, 425 aa, Zea Mays
MHDRKVIGGRYYLSGYQTEEGGAIKFVSPRDSSGHGSHTASIAAGRFVRDMSYGGGLGTGGGRGGAPMARIAAYKACWETGCYDVDILAAFDDAIRDGVDIISVSLGPDYPQGDYLSDAISIGSFHATSNGILVVSSAGNAGRQGSATNLAPWMLTVAAGTTDRSFSSYVSLANGTSVMGESLSTYRMETPVRTIAASEVNAGYFTPYQSSLCLDSSLNRTKAKGKILICRRNQGSSESRLSTSMVVKEAGAAGMILIDEMEDHVANRFAVPGVTVGKAMGDKIVSYVKSTRRACTLILPAKTVLGLRDAPRVAAFSSRGPSSLTPEILKFLLHVCFFFVARCCCSWAEHLGGVVSCQERYALQRSIWNFHGMSARYRNSSSREERVSVMVSFRHQIGNHDNSNRTGHQKENHSKGPQWGGCNAV

SEQ ID NO: 186912 - protein, 200 aa, Zea Mays
MFDYTTGGDDSGTEEEQAAFMKELERFHREKMLEFKPPKFYGEGLNCLKLWRQVTGLGGYDQVTSCKLWRQVGESFKPPKTCTTVSWTFRNFYEKALLEYEKHKIETGEFQVASSALPDRFGSESQVGGSHVSGSGRARRESATRAMQGWHSQRLLGNGEIADPIIKDKGHIVLKKDKTPKSSGTFLHYVSFYFCSAITY

SEQ ID NO: 186913 - protein, 58 aa, Zea Mays
MVMLWFWCSRMSLVVVYIRSTCLMGTTGNRRSSRPSGKWFGGVACTAAPACVDLGGNQ

SEQ ID NO: 186914 - protein, 376 aa, Zea Mays
MSRAGRLVMVKVLTMETFEHLGFFLQLSEGTPLSQAATFFANSDPDMPAAPVPAALVHDWVLQHIASALEFMAEKTVAKENSQHNAFDPDVTMSDAVTNTRIHSSSPTGSSAPNYPGYYRNASFVEGCSKTSVVKQASDLKGHSIKVLNCHDSVIYILAPLKYATVYGCSDTTIILGAIGKVVKVEHCERVQIIAASKRICIANCRECIFYLGVNHQPLIVGDNHKLQVAPFNTYYPQLGEHLAQVGVDPNVNKWDQPFVLGVVDLHDSLSHPAGVSDVQAESTTCLDPDLFTNFLIPSWFEVEGPTKYNPFTLPEVYWASQRKKHASLEDIQKNIRELEIDDIRKKELACALHAQFKDWLYASGNIRQLYCLQGE

SEQ ID NO: 186915 - protein, 329 aa, Zea Mays
MSRAGRLVMVKVLTMETFEHLGFFLQLSEGTPLSQAATFFANSDPDMPAAPVPAALVHDWVLQHIASALEFMAEKTVAKENSQHNAFDPDVTMSDAVTNTRIHSSSPTGSSAPNYPGYYRNASFVEGCSKTSVVKQASDLKGHSIKVLNCHDSVIYILAPLKYATVYGCSDTTIILGAIGKVAPFNTYYPQLGEHLAQVGVDPNVNKWDQPFVLGVVDLHDSLSHPAGVSDVQAESTTCLDPDLFTNFLIPSWFEVEGPTKYNPFTLPEVYWASQRKKHASLEDIQKNIRELEIDDIRKKELACALHAQFKDWLYASGNIRQLYCLQGE

SEQ ID NO: 186916 - protein, 212 aa, Zea Mays
MQLSMDVLTLPLFLVLLVVKVEHCERVQIIAASKRICIANCRECIFYLGVNHQPLIVGDNHKLQVAPFNTYYPQLGEHLAQVGVDPNVNKWDQPFVLGVVDLHDSLSHPAGVSDVQAESTTCLDPDLFTNFLIPSWFEVEGPTKYNPFTLPEVYWASQRKKHASLEDIQKNIRELEIDDIRKKELACALHAQFKDWLYASGNIRQLYCLQGE

SEQ ID NO: 186917 - protein, 507 aa, Zea Mays
MADDPLDSSPSASAAAAAGGVSSGPRPALRPRREAFEYGLLPIPKLVFPEGALTQTLSQLKERLAPGGPRVGAAALAEALQIPAEQAALALGTLAAVLPAEDSALGEDGSGSADLRDLLLFLYIQSYKRLVPRVHKDSPAVTDVWPSTSAFDGYLSALSPIQFVRSNSRRFMPSQADEEAHQLSYLQKHMTNILTLLADSIDGEGDDSMVLTMETFEHLGFFLQLSEGTPLSQAATFFANSDPDMPAAPVPAALVHDWVLQHIASALEFMAEKTVAKENSQHNAFDPDVTMSDAVTNTRIHSSSPTGSSAPNYPGYYRNASFVEGCSKTSVVKQASDLKGHSIKVLNCHDSVIYILAPLKYATVYGCSDTTIILGAIGKVVKVEHCERVQIIAASKRICIANCRECIFYLGVNHQPLIVGDNHKLQVAPFNTYYPQLGEHLAQVGVDPNVNKWDQPFVLGVVDLHDSLSHPAGVSDVQAESTTCLDPDLFTNFLPANSLCRFLVGLK

SEQ ID NO: 186918 - protein, 501 aa, Zea Mays
MADDPLDSSPSASAAAAAGGVSSGPRPALRPRREAFEYGLLPIPKLVFPEGALTQTLSQLKERLAPGGPRVGAAALAEALQIPAEQAALALGTLAAVLPAEDSALGEDGSGSADLRDLLLFLYIQSYKRLVPRVHKDSPAVTDVWPSTSAFDGYLSALSPIQFVRSNSRRFMPSQADEEAHQLSYLQKHMTNILTLLADSIDGEGDDSMVLTMETFEHLGFFLQLSEGTPLSQAATFFANSDPDMPAAPVPAALVHDWVLQHIASALEFMAEKTVAKENSQHNAFDPDVTMSDAVTNTRIHSSSPTGSSAPNYPGYYRNASFVEGCSKTSVVKQASDLKGHSIKVLNCHDSVIYILAPLKYATVYGCSDTTIILGAIGKVVKVEHCERVQIIAASKRICIANCRECIFYLGVNHQPLIVGDNHKLQVAPFNTYYPQLGEHLAQVGVDPNVNKWDQPFVLGVVDLHDSLSHPAGVSDVQAESTTCLDPDLFTNFLLILYADS

SEQ ID NO: 186919 - protein, 545 aa, Zea Mays
MADDPLDSSPSASAAAAAGGVSSGPRPALRPRREAFEYGLLPIPKLVFPEGALTQTLSQLKERLAPGGPRVGAAALAEALQIPAEQAALALGTLAAVLPAEDSALGEDGSGSADLRDLLLFLYIQSYKRLVPRVHKDSPAVTDVWPSTSAFDGYLSALSPIQFVRSNSRRFMPSQADEEAHQLSYLQKHMTNILTLLADSIDGEGDDSMVLTMETFEHLGFFLQLSEGTPLSQAATFFANSDPDMPAAPVPAALVHDWVLQHIASALEFMAEKTVAKENSQHNAFDPDVTMSDAVTNTRIHSSSPTGSSAPNYPGYYRNASFVEGCSKTSVVKQASDLKGHSIKVLNCHDSVIYILAPLKYATVYGCSDTTIILGAIGKVVKVEHCERVQIIAASKRICIANCRECIFYLGVNHQPLIVGDNHKLQVAPFNTYYPQLGEHLAQVGVDPNVNKWDQPFVLGVVDLHDSLSHPAGVSDVQAESTTCLDPDLFTNFLHASLEDIQKNIRELEIDDIRKKELACALHAQFKDWLYASGNIRQLYCLQGE

SEQ ID NO: 186920 - protein, 453 aa, Zea Mays
MDVKTFPAGLRVLVVDDDRVCLKVLERQLKCCNYNVMVVTDARTALEMLRERKDDGDQFDLVISDVVMPNMDGFELLELIGVEMDLPVIMLSANSETRTIMKGIKHGACDYIVKPVRLEQLRGIWTHVVKNSRTDPRTSIIDSGSDDDVQKLPSGDGGEGDKVGANRRKKKCSKKNKPAVDVAGGHSENTSAQKKPRVQWCGQLHRKFVEAVHQIGIDKAVPKKILEAMNVEGITRENVASHLQKYRIYLRKLIEGTLGNSNSFADETEALWRYLNVPSFITSPSSSNHFTNAGSSSAIRTQTLLPPQPPVHVMSSQKNLSTPRSYASILRGKILGSSRGIPFEDTPDGEMLAPGNLSSQSPELQSVWAGSASTRSDLQIDNSTQALNGGGASDNSLREGGSTVDQQAVVSDQVNNINAESDGLDDFLAYMVNRRDFINNGDSFILGDQDFAP

SEQ ID NO: 186921 - protein, 64 aa, Zea Mays
MANISINIIYVGMILNTEKYRCRKLLALQTNISFLMCSSVKVISHIFEFISTKSKTFDSRVKKL

SEQ ID NO: 186922 - protein, 69 aa, Zea Mays
MIRPVAPIAPVSTTHSAWIQCSSADRLPRSKRQITRLFFGFSHWCSKSWSGVISLRCRSVELVSLACIA

SEQ ID NO: 186923 - protein, 182 aa, Zea Mays
MTIMPCSNYLSIYRWIIRSKPITPPSDARRCTCGATGRSTARARSRCGARSRRRCCGCRATAARRAAGTTSTTRGRARSRTSARCRRTTAAGTASSPSCAASAASPSPCAATGAPTRRTAAGSGTAPAAPTSSTSAPSRTTYILHSNQSICSQMQTYACVRVCITMHIIHLSVSYSVFKIAG

SEQ ID NO: 186924 - protein, 274 aa, Zea Mays
MTIMPCSNYLSIYRWIIRSKPITPPSDARRCTCGATGRSTARARSRCGARSRRRCCGCRATAARRAAGTTSTTRGRARSRTSARCRRTTAAGTASSPSCAASAASPSPCAATGAPTRRTAAGSGTAPAAPTSSTSAPSRTTSGRSAAATPPAASTTASTTTTTATTRRHPRSTTQPPTLLVTAPLLPLPPPMLTTITTPAGSRRRRHCRRRAEAPATTDYYRSTRVSTYGPTTYILHSNQSICSQMQTYACVRVCITMHIIHLSVSYSVFKIAG

SEQ ID NO: 186925 - protein, 231 aa, Zea Mays
MARKLRELLQKSGNRVCADCGAPDPKWASANIGVFICLKCSGVHRSLGTHVSKVLSVTLDQWTDDEINSMIEVGGNSYANAIYEAFLPEGYQKPHPDSSQEERADFIRSKYELQEFLKPSLRLVSSNKGSLEATSSRKHMDNSVSLSASFSSEAGMVEFIGILKVKVIRGTKLAVRDLMSSDPYVVLTLGQQKAKTSVSKRNLNPVWNEELKLSVPQHYGPLKLTPFLQSF

SEQ ID NO: 186926 - protein, 171 aa, Zea Mays
MARKLRELLQKSGNRVCADCGAPDPKWASANIGVFICLKCSGVHRSLGTHVSKVLSVTLDQWTDDEINSMIEVGGNSYANAIYEAFLPEGYQKPHPDSSQEERADFIRSKYELQEFLKPSLRLVSSNKGSLEATSSRKHMDNSVSLSASFSSEHPSLHIFFRLEWLSSLEY

SEQ ID NO: 186927 - protein, 648 aa, Zea Mays
MSDAAAAIRRLLVAGVRPSTHLPPLTVKLLHARVLRLDILADLSLLLLRATTSSGLHLHALRLHALLPEPSHLTFPFALKSASRLPFPLPVGAQLHARSLKLPSHSNPHVLTSLLGLYAKCGRLHDAQRAFDEMPHPSTVSWTALIAAYMDAGHALEAIGVARRAFASGMRPDSFTAVRVLTACARVADLETGEAVWAAARQEEGVAESVFVATAALDLYVKCGEMEKARSVFDEMKNRDAVAWGAMVGGYASNGHPREALDLFFAMQMEGAKPDCYTVVGALSACTRLGALDLGRQAVGMVHWDEVLGNPVLGTALIDMYAKCGSTSEAWMVFQQMLERDIIVWNAMILGLGMTGHEKIAFALVGQMKKSGVKLNDNTFIGLLCSCTHTGLVNDGRQYFHNMTHVYRISPRIEHYGCMVDLFSRAGLLEEAHQLIGDMPMLANAVVWGALLGGCKIHRNADLAEHALKQLIRLEPWNSGNYVMLSNIYSNSGRWEDAAKLRLEMKAKGIEKVPASSWVELDGKVHKFYVGDDSHPLSDKIYAKLDELGMEMKAMGYEPTTEVVMFDVENEEKENTLVHHSEKIAIAFSLITTEPGETIRVTKNLRVCTDCHSAIKLISRITCREIVVRDNNRFHCFRDGHCSCNDYW

SEQ ID NO: 186928 - protein, 219 aa, Zea Mays
MRAREEETRQRAAFLQHGFASAWKEGIHTDIVVKPGTGPAIPAHKAILAARSEVFRHMLSGDDRCKAPAGGSISLPELSHDDLSLLLAFLYTGALEAPGEGGGEASQDQERQLHALLVAADKYDVPFLRRVCEARLAAGVAPRNALRTLEVAELSSSAALMERAMGAVVEHAEEVVFSAEYERFAARNAGLCVEITRALLARMPTPARSDGPCLELGSS

SEQ ID NO: 186929 - protein, 88 aa, Zea Mays
MSVCTLQFQSDDIYRIKIHLSEDVFLVVLVSCHYQNNCCPSACMFKNHCIVAHICSESSGYIFGEGYSIRKVTLSFFNVISRQGTKLH

SEQ ID NO: 186930 - protein, 72 aa, Zea Mays
MSTYIFYFSLYRHHNISLYFLESSAHSSLHQILFSSFHTLLRHIKFYFVTFQTLLHYTRSYISSFQILIHHI

SEQ ID NO: 186931 - protein, 64 aa, Zea Mays
MCTTVWWHDHIGQLVNWMQATILPDIQGRFRTFRFLLHTAARLELHRLSTIALQKIYIYKHLVL

SEQ ID NO: 186932 - protein, 89 aa, Zea Mays
MVNSNAPFARKFGREDPVLDKIDQELLGRRPDGFVPGGWTYLLNATTEEGRPFAVERVQDLRPGPGVDRLKKLVTGLLTQEGFDDKHCL

SEQ ID NO: 186933 - protein, 462 aa, Zea Mays
MDEHSPEIVPVNSPALDPDPDQEPQSSESGEEGDRGGPRPPESLSDKLPLPPADLNLYGAAVALRLLLLAAFFRYRVAHPARGAPWLWLAALACELCLALAWLLAQLPKLSPTSRETHLDRLASRYDKDARLGSVDVLVTAAGAGAEPPLAAANTVLSVLAADYPARRLACYVSDDGADLLLFEALFDAAGFARRWVPFCRRHAVEPRAPELYFARGVDYLRDKAAPSFVKERRAMKRAYEELKVRMNCLAAKARKVPEDGWVMSDGTPWPGNNTRDHPAMIQVLLGHPGDQDAEGNELPRLLYVSREKKPGFQHHTKAGALNALLRVSALLTNGSYVLNLDHDHCVANSGVLREAMCFLMDPESGNRTCYVQFPLRMGVNDDGGETRATRDSVFFDASDQSELCTLQRCPPSRLTLTHAFLTLGWGSDRHEVPGRHPGPGVRRLRLLHQQEGAVRVRSRVH

SEQ ID NO: 186934 - protein, 284 aa, Zea Mays
MGKEKTHINIVVIGHVDSGKSTTTGHLIYKLGGIDKRVIERSTNLDWYKGPTLLEALDLINEPKRPSDKPLRLPLQDVYKIGGIGTVPVGRVETGIIKPGMVVTFGPSGLTTEVKSVEMHHEALQEALPGDNVGFNVKNVAVKDLKRGYVASNSKDDPAKEAASFTSQVIIMNHPGQIGNGYAPVLDCHTSHIAVKFAELITKIDRRSGKELEKEPKFLKNGDAGMVKMVPTKPMVVETFSEYPPLGRFAVRDMRQTVAVGVIKSVEKKDPTGAKVTKAAAKKK

SEQ ID NO: 186935 - protein, 337 aa, Zea Mays
MPGCLTSSRPSVREAGISKDGQTREHALLAFTLGVKQMICCCNKMDATTPKYSKARYDEIVKEVSSYLKKVGYNPDKIHFVPISGFEGDNMIERSTNLDWYKGPTLLEALDLINEPKRPSDKPLRLPLQDVYKIGGIGTVPVGRVETGIIKPGMVVTFGPSGLTTEVKSVEMHHEALQEALPGDNVGFNVKNVAVKDLKRGYVASNSKDDPAKEAASFTSQVIIMNHPGQIGNGYAPVLDCHTSHIAVKFAELITKIDRRSGKELEKEPKFLKNGDAGMVKMVPTKPMVVETFSEYPPLGRFAVRDMRQTVAVGVIKSVEKKDPTGAKVTKAAAKKK

SEQ ID NO: 186936 - protein, 516 aa, Zea Mays
MFSLYLNHTIYAVSKRSFEMIEPHFMEDGSIASSYKEKRSCQHNDDSKGEQEKPFLSEGVWSHIHSFMHIRDAGRAACLSRSFLQSWRCHPYLIFTDETLGCKKNTSQENEIASNFYSRVDNILNNHSGIGMKALKIHVPIGYTAKDSRYLNRWLQIAITHGIEELELIFPFMAKYKFPYSLLPMSGDSIKCLELSCCSFCPTSKFGWLKNLTKLCLDGVFIEGDELERLVFSALALERLEIRYCDRIVCLKVPSMLQRLTYLEVYDCDKLRVLDIDAPNITCFNFGRHHTKTKLSIGGGVSKIKELSACFDDAVYYVRVELPSMMANLETLTINSMVEMNIPMLPSKYLHLKYLKISLAAYTFPSTFDYFSLASFFDACPSLEAFFLDAYQRKMKHVSIITNPLVLRGTPEQRHHKLKTVEMNGFTSAKSLVELACHIAQCATSLQSLKLEVHQSDFKCYIPANKHNKCSPLPVEVLMESRRAHLAIMTYIEPIIPSTVKLQVVGPCSRCHALEQ

SEQ ID NO: 186937 - protein, 449 aa, Zea Mays
MHIRDAGRAACLSRSFLQSWRCHPYLIFTDETLGCKKNTSQENEIASNFYSRVDNILNNHSGIGMKALKIHVPIGYTAKDSRYLNRWLQIAITHGIEELELIFPFMAKYKFPYSLLPMSGDSIKCLELSCCSFCPTSKFGWLKNLTKLCLDGVFIEGDELERLVFSALALERLEIRYCDRIVCLKVPSMLQRLTYLEVYDCDKLRVLDIDAPNITCFNFGRHHTKTKLSIGGGVSKIKELSACFDDAVYYVRVELPSMMANLETLTINSMVEMNIPMLPSKYLHLKYLKISLAAYTFPSTFDYFSLASFFDACPSLEAFFLDAYQRKMKHVSIITNPLVLRGTPEQRHHKLKTVEMNGFTSAKSLVELACHIAQCATSLQSLKLEVHQSDFKCYIPANKHNKCSPLPVEVLMESRRAHLAIMTYIEPIIPSTVKLQVVGPCSRCHALEQ

SEQ ID NO: 186938 - protein, 215 aa, Zea Mays
MGGRNTVLLDAISWRIPLVSDIPTIIFGADVTHPETGEDSSPSIAAVVASQDWPEVTKYAGLVCAQAHRQELIQDLYKTWHDPQRGTVTGGMIRELLISFRKATGQKPLRIIFYRDGVSEGQFYQVLLYELDAIRKACASLEPNYQPPVTFVVVQKRHHTRLFANNHKDRSSMDKSGNILPGTVVDSKICHPTEFDFYLCSHAGIQACSLPCPLG

SEQ ID NO: 186939 - protein, 663 aa, Zea Mays
MLEVVLDMTPPPPPPQARLHQGSSAKGGHAERRKQPLQSSVTQPKAEPAAAAAVLPVPEGGKRCRGGGRRRGRAKAPGEPRAALLAPAQAQTQAPPPRTVIGPPVPSKGLSFCRRPGFGTVGARCVVKANHFLAELPDKDLTQYDVKITPEVSSRTVNRAIMAELVRLYRASDLGMRLPAYDGRKNLYTAGTLPFDAREFVVRLADEDDGSGVPPREREYRVAIKFAARADLHHLRQFIAGRQADAPQEALQVLDIVLRELANQRYVSIGRSFYSPDIRKPQRLGDGLQSWRGFYQSIRPTQMGLSLNIDMSSTAFIEPLPVIEFVAQILGKDVISRPLSDANRIKIKKALRGVKVEVTHRGNVRRKYRISGLTTQPTHELIFPIDEQMNMKSVVEYFKEMYGFTIQHPHLPCLQVGNQKKANYLPMEACKIIEGQRYTKRLNEKQITSLLKVTCQRPREQEMDILQTVHQNDYEQDPYAKEFGINISEKLTSVEARVLPAPWLKYHDTGKEKECLPQVGQWNMVNKKVINGCKVSHWACINFSRSVPETTARGFCQELAQMCQISGMEFNSEPVMPIYSARPDQVVKALKNVYNIALNKLKGKDLELLLAILPDNNGQLYGDIKRICETDLGLISQCCLTKHVFKISKQYLANVSLKINVKM

SEQ ID NO: 186940 - protein, 959 aa, Zea Mays
MLEVVLDMTPPPPPPQARLHQGSSAKGGHAERRKQPLQSSVTQPKAEPAAAAAVLPVPEGGKRCRGGGRRRGRAKAPGEPRAALLAPAQAQTQAPPPRTVIGPPVPSKGLSFCRRPGFGTVGARCVVKANHFLAELPDKDLTQYDVKITPEVSSRTVNRAIMAELVRLYRASDLGMRLPAYDGRKNLYTAGTLPFDAREFVVRLADEDDGSGVPPREREYRVAIKFAARADLHHLRQFIAGRQADAPQEALQVLDIVLRELANQRYVSIGRSFYSPDIRKPQRLGDGLQSWRGFYQSIRPTQMGLSLNIDMSSTAFIEPLPVIEFVAQILGKDVISRPLSDANRIKIKKALRGVKVEVTHRGNVRRKYRISGLTTQPTHELIFPIDEQMNMKSVVEYFKEMYGFTIQHPHLPCLQVGNQKKANYLPMEACKIIEGQRYTKRLNEKQITSLLKVTCQRPREQEMDILQTVHQNDYEQDPYAKEFGINISEKLTSVEARVLPAPWLKYHDTGKEKECLPQVGQWNMVNKVSHWACINFSRSVPETTARGFCQELAQMCQISGMEFNSEPVMPIYSARPDQVVKALKNVYNIALNKLKGKDLELLLAILPDNNGQLYGDIKRICETDLGLISQCCLTKHVFKISKQYLANVSLKINVKMGGRNTVLLDAISWRIPLVSDIPTIIFGADVTHPETGEDSSPSIAAVVASQDWPEVTKYAGLVCAQAHRQELIQDLYKTWHDPQRGTVTGGMIRELLISFRKATGQKPLRIIFYRDGVSEGQFYQVLLYELDAIRKACASLEPNYQPPVTFVVVQKRHHTRLFANNHKDRSSMDKSGNILPGTVVDSKICHPTEFDFYLCSHAGIQGTSRPAHYHVLWDENNFTADEMQTLTNNLCYTYARCTRSVSVVPPAYYAHLAAFRARFYMEPEMLDNQTSKTSNGTSGVSVKPLPAVKEKVKRMMFYC

SEQ ID NO: 186941 - protein, 894 aa, Zea Mays
MPGRQGMEPASAAARAPRPPSFASQTNALLRKNLIFQKRNRKGTIRLIIVPIYLCLIISVLQRVINSFLDKPKFRCGCKCIDDANGSTAPCQNVCGIQYSTLDQAPSCPIPNPPKWPALVQVPLPEYRAVQDSSGLFTGFPDASCRKTQSCPASIPFAGANTTLSNSIMQNLLTSSPLLNLSDYTSISSLLLGTDVPGSSTGFVEPAFISARPIYVLQPQCKSGDSVTIPITVGSVNAQKAEIKCVQGLPLWRNSSITINEETFRGYRKGKTAKGINEIAMGYDFQDSNENHFNVLTLYNSTYENASFIPMPFALLRIPHSLNAVSNAYLQLIQGSGVKMLLDFTKEMPKQATRLTFDFSAVAGVNFFKINDYSIQFVFFFSFINLQIVLAFLASSFFSKVNTAQAIAYLYIFGSGLMAGYLIRNFIEGGKFPRHWITVLEIIPAFSLYRGLYELGQYAVRSSETGSPGMRWSDLNDHMNGMRDVLIIIILEWLVLLPVAYYFDYASSVGHRSSPLSIIKHLLKKDPTWRRITANEIDGKDVHIEMEKVDIIKEREAVDQVLQQQQTSGYAVVCDDLRKVYHGKDGNPDKFAVQGVSLALPYGECLGILGPNGAGKSSFISMMIGFVKPTSGNAFVRGFSIQNDMEKIYSSMGVCPQNDMLWETLTGREHLQFYGRLKGLSGSSLDLVVDESLRSVNLLHGGAPDKQVKKYSGGMRRRLSVAISLIGDAKVVYMDEPSTGLDPASRKSLWSAVKQAKQDRAIILTTHSMEEAETLCDRLCIMVDGKLQCIGTPKELIARYGGYYVLTMTTLPEFEQEVEDLVRRLSPSSRKVYHLSGTQKHELPKQEARISDVFMAVESFKKRVEVQAWGLADTTMEDVFVKVAKGAQSSEELS

SEQ ID NO: 186942 - protein, 584 aa, Zea Mays
MLTYLVYEKQHKLRTMMKMHGLGDGPYWIIYYMYFLIFSTVYLIVFVIFGSIIGVNFFKINDYSIQFVFFFSFINLQIVLAFLASSFFSKVNTAQAIAYLYIFGSGLMAGYLIRNFIEGGKFPRHWITVLEIIPAFSLYRGLYELGQYAVRSSETGSPGMRWSDLNDHMNGMRDVLIIIILEWLVLLPVAYYFDYASSVGHRSSPLSIIKHLLKKDPTWRRITANEIDGKDVHIEMEKVDIIKEREAVDQVLQQQQTSGYAVVCDDLRKVYHGKDGNPDKFAVQGVSLALPYGECLGILGPNGAGKSSFISMMIGFVKPTSGNAFVRGFSIQNDMEKIYSSMGVCPQNDMLWETLTGREHLQFYGRLKGLSGSSLDLVVDESLRSVNLLHGGAPDKQVKKYSGGMRRRLSVAISLIGDAKVVYMDEPSTGLDPASRKSLWSAVKQAKQDRAIILTTHSMEEAETLCDRLCIMVDGKLQCIGTPKELIARYGGYYVLTMTTLPEFEQEVEDLVRRLSPSSRKVYHLSGTQKHELPKQEARISDVFMAVESFKKRVEVQAWGLADTTMEDVFVKVAKGAQSSEELS

SEQ ID NO: 186943 - protein, 966 aa, Zea Mays
MPGRQGMEPASAAARAPRPPSFASQTNALLRKNLIFQKRNRKGTIRLIIVPIYLCLIISVLQRVINSFLDKPKFRCGCKCIDDANGSTAPCQNVCGIQYSTLDQAPSCPIPNPPKWPALVQVPLPEYRAVQDSSGLFTGFPDASCRKTQSCPASIPFAGANTTLSNSIMQNLLTSSPLLNLSDYTSISSLLLGTDVPGSSTGFVEPAFISARPIYVLQPQCKSGDSVTIPITVGSVNAQKAEIKCVQGLPLWRNSSITINEETFRGYRKGKTAKGINEIAMGYDFQDSNENHFNVLTLYNSTYENASFIPMPFALLRIPHSLNAVSNAYLQLIQGSGVKMLLDFTKEMPKQATRLTFDFSAVAGPLFFEWVVVLLFPKKIQVMLTYLVYEKQHKLRTMMKMHGLGDGPYWIIYYMYFLIFSTVYLIVFVIFGSIIGVNFFKINDYSIQFVFFFSFINLQIVLAFLASSFFSKVNTAQAIAYLYIFGSGLMAGYLIRNFIEGGKFPRHWITVLEIIPAFSLYRGLYELGQYAVRSSETGSPGMRWSDLNDHMNGMRDVLIIIILEWLVLLPVAYYFDYASSVGHRSSPLSIIKHLLKKDPTWRRITANEIDGKDVHIEMEKVDIIKEREAVDQVLQQQQTSGYAVVCDDLRKVYHGKDGNPDKFAVQGVSLALPYGECLGILGPNGAGKSSFISMMIGFVKPTSGNAFVRGFSIQNDMEKIYSSMGVCPQNDMLWETLTGREHLQFYGRLKGLSGSSLDLVVDESLRSVNLLHGGAPDKQVKKYSGGMRRRLSVAISLIGDAKVVYMDEPSTGLDPASRKSLWSAVKQAKQDRAIILTTHSMEEAETLCDRLCIMVDGKLQCIGTPKELIARYGGYYVLTMTTLPEFEQEVEDLVRRLSPSSRKVYHLSGTQKHELPKQEARISDVFMAVESFKKRVEVQAWGLADTTMEDVFVKVAKGAQSSEELS

SEQ ID NO: 186944 - protein, 962 aa, Zea Mays
MPGRQGMEPASAAARAPRPPSFASQTNALLRKNLIFQKRNRKGTIRLIIVPIYLCLIISVLQRVINSFLDKPKFRCGCKCIDDANGSTAPCQNVCGIQYSTLDQAPSCPIPNPPKWPALVQVPLPEYRAVQDSSGLFTGFPDASCRKTQSCPASIPFAGANTTLSNSIMQNLLTSSPLLNLSDYTSISSLLLGTDVPGSSTGFVEPAFISARPIYVLQPQCKSGDSVTIPITVGSVNAQKAEIKCVQGLPLWRNSSITINEETFRGYRKGKTAKGINEIAMGYDFQDSNENHFNVLTLYNSTYENASFIPMPFALLRIPHSLNAVSNAYLQLIQGSGVKMLLDFTKEMPKQATRLTFDFSAVAGPLFFEWVVVLLFPVMLTYLVYEKQHKLRTMMKMHGLGDGPYWIIYYMYFLIFSTVYLIVFVIFGSIIGVNFFKINDYSIQFVFFFSFINLQIVLAFLASSFFSKVNTAQAIAYLYIFGSGLMAGYLIRNFIEGGKFPRHWITVLEIIPAFSLYRGLYELGQYAVRSSETGSPGMRWSDLNDHMNGMRDVLIIIILEWLVLLPVAYYFDYASSVGHRSSPLSIIKHLLKKDPTWRRITANEIDGKDVHIEMEKVDIIKEREAVDQVLQQQQTSGYAVVCDDLRKVYHGKDGNPDKFAVQGVSLALPYGECLGILGPNGAGKSSFISMMIGFVKPTSGNAFVRGFSIQNDMEKIYSSMGVCPQNDMLWETLTGREHLQFYGRLKGLSGSSLDLVVDESLRSVNLLHGGAPDKQVKKYSGGMRRRLSVAISLIGDAKVVYMDEPSTGLDPASRKSLWSAVKQAKQDRAIILTTHSMEEAETLCDRLCIMVDGKLQCIGTPKELIARYGGYYVLTMTTLPEFEQEVEDLVRRLSPSSRKVYHLSGTQKHELPKQEARISDVFMAVESFKKRVEVQAWGLADTTMEDVFVKVAKGAQSSEELS

SEQ ID NO: 186945 - protein, 152 aa, Zea Mays
MILNQSSNKSTTNTSCTCSRCFPPHSVVTKCVNRRLIKISPLACEPATNKKVSIYWTYVHVHAALHKICIGYIALLSDLLRSGVQRLPHLGYQMDYISKTEPFYVCMNSSSLADPYRTMLPTTTTLPSKQIVLFVHLRRKAHLTILGAHTRF

SEQ ID NO: 186946 - protein, 500 aa, Zea Mays
MARAQGLVILTVQARTPSLMPPRCASPGAGGAACEPVSGAKKAVLLAGLYLTALGVGGIKGSLPSHGAEQFDERAPRGRKARSTFFNYFVFCLSCGALVAVTFAVWVEDNRGWEWGFGISSVAILLSVPLFAAGSSLYRNKLPTGSPLTTIAKVLAAAALARRRGGGGGGAQSSSNGAVIDRAPSPAGSADDMDEYCKSGDMEEISISDAASPAAEPSRELALLNRAVQCQPPRHGRRLACTVQEVEDVKVVLMVLPIFLSTIMLNCCLAQLSTFSVEQAATMDTRVGRLTVPPASLPVFPVTFIIVLAPVYDHIIVPFARRVTGTETGITHLQRIGTGLVMSVVAMAVAAAVEVKRKDVASRSGMLEDSGKPLPITFFWIAFQYLFLGSADLFTLAGLLEFFFSEAPPRMRSLATSLSWASLALGYYLSSVLVSVVNSATGRGGHRPWLQGASLNHYRLERFYWVMCVLSSINYLFFLFLAVRYKYRNAGVIKVMRTSL

SEQ ID NO: 186947 - protein, 218 aa, Zea Mays
MGMSAEWRRAGARRRAAPAGVARSTKLRRRRGLHGLRSSGERRRGRAPAMTWASKESEREGASSGREESSMARPIFIERGRGEERAPRRGRGGRRFFKDINGDDINGERVGEGRNERLMLHYAEEKNSLGASRGVARTRGRVLAAAAARTRGQVATAAWARGRDARGTLANGARAAGRGEIPLAAVAGEAEEGAARLAPSGPLGLEFLFSFSISFLIS

SEQ ID NO: 186948 - protein, 94 aa, Zea Mays
MGVQEEKKISTPKNERCYRAARGNTFLKIYRQTADAAVEKLKEANMLTTKSSLVSCASCPAQFASELGRIGGSSDPCSRQFRGWQPCFRIGSSS

SEQ ID NO: 186949 - protein, 94 aa, Zea Mays
MPDPRSLCCPNGYGAFELSNFLEQLLKQPSYSNTQTFLPRSPLYIFLFIFNSYLLLQCFLYKLQLQQLALIRNEQTLHHQSKSRLPEFEFVAPQ

SEQ ID NO: 186950 - protein, 91 aa, Zea Mays
MAFFFAITTPAGITVGSGIASFYNPNSPRALVVEGILDSISAGILIYMALVDLIAADFLSKRMSCNLRLQVGSYIALFLGAMAMASLAIWA

SEQ ID NO: 186951 - protein, 379 aa, Zea Mays
MAGYGEENQNTMSGYEEEEEEEVEEVEEVYEEEEEEEVEEEEEDGEGEADEGAVASEPAAMAAETRSVVGGRGLAKAVGNVDTGGEDGRDADSSGGDASGKIFVGGVAWETTEETFTKHFQKVLEDEHVIDGRTVEVKRTVPKEEMSSKDGPKTKKIFVGGIPPSLTEDKLKEHFSSYGKVVEHQIMLDHSTGRSRGFGFVTFESEDAVERVMSEGRMHDLGGKQVEIKKAEPKKPGVGDSSSNGRHSRGGGHRDSYRGSGGNGFSGNSSGGGYGYSGGYRSTAAAHYGSTAYGAYGRGYGYGGTAGYGLGYGSAYGGSMYGGPYGAYAAYGGAYGGGAYGAPGGYGAGGYGSYGGAGGMGGGGSAGGRGSSRYHPYGK

SEQ ID NO: 186952 - protein, 320 aa, Zea Mays
MLIPVARMGGMQIPVAVTPRETFTKHFQKYGAITDSVIMKDKHTRMPRGFGFVTFSDPSVLDRVLEDEHVIDGRTVEVKRTVPKEEMSSKDGPKTKKIFVGGIPPSLTEDKLKEHFSSYGKVVEHQIMLDHSTGRSRGFGFVTFESEDAVERVMSEGRMHDLGGKQVEIKKAEPKKPGVGDSSSNGRHSRGGGHRDSYRGSGGNGFSGNSSGGGYGYSGGYRSTAAAHYGSTAYGAYGRGYGYGGTAGYGLGYGSAYGGSMYGGPYGAYAAYGGAYGGGAYGAPGGYGAGGYGSYGGAGGMGGGGSAGGRGSSRYHPYGK

SEQ ID NO: 186953 - protein, 196 aa, Zea Mays
MGNGLYSSLAIFFLNLCIFYDQAIRVGGQTADIAAVGTTMFTCIIWAVNMQIALTMSHFTWIQHLFVWGSITTWYLFILAYGMTLRSGDNYQILLEVLGPAPIYWAATLLVTAACNIPYLIHISYQRSCNPLDHHVIQEIKYLKKDVEDQTMWKRERSKARQKTKIGFTARVDAKIKQIRGKLHKKGPSLTIQTVS

SEQ ID NO: 186954 - protein, 599 aa, Zea Mays
MTVILQDEDGQILLFCKGADSIIFDRLAKNGRMYEVDTTRHLNDYGEAGLRTLALSYRVLDESEYSLWNAEFLKAKTYIGPDRELQLERVSELIERELILVGATAVEDKLQKGVPQCIDRLAQAGLKIWVLTGDKMETAINIGYACSLLRQGMKQICLSIPTGEQVAQDAKKVAKESLLSQIANGSQMVKLEKDPDAAFALVIDGKALAFALEDDMKHMFLNLAIECASVICCRVSPKQKALVTRLVKEGIGQTTLAVGDGANDVGMIQEADIGVGISGVEGMQAVMASDFSISQFRFLERLLVVHGHWCYKRIAQMICYFFYKNIAFGLTIFYFEAFAGFSGQSVYDDWFMLLFNVVLTSLPVISLGVFEQDVSSEICLQFPALYQQGPKNLFFDWYRILGWMGNGLYSSLAIFFLNLCIFYDQAIRVGGQTADIAAVGTTMFTCIIWAVNMQIALTMSHFTWIQHLFVWGSITTWYLFILAYGMTLRSGDNYQILLEVLGPAPIYWAATLLVTAACNIPYLIHISYQRSCNPLDHHVIQEIKYLKKDVEDQTMWKRERSKARQKTKIGFTARVDAKIKQIRGKLHKKGPSLTIQTVS

SEQ ID NO: 186955 - protein, 1056 aa, Zea Mays
MGRSGRRRRDRVRWSNLYTFSCFRAQQEHAGDAGPSSDGAGAVGGPGFSRVVYCNNAALQKPLKYITNYITTTKYNIITFFPKAIFEQFRRVANLYFLLTAILSLTPVCPFSPVSMIAPLAFVVGLSMMKEGLEDWRRFIQDMKVNNRYVSTHKGDGEFDYRHWEDLCVGDVVRVEKDQFFPADLLLLSSSYEDGICYVETMNLDGETNLKVKRSLEVTLPLEEDESFKDFQAVIRCEDPNPSLYTFTGNFEYERQVYALDPSQILLRDSKLRNTAFIYGVVIFTGHDSKVMQNSTESPSKRSRIEKKMDLIIYILFTVLVLISLISSIGFAVRIKLDLPRWWYLQPEKSNKLDDPSRPALSGIFHLITALILYGYLIPISLYVSIELVKVLQAHFINQDIHMFDEDTGNTAQARTSNLNEELGQVHTILSDKTGTLTCNQMDFLKCSIAGVSYGVGSSEVERAAAKHMASGADDHDIPLQDIWEENNDDEIELVGVNFSVGTNIKPSIKGFSFVDDRLMQGNWTKEPNSSTILLFFRILALCHTAIPEINEATGSIAYEAESPDEGAFLVAAREFGFEFFKRTQSSVFVREKHTSSKDTVEREFKILNLLEFSSKRKRMTVILQDEDGQILLFCKGADSIIFDRLAKNGRMYEVDTTRHLNDYGEAGLRTLALSYRVLDESEYSLWNAEFLKAKTYIGPDRELQLERVSELIERELILVGATAVEDKLQKGVPQCIDRLAQAGLKIWVLTGDKMETAINIGYACSLLRQGMKQICLSIPTGEQVAQDAKKVAKESLLSQIANGSQMVKLEKDPDAAFALVIDGKALAFALEDDMKHMFLNLAIECASVICCRVSPKQKALVTRLVKEGIGQTTLAVGDGANDVGMIQEADIGVGISGVEGMQAVMASDFSISQFRFLERLLVVHGHWCYKRIAQMHSLGFLVNLYTMIGLCCFSMLFLPHFLLYHSEYLSKTFHPKSAYSSQHYTSKGQRIFSLIGTGSLDGWGMASTPLWPYSSSISAYSMIRQSVLGGRLQTLLRWELPCSPASSGLSTCRLP

SEQ ID NO: 186956 - protein, 295 aa, Zea Mays
MLQHRMGCVILSFLEKLHRRYVVKRNQRKRQREEDLKKEEKSSEKRSKTTHETTKTESVDNPGGSFKMTKEGEEKMSTDQSANVHAELSKEGQIKLGTDHPIANHGEPAKGGDENMEEDPEYEEDPEEVEVYEDDEDMDDAHAEEQIAEQNENTNDREIKPKEVATTDGGNNKSTRQPEVENVTNIHERAASMEEKQSVPEIGDLVGGGEKVVSKEIKPAKDEVIDKDLLQAFRYFDINGAGYLKVDDLKCILHNMGKFLSSRDVKDLVQIALVESNSARDNRIIYPKLVKIVDL

SEQ ID NO: 186957 - protein, 1087 aa, Zea Mays
MFPPKGPNHYGQPPPYGGQQPYSQIPSSTGFAAPTAAGGTDGGRFGGRGGQGAAAQYGGPYASVYGTQQVGGLGGKGPASSSLPSLPNRPTSLTESSKFTSAPVGSGLARPNDDYMAVRGYAQKQDQYGTDYPLERRMYGEHSANLGRRDGLSDLDRRYTDQIAAGHQSSSMRHQQLLKGQLQPGSDTRHRSPVKEIKREYICKVFPFRFVDDERDYLSLTKRYPRLAITPEFSKIVLNWAKENLNLPLDTPVSLEHDIHDSDDGADEGAIISTEKTSSFNTPATIWNAKVLLMSGMSKGAFANITSLRSTEERVVHLNNILKFAVFKKDRSLFAIGGPWNADIDGGDPSADCSCLIRTAIRCVKETVHVDLSSCTHWNRFVEVHYNRIGKDGLFSHKEITVLFVPNLLECLPSVDIWKNNWILYKKSKAEREQLTVKKSPGDPKEQMQGELNDGKNLDADQLKEADVGCSDMKNEKDDVDIKQQGNDGEGTGKVEEPVQKMGGDVEGKSTGDSSIDHATTGDKKPTKKKIIKKVVKVVRKKITGPSVDKSSEDKIVVAESANKTAEGGQSQQKNDDAGKQQEGAGISQQPEAKKTVKKKIIRRIVKRKVSGSGSQLNTPTTPAETSRQEAEVQPEKNVESSADVGNSQTKLQEGSKIPSEDISNQKKEEKPAEKEHPLTDLSLNADKGNHKEAFEQKDMKNDGKKDKTKDDKEKNRDLKMDLKQKLPLDTQEKKRSDEPPKYPGFILQAKRNTESKLRLTSLSLHGLLDYTAKDIEESVFELSLFAESFSEMLQHRMGCVILSFLEKLHRRYVVKRNQRKRQREEDLKKEEKSSEKRSKTTHETTKTESVDNPGGSFKMTKEGEEKMSTDQSANVHAELSKEGQIKLGTDHPIANHGEPAKGGDENMEEDPEYEEDPEEVEVYEDDEDMDDAHAEEQIAEQNENTNDREIKPKEVATTDGGNNKSTRQPEVENVTNIHERAASMEEKQSVPEIGDLVGGGEKVVSKEIKPAKDEVIDKDLLQAFRYFDINGAGYLKVDDLKCILHNMGKFLSSRDVKDLVQIALVESNSARDNRIIYPKLVKIVDL

SEQ ID NO: 186958 - protein, 640 aa, Zea Mays
MQGELNDGKNLDADQLKEADVGCSDMKNEKDDVDIKQQGNDGEGTGKVEEPVQKMGGDVEGKSTGDSSIDHATTGDKKPTKKKIIKKVVKVVRKKITGPSVDKSSEDKIVVAESANKTAEGGQSQQKNDDAGKQQEGAGISQQPEAKKTVKKKIIRRIVKRKVSGSGSQLNTPTTPAETSRQEAEVQPEKNVESSADVGNSQTKLQEGSKIPSEDISNQKKEEKPAEKEHPLTDLSLNADKGNHKEAFEQKDMKNDGKKDKTKDDKEKNRDLKMDLKQKLPLDTQEKKRSDEPPKYPGFILQAKRNTESKLRLTSLSLHGLLDYTAKDIEESVFELSLFAESFSEMLQHRMGCVILSFLEKLHRRYVVKRNQRKRQREEDLKKEEKSSEKRSKTTHETTKTESVDNPGGSFKMTKEGEEKMSTDQSANVHAELSKEGQIKLGTDHPIANHGEPAKGGDENMEEDPEYEEDPEEVEVYEDDEDMDDAHAEEQIAEQNENTNDREIKPKEVATTDGGNNKSTRQPEVENVTNIHERAASMEEKQSVPEIGDLVGGGEKVVSKEIKPAKDEVIDKDLLQAFRYFDINGAGYLKVDDLKCILHNMGKFLSSRDVKDLVQIALVESNSARDNRIIYPKLVKIVDL

SEQ ID NO: 186959 - protein, 546 aa, Zea Mays
MKFKFHGISIDLLYASVSLLVVPADLDISQGSVLYDVDEATVRSLNGCRVADQIIRLVPNFENFRTALRCLKYWAKRRGVYSNVTGFLGGVNWALLVARVCQLYPNAVPSMLVSRFFRVFTQWQWPNPVMLCSIEEEELGFPVWDPRKNPRDRCHHMPIITPAYPCMNSSYNVSTSTLRVMLEQFQFGNRICQEIEMNKTSWPALFEPFQFFEAYKNYLQVDIIAEDDEDLRLWKGWVESRLRQLTLKIERDTYGMLQCHPYPHEYADPSRQCAHCAFFMGLSRKEGVKIQEGQQFDIRGTVDEFRHEINMYMFWKPGMELAVSHVRRKQVPAYVFPEGYKRPRPSRHVNHQSDKNDTEDGTATRSPDSQLKRKHDSVGTDDIRYAKRSSTSPVHPKNSPQSGSTGDETRCNNQIKRAPSDASGGSPASPQASERSPDTILSAPRCTTTGAVCSGDAISKHSSVPLVENCTTPTVAVCTTLKRVAEKVVSELVGSERLGSNNSAELLESMEKEDVLAENVRFGGNGVAQGGLPEELEPNNRIEAVS

SEQ ID NO: 186960 - protein, 686 aa, Zea Mays
MASGSDAPKQYGITKPLSLLGPVEADLQRTEELEKFLLESGLYESPDESARREEVLGKLDQIVKDWVKQLTSQRGYTDQMVEEANAVLFTFGSYRLGVHGPGADIDTLCVGPSYVNREEDFFIVLHGILAQTEDVTELQPVPDAHVPVMKFKFHGISIDLLYASVSLLVVPADLDISQGSVLYDVDEATVRSLNGCRVADQIIRLVPNFENFRTALRCLKYWAKRRGVYSNVTGFLGGVNWALLVARVCQLYPNAVPSMLVSRFFRVFTQWQWPNPVMLCSIEEEELGFPVWDPRKNPRDRCHHMPIITPAYPCMNSSYNVSTSTLRVMLEQFQFGNRICQEIEMNKTSWPALFEPFQFFEAYKNYLQVDIIAEDDEDLRLWKGWVESRLRQLTLKIERDTYGMLQCHPYPHEYADPSRQCAHCAFFMGLSRKEGVKIQEGQQFDIRGTVDEFRHEINMYMFWKPGMELAVSHVRRKQVPAYVFPEGYKRPRPSRHVNHQSDKNDTEDGTATRSPDSQLKRKHDSVGTDDIRYAKRSSTSPVHPKNSPQSGSTGDETRCNNQIKRAPSDASGGSPASPQASERSPDTILSAPRCTTTGAVCSGDAISKHSSVPLVENCTTPTVAVCTTLKRVAEKVVSELVGSERLGSNNSAELLESMEKEDVLAENVRFGGNGVAQGGLPEELEG

SEQ ID NO: 186961 - protein, 93 aa, Zea Mays
MRIVSWNTGGTYSKQASKISGSKYFLARSVQNLERQPYDIGKNAVQYKSERRAAMEAEGFKILGNSGDQWSDLIGSPMATRSFKLPNPMYFIS

SEQ ID NO: 186962 - protein, 118 aa, Zea Mays
MVVVLFYLPVHKWIIRHIYFPCIRKGFSRGVAILISFLVSAVFHEICIAVPCHIFKFWAFSGIMFQIPLVFLTRYLHATFKHVMVGNMIFWFFSIVGQPMCVLLYYHDVMNRQAQASR

SEQ ID NO: 186963 - protein, 197 aa, Zea Mays
MGFIIEQYINPIVKNSKHPLKGNFLNAIERVLKLSVPTLYVWLCMFYCFFHLWLNIVAELLCFGDREFYKDWWNAKTVEEYWRMWNMPVHKWIIRHIYFPCIRKGFSRGVAILISFLVSAVFHEICIAVPCHIFKFWAFSGIMFQIPLVFLTRYLHATFKHVMVGNMIFWFFSIVGQPMCVLLYYHDVMNRQAQASR

SEQ ID NO: 186964 - protein, 287 aa, Zea Mays
MFLASIMWMKLVSYAHTNYDIRVLSKSTEKGAAYGNYVDPENMKDPTFKSLVYFMLAPTLCYQPTYPQTTCIRKGWVTQQLIKCVVFTGLMGFIIEQYINPIVKNSKHPLKGNFLNAIERVLKLSVPTLYVWLCMFYCFFHLWLNIVAELLCFGDREFYKDWWNAKTVEEYWRMWNMPVHKWIIRHIYFPCIRKGFSRGVAILISFLVSAVFHEICIAVPCHIFKFWAFSGIMFQIPLVFLTRYLHATFKHVMVGNMIFWFFSIVGQPMCVLLYYHDVMNRQAQASR

SEQ ID NO: 186965 - protein, 373 aa, Zea Mays
MKYGLLIRAGFWFSARSLGDWPLLMCCLTLPVFPLVALMAEKLITRKLIGEHVVILLHIIITTSAIVYPVVVTLKCDSAVLSGFVLMFLASIMWMKLVSYAHTNYDIRVLSKSTEKGAAYGNYVDPENMKDPTFKSLVYFMLAPTLCYQPTYPQTTCIRKGWVTQQLIKCVVFTGLMGFIIEQYINPIVKNSKHPLKGNFLNAIERVLKLSVPTLYVWLCMFYCFFHLWLNIVAELLCFGDREFYKDWWNAKTVEEYWRMWNMPVHKWIIRHIYFPCIRKGFSRGVAILISFLVSAVFHEICIAVPCHIFKFWAFSGIMFQIPLVFLTRYLHATFKHVMVGNMIFWFFSIVGQPMCVLLYYHDVMNRQAQASR

SEQ ID NO: 186966 - protein, 342 aa, Zea Mays
MAPPPSMPAASDRAGPGRDAGDSSSLRLRRAPSADAGDLAGDSSVGLRENGEPQPPTNPPPQEQQQQHEMLYYRASAPAHRRVKESPLSSDAIFRQSHAGLLNLCIVVLIAVNSRLIIENLMKYGLLIRAGFWFSARSLGDWPLLMCCLTLPVFPLVALMAEKLITRKLIGEHVVILLHIIITTSAIVYPVVVTLKCDSAVLSGFVLMFLASIMWMKLVSYAHTNYDIRVLSKSTEKGAAYGNYVDPENMKDPTFKSLVYFMLAPTLCYQPTYPQTTCIRKGWVTQQLIKCVVFTGLMGFIIEQYINPIVKNSKHPLKGNFLNAIERVLKLSVPTLYAEHCS

SEQ ID NO: 186967 - protein, 406 aa, Zea Mays
MAPPPSMPAASDRAGPGRDAGDSSSLRLRRAPSADAGDLAGDSSVGLRENGEPQPPTNPPPQEQQQQHEMLYYRASAPAHRRVKESPLSSDAIFRQSHAGLLNLCIVVLIAVNSRLIIENLMKYGLLIRAGFWFSARSLGDWPLLMCCLTLPVFPLVALMAEKLITRKLIGEHVVILLHIIITTSAIVYPVVVTLKCDSAVLSGFVLMFLASIMWMKLVSYAHTNYDIRVLSKSTEKGAAYGNYVDPENMKDPTFKSLVYFMLAPTLCYQPTYPQTTCIRKGWVTQQLIKCVVFTGLMGFIIEQYINPIVKNSKHPLKGNFLNAIERVLKLSVPTLYVWLCMFYCFFHLWLNIVAELLCFGDREFYKDWWNAKTVEEYWRMWNMPVHKWIIRHIYFPCIRKGFSRN

SEQ ID NO: 186968 - protein, 492 aa, Zea Mays
MAPPPSMPAASDRAGPGRDAGDSSSLRLRRAPSADAGDLAGDSSVGLRENGEPQPPTNPPPQEQQQQHEMLYYRASAPAHRRVKESPLSSDAIFRQSHAGLLNLCIVVLIAVNSRLIIENLMKYGLLIRAGFWFSARSLGDWPLLMCCLTLPVFPLVALMAEKLITRKLIGEHVVILLHIIITTSAIVYPVVVTLKCDSAVLSGFVLMFLASIMWMKLVSYAHTNYDIRVLSKSTEKGAAYGNYVDPENMKDPTFKSLVYFMLAPTLCYQPTYPQTTCIRKGWVTQQLIKCVVFTGLMGFIIEQYINPIVKNSKHPLKGNFLNAIERVLKLSVPTLYVWLCMFYCFFHLWLNIVAELLCFGDREFYKDWWNAKTVEEYWRMWNMPVHKWIIRHIYFPCIRKGFSRGVAILISFLVSAVFHEICIAVPCHIFKFWAFSGIMFQIPLVFLTRYLHATFKHVGNMIFWFFSIVGQPMCVLLYYHDVMNRQAQASR

SEQ ID NO: 186969 - protein, 302 aa, Zea Mays
MLMYPTGTANLHKSYRVLWINPDVSSYSETLSTLKFAERVSGVELGASKANKEGKDIREFMEQLSLLKHKMAKKDDEINRLQQLKTQTPRVRTAKRADSPLKHSSSSPGISNLGSKIQHRRTVSSGKAMSIASRAGSDTFSDTSDRHSESGSMQSVDDILPRRGIMGLPKLSIGEMGQNSADPELVCFDYADSEERLSDISDSGLSMGTETDVSVSSIVELTRFQEQENIPSTLKEQESARKIPNDQLSKVATRVQKTTVPKLAQTSLWPKLRDPPALRSPGRITTQTISVPRTSMTSKRWT

SEQ ID NO: 186970 - protein, 420 aa, Zea Mays
MDWSLLRTSSFSFNSYTLEIMNASQPNGLVVPDATVHPVNSTSDVIELMRIGHANRAVGSTMLNERSSRSHSIVTIHIRGVDLKTGATLCGALHLVDLAGSERVDRSSVTGNRLKEAQHINKSLSALGDVIFSLPQKNAHVPYRNSKLTQVLQSSLGGHAKTLMFVQINPDVSSYSETLSTLKFAERVSGVELGASKANKEGKDIREFMEQLSLLKHKMAKKDDEINRLQQLKTQTPRVRTAKRADSPLKHSSSSPGISNLGSKIQHRRTVSSGKAMSIASRAGSDTFSDTSDRHSESGSMQSVDDILPRRGIMGLPKLSIGEMGQNSADPELVCFDYADSEERLSDISDSGLSMGTETDVSVSSIVELTRFQEQENIPSTLKEQESARKIPNDQLENHNTNNICTKDVHDFEEMDISQV

SEQ ID NO: 186971 - protein, 450 aa, Zea Mays
MDWSLLRTSSFSFNSYTLEIMNASQPNGLVVPDATVHPVNSTSDVIELMRIGHANRAVGSTMLNERSSRSHSIVTIHIRGVDLKTGATLCGALHLVDLAGSERVDRSSVTGNRLKEAQHINKSLSALGDVIFSLPQKNAHVPYRNSKLTQVLQSSLGGHAKTLMFVQINPDVSSYSETLSTLKFAERVSGVELGASKANKEGKDIREFMEQLSLLKHKMAKKDDEINRLQQLKTQTPRVRTAKRADSPLKHSSSSPGISNLGSKIQHRRTVSSGKAMSIASRAGSDTFSDTSDRHSESGSMQSVDDILPRRGIMGLPKLSIGEMGQNSADPELVCFDYADSEERLSDISDSGLSMGTETDVSVSSIVELTRFQEQENIPSTLKEQESARKIPNDQLSKVATRVQKTTVPKLAQTSLWPKLRDPPALRSPGRITTQTISVPRTSMTSKRWT

SEQ ID NO: 186972 - protein, 288 aa, Zea Mays
MFVQINPDVSSYSETLSTLKFAERVSGVELGASKANKEGKDIREFMEQLSLLKHKMAKKDDEINRLQQLKTQTPRVRTAKRADSPLKHSSSSPGISNLGSKIQHRRTVSSGKAMSIASRAGSDTFSDTSDRHSESGSMQSVDDILPRRGIMGLPKLSIGEMGQNSADPELVCFDYADSEERLSDISDSGLSMGTETDVSVSSIVELTRFQEQENIPSTLKEQESARKIPNDQLSKVATRVQKTTVPKLAQTSLWPKLRDPPALRSPATKLVDASRVTIGAATKDSTIS

SEQ ID NO: 186973 - protein, 67 aa, Zea Mays
MWQWRVGSTAASPEHHDDGIHGDLRSSTSERGWKGMRGNIHGGRKAECRQARMEGERGPGATMEGGH

SEQ ID NO: 186974 - protein, 98 aa, Zea Mays
MQDQFSGPLQRCNPWVLYFSEIRKIISNFNLNHNCCEMAHRVQGSSYRDHFLVDMYLVCTLIVRVLKRHHLEHAHSKEVDVHQLVVLLVQLWCHKLRY

SEQ ID NO: 186975 - protein, 71 aa, Zea Mays
MRPCRRGGLPYEILGGDLNGIVGCLRKRSGGRAGCGAAGGMRVGVRSRAGCGLRVAERQNHRCGRLCYSHN

SEQ ID NO: 186976 - protein, 106 aa, Zea Mays
MLMDKLKDGWPDQVPGQGRSSRDRRLTNTDLVLFQVLLCAAVDGVKCRWARPSYKSKIIDERRRRLKSDVVEMLTCIKDWEDDEARMQHMVYDKELEETFENLYID

SEQ ID NO: 186977 - protein, 509 aa, Zea Mays
MKHVVVVSKRIVTTLQDVQLNSVVLVVHKTIKYQAPVYVEQPRQQQVPPPQRQPRRPPAQFQQLEYEGMAILMHGVEEEGVGVEGAGVEVATVAMVDMETTKVAIIRVVGIMTIKVVIMAMIIKVDIVAMIIKVDMVVDMAINKADMGTIKKMVDITETQEVVCEEDAIGVTKEREPLGGRLQLRECELSRGSLNDDDGRIWLPYDVANSIPECSSIPNFPALYGNLRTEVRINDLADMLQRIGVRKLSGHDIVKNHIMVSLRNGLDANVADIVIREYVVKVEKTLSQVDSILAGGLSLADVSTKQCTVYDWESPELSRILSIFSSKRCKEKCVYLLEVLDRFWDDHYRAKSRIFTDATHCGENRAVESSFMKCIQSFKWIASRMDEDLHYATDLFYDCENVRSLFGSVAPYVVSQVSSSSLKKAIGFKTEVSYCDALMVLKSWITSKVPFRASMSQMWKFYTLLSEGVADAKIDIKREFMSSPSIFTPLQRPRASTLVDHVIWRTRTE

SEQ ID NO: 186978 - protein, 286 aa, Zea Mays
MLQRIGVRKLSGHDIVKNHIMVSLRNGLDANVADIVIREYVVKVEKTLSQVDSILAGGLSLADVSTKQCTVYDWESPELSRILSIFSSKRCKEKCVYLLEVLDRFWDDHYRAKSRIFTDATHCGENRAVESSFMKCIQSFKWIASRMDEDLHYATDLFYDCENVRSLFGSVAPYVVSQVSSSSLKKAIGFKTEVSYCDALMVLKSWITSKVPFRASMSQMWKFYTLLSEGVADAKIDIKREFMSSPSIFTPLQRPRASEFMSSPSILPLKFLFTRSTVTRQNSQKC

SEQ ID NO: 186979 - protein, 341 aa, Zea Mays
MKHVVVVSKRIVTTLQDVQLNSVVLVVHKTIKYQAPVYVEQPRQQQVPPPQRQPRRPPAQFQQLEYEGMAILMHGVEEEGVGVEGAGVEVATVAMVDMETTKVAIIRVVGIMTIKVVIMAMIIKVDIVAMIIKVDMVVDMAINKADMGTIKKMVDITETQEVVCEEDAIGVTKEREPLGGRLQLRECELSRGSLNDDDGRIWLPYDVANSIPECSSIPNFPALYGNLRTEVRINDLADMLQRIGVRKLSGHDIVKNHIMVSLRNGLDANVADIVIREYCMTGSHQNYLEFYQYFLQKDARKNVYIFWKFLIDSGMIIIGQNLGSSQMLHIVVKTEQLNHHL

SEQ ID NO: 186980 - protein, 223 aa, Zea Mays
MKHVVVVSKRIVTTLQDVQLNSVVLVVHKTIKYQAPVYVEQPRQQQVPPPQRQPRRPPAQFQQLEYEGMAILMHGVEEEGVGVEGAGVEVATVAMVDMETTKVAIIRVVGIMTIKVVIMAMIIKVDIVAMIIKVDMVVDMAINKADMGTIKKMVDITETQEVVCEEDAIGVTKEREPLGGRLQLRECELSRGSLNDDGPLRFRVITRDSCHRNRMRARDPYGL

SEQ ID NO: 186981 - protein, 496 aa, Zea Mays
MKHVVVVSKRIVTTLQDVQLNSVVLVVHKTIKYQAPVYVEQPRQQQVPPPQRQPRRPPAQFQQLEYEGMAILMHGVEEEGVGVEGAGVEVATVAMVDMETTKVAIIRVVGIMTIKVVIMAMIIKVDIVAMIIKVDMVVDMAINKADMGTIKKMVDITETQEVVCEEDAIGVTKEREPLGGRLQLRECELSRGSLNDDDGRIWLPYDVANSIPECSSIPNFPALYGNLRTEVRINDLADMLQRIGVRKLSGHDIVKNHIMVSLRNGLDANVADIVIREYVVKVEKTLSQVDSILAGGLSLADVSTKQCTVYDWESPELSRILSIFSSKRCKEKCVYLLEVLDRFWDDHYRAKSRIFTDATHCGENRAVESSFMKCIQSFKWIASRMDEDLHYATDLFYDCENVRSLFGSVAPYVVSQVSSSSLKKAIGFKTEVSYCDALMVLKSWITSKVPFRASMSQMWKFYTLLSEGVADAKIDIKREFMSSPSIFTPLQRPRAI

SEQ ID NO: 186982 - protein, 538 aa, Zea Mays
MTRHVSMISITLSPRELDKHTPGYQAPVYVEQPRQQQVPPPQRQPRRPPAQFQQLEYEGMAILMHGVEEEGVGVEGAGVEVATVAMVDMETTKVAIIRVVGIMTIKVVIMAMIIKVDIVAMIIKVDMVVDMAINKADMGTIKAMTHFDKLIQKMVDITETQEVVCEEDAIGVTKEGRLSAGCSLGLVKREPLGGRLQLRECELSRGSLNDDDGRIWLPYDVANSIPECSSIPNFPALYGNLRTEVRINDLADMLQRIGVRKLSGHDIVKNHIMVSLRNGLDANVADIVIREYVVKVEKTLSQVDSILAGGLSLADVSTKQCTVYDWESPELSRILSIFSSKRCKEKCVYLLEVLDRFWDDHYRAKSRIFTDATHCGENRAVESSFMKCIQSFKWIASRMDEDLHYATDLFYDCENVRSLFGSVAPYVVSQVSSSSLKKAIGFKTEVSYCDALMVLKSWITSKVPFRASMSQMWKFYTLLSEGVADAKIDIKREFMSSPSIFTPLQRPRASEFMSSPSILPLKFLFTRSTVTRQNSQKC

SEQ ID NO: 186983 - protein, 537 aa, Zea Mays
MKHVVVVSKRIVTTLQDVQLNSVVLVVHKTIKYQAPVYVEQPRQQQVPPPQRQPRRPPAQFQQLEYEGMAILMHGVEEEGVGVEGAGVEVATVAMVDMETTKVAIIRVVGIMTIKVVIMAMIIKVDIVAMIIKVDMVVDMAINKADMGTIKKMVDITETQEVVCEEDAIGVTKEGRLSAGCSLGLVKREPLGGRLQLRECELSRGSLNDDDGRIWLPYDVANSIPECSSIPNFPALYGNLRTEVRINDLADMLQRIGVRKLSGHDIVKNHIMVSLRNGLDANVADIVIREYVVKVEKTLSQVDSILAGGLSLADVSTKQCTVYDWESPELSRILSIFSSKRCKEKCVYLLEVLDRFWDDHYRAKSRIFTDATHCGENRAVESSFMKCIQSFKWIASRMDEDLHYATDLFYDCENVRSLFGSVAPYVVSQVSSSSLKKAIGFKTEVSYCDALMVLKSWITSKVPFRASMSQMWKFYTLLSEGVADAKIDIKREFMSSPSIFTPLQRPRASEFMSSPSILPLKFLFTRSTVTRQNSQKC

SEQ ID NO: 186984 - protein, 148 aa, Zea Mays
MKHVVVVSKRIVTTLQDVQLNSVVLVVHKTIKYQAPVYVEQPRQQQVPPPQRQPRRPPAQFQQLEYEDSYARGRGRGRGRGRGWGRGGYGGYGGYGNNQGGYHQGGGYYDNQENGGYNRDPGSGMRGRCNWGYQGARTPWWPPPAARM

SEQ ID NO: 186985 - protein, 174 aa, Zea Mays
MHGVEEEGVGVEGAGVEVATVAMVDMETTKVAIIRVVGIMTIKVVIMAMIIKVDIVAMIIKVDMVVDMAINKADMGTIKAMTHFDKLIQKMVDITETQEVVCEEDAIGVTKEGRLSAGCSLGLVKREPLGGRLQLRECELSRGSLNDDGPLRFRVITRDSCHRNRMRARDPYGL

SEQ ID NO: 186986 - protein, 201 aa, Zea Mays
MGSVVFVLGVRDLGESGATREFCGRLKKTRSWVAHATMLRDEELARHGNDWRPHSSGGARFCLPQRPRSSPTPQSSPTRGSPTILPTTAATIIAHARIPHDPPYRRRNQRPRGSSPRSPPRTPPPFHRRPESIDPKLPLELELYPTHERDPDAHGGLGSSRRTGCLAPADVVEAARHPHPCGVNNHVRQAADAVDDCLRPI

SEQ ID NO: 186987 - protein, 111 aa, Zea Mays
MATGRPVRLVLDASLLLDPSSTREAAAVALRPGVEELLRRLRYSNLNVAICYAEGMPTNEMLYLSTLLLHPSEVVSSEVHIDSICFLLPYLPIMAHGVSILSCHLQRMASC

SEQ ID NO: 186988 - protein, 105 aa, Zea Mays
MFKGWPESQEQNLGVGDWHLPPLSHGHRAARTTRAGCLPPPRPLLHQGGGGGGSAARGRGAVAAVALLQPECVFASSCHTYPSWPMGCLSYHAIFKEWHHVNKNE

SEQ ID NO: 186989 - protein, 60 aa, Zea Mays
MFKGWPGISFFLSLFNCCRIANLELQIATAIRIQLYILCCSEQPIGHRTNNLMFMMKKKK

SEQ ID NO: 186990 - protein, 88 aa, Zea Mays
MPSFNTSARELNWLALARSFIEPEKTLLELVLSTVSGSEEHPRLGLCSHGSRIARQACIARPLRRREMAAPAAPPPQHPRVPGRGVDG

SEQ ID NO: 186991 - protein, 96 aa, Zea Mays
MLIKIYITKMLLFEPARELNWLALARSFIEPEKTLLELVLSTVSGSEEHPRLGLCSHGSRIARQACIARPLRRREMAAPAAPPPQHPRVPGRGVDG

SEQ ID NO: 186992 - protein, 577 aa, Zea Mays
MLISQIAQMKPLDGSNYHSWREDIDMITTVGEIDYALRFDKPVEPTVGTPNYDHRWMQYSIDKVKWERSNDKCMIILKRSIKEPLKSSIPECETAKEYLERVASHHQGSSKAYACSLMTEFVNAKYDGNGVRPFIQKMISIVAKINKYLGSPLHEEFVVFMIMKSLPKEFETFHIQYNTSVTDKWNIDQLLAQCVQEEERLKQTGDSVNLIKGNVPRQNKNSKKKFKKQGKQNNQASSSNNNQPRQGGSFSVPPDTCLYCKKTGHYKRKCPEFLQYLLESGKDQVTFVNESLYLEYPSYSWWIDSGATVHVANSLQGLRTSQRLPKGQRTIRVANGVEAAVEAIGDIHLKLVNGFVLLLRDVLYVPSLRRNLISVSRLDDQHIHCHFGDRQCVIQFDNKDVGLAIRRDMLYLLSQSDVVNVLDIPENDPANSGRKRKRSDGETSSKLWHYRLGHISRGRIESLVKEQILHPLDFTDLEQCRDCIKGKFAKQIKKDAKHSTRVLEIIHTDICGPFPVRTVDGFNSFITFTDDYSRYGYIYPIKERSEALDKFKQFKAEVENQHDLKIKIVRSDRGGEY

SEQ ID NO: 186993 - protein, 82 aa, Zea Mays
MGARHAREWFAEIGGGGLSLAGTQLSSAVLFFHLICCKFSSAENLFCYGFFGVDFWELNLLQIFMQIFGNYGFDSFFGTSKP

SEQ ID NO: 186994 - protein, 377 aa, Zea Mays
MATALGGGPNPTADAMEVDPPRASADEKHVATIIAGGSDAVTGHIISTTIGGKNGEPKRTISYMAERVVGTGSFGVVFQAKCIETGETVAIKKVLQDKRYKNRELQIMRSIDHCNVISLKHCFFSTTSRDELFLNLVMEFVPESLYRVLKHYKDMKQRMPLIYVKLYMYQIFRGLAYIHTVPGICHRDIKPQNILVDPLSHQVKVCDFGSAKILIKGEANISYICSRYYRAPELIFGATEYTTSIDIWSAGCVLAELLLSQPLFPGESAVDQLVEIIKVLGTPTREEIRCMNPNYTEFKFPQIKACPWHKIFHKRMPPEAIDLVSRLLQYSPNLRCSALEACAHSFFDELRESHARLPNGRPFPPLFNFKQEVSVLV

SEQ ID NO: 186995 - protein, 215 aa, Zea Mays
MLAFPLSCCFGSCPKPDGMCSTSCLHVATIIAGGSDAVTGHIISTTIGGKNGEPKRTISYMAERVVGTGSFGVVFQAKCIETGETVAIKKVLQDKRYKNRELQIMRSIDHCNVISLKHCFFSTTSRDELFLNLVMEFVPESLYRVLKHYKDMKQRMPLIYVKLYMYQVGSGRIAFYLDMHVLEEVFNIFTFFISCADIPGTSLYSYCTRNLSPRY

SEQ ID NO: 186996 - protein, 255 aa, Zea Mays
MATALGGGPNPTADAMEVDPPRASADEKHVATIIAGGSDAVTGHIISTTIGGKNGEPKRTISYMAERVVGTGSFGVVFQAKCIETGETVAIKKVLQDKRYKNRELQIMRSIDHCNVISLKHCFFSTTSRDELFLNLVMEFVPESLYRVLKHYKDMKQRMPLIYVKLYMYQIFRGLAYIHTVPGICHRDIKPQNILVDPLSHQVKVCDFGSAKILLDVFLLSFFLVNHYFLGKVLWTSWLRLSRFWAPQHERKFVV

SEQ ID NO: 186997 - protein, 379 aa, Zea Mays
MATALGGGPNPTADAMEVDPPRASADEKHVATIIAGGSDAVTGHIISTTIGGKNGEPKRTISYMAERVVGTGSFGVVFQAKCIETGETVAIKKVLQDKRYKNRELQIMRSIDHCNVISLKHCFFSTTSRDELFLNLVMEFVPESLYRVLKHYKDMKQRMPLIYVKLYMYQIFRGLAYIHTVPGICHRDIKPQNILVDPLSHQVKVCDFGSAKILIKGEANISYICSRYYRAPELIFGATEYTTSIDIWSAGCVLAELLLSQPLFPGESAVDQLVEIIKVLGTPTREEIRCMNPNYTEFKFPQIKACPWHKIFHKRMPPEAIDLVSRLLQYSPNLRCSALEACAHSFFDELRESHARLPNGRPFPPLFNFKQEIACLKEE

SEQ ID NO: 186998 - protein, 366 aa, Zea Mays
MHPGGGPLSVPPGFRFHPTDEELLYYYLRKKVSYEPIDLDVIREIDLNQLEPWDLKERCRIGTGHQNEWYFFSHKDKKYPTGTRTNRATTAGFWKATGRDKAIFLGNASRRIGLRKTLVFYIGRAPHGKKTDWIMHEYRLDQENVEIQEDGWVVCRVFKKKSYHQRGLNPAEMAAALDDDELQPFPVPIPGSSLQPTEHKTNPTHLMQYDYPSFDPSMQLPQLMSDDQEQEQPVRPTLLPGHPGVAMASMSSLNIECSQNLTKLTSNGSDEMLHVGHGGGAGGGVVVDRFAGTTTDWSILDKLLASHQNLDRLFHGKVVTTASASPMAVPVYHQQLMELGGSSSSLQRLPLQYLGGETADLLRVAC

SEQ ID NO: 186999 - protein, 264 aa, Zea Mays
MIQCSICEDWFHGDHIGLNSIEEIPRDEEGEPLYEELICHKCSSVCHFLKLYPDTIWASGKPNLAVETDASDSNVMKKPSGHADPEKHENGALVDNTVGEKTSVENDSTKAIAVPEEANLGSSSGNNCKLGVDVNTMPAITDKSEPFFMSKGWRETLCRCETCFNFYAQRGIAYLIDKEDSIEEYEKIAKQKREMKLEQQQGAETNFLNSLNHVQKIEMISGINDMKNEFQSFLESFDASKPVTSDDIHSFFENLAKKKKQRLS

SEQ ID NO: 187000 - protein, 359 aa, Zea Mays
MADTGRDAFPDEAEPAFTLDEYMEDIEAVELIVELWTKRKFRCDCGNSKFGGHLCKLCPEKDYENSANTYNHNFKGSYCTCGRPYPDPEAKEQVEMIQCSICEDWFHGDHIGLNSIEEIPRDEEGEPLYEELICHKCSSVCHFLKLYPDTIWASGKPNLAVETDASDSNVMKKPSGHADPEKHENGALVDNTVGEKTSVENDSTKAIAVPEEANLGSSSGNNCKLGVDVNTMPAITDKSEPFFMSKGWRETLCRCETCFNFYAQRGIAYLIDKEDSIEEYEKIAKQKREMKLEQQQGAETNFLNSLNHVQKIEMISGINDMKNEFQSFLESFDASKPVTSDDIHSFFENLAKKKKQRLS

SEQ ID NO: 187001 - protein, 398 aa, Zea Mays
MADTGRDAFPDEAEPAFTLDEYMEDIEAVELEADLVLGGDEGKECTYAGGYLKRQAVFSCLTCVPDGVAGIVELWTKRKFRCDCGNSKFGGHLCKLCPEKDYENSANTYNHNFKGSYCTCGRPYPDPEAKEQVEMIQCSICEDWFHGDHIGLNSIEEIPRDEEGEPLYEELICHKCSSVCHFLKLYPDTIWASGKPNLAVETDASDSNVMKKPSGHADPEKHENGALVDNTVGEKTSVENDSTKAIAVPEEANLGSSSGNNCKLGVDVNTMPAITDKSEPFFMSKGWRETLCRCETCFNFYAQRGIAYLIDKEDSIEEYEKIAKQKREMKLEQQQGAETNFLNSLNHVQKIEMISGINDMKNEFQSFLESFDASKPVTSDDIHSFFENLAKKKKQRLS

SEQ ID NO: 187002 - protein, 325 aa, Zea Mays
MADTGRDAFPDEAEPAFTLDEYMEDIEAVELEADLVLGGDEGKECTYAGGYLKRQAVFSCLTCVPDGVAGVCTACSLACHDGHEIPRDEEGEPLYEELICHKCSSVCHFLKLYPDTIWASGKPNLAVETDASDSNVMKKPSGHADPEKHENGALVDNTVGEKTSVENDSTKAIAVPEEANLGSSSGNNCKLGVDVNTMPAITDKSEPFFMSKGWRETLCRCETCFNFYAQRGIAYLIDKEDSIEEYEKIAKQKREMKLEQQQGAETNFLNSLNHVQKIEMISGINDMKNEFQSFLESFDASKPVTSDDIHSFFENLAKKKKQRLS

SEQ ID NO: 187003 - protein, 232 aa, Zea Mays
MRLSSQVAGDMRGALSCVEEMKSEGIEMTVVTYSTLISGYGKTNDAQSADNLFKEAKTKIDNLNGIIYSNIIHAHWIVAKLNSKLQFVLYYAVAGTHQNKALLESNHATKDANVAYVFGQSIAISARGERPEDWVPPEDVSAVYYAKCDDIDETLPMGADGNDGIVDIFSAHSYYDAAGEMVYSSMDGLMNPQANTDAQANTCYQSIQTELQGGMNLNGLKLGFPAIFGYHI

SEQ ID NO: 187004 - protein, 353 aa, Zea Mays
MGPTTRLMKFQDWRSEQSVSSENIVAPHRDDVSLFSSLKERTATVFTFLGNILHTETSNKSMLDERKSTTGTLHPQGPFLQKWNRIFVISCIFAVSVDPLFLYIPVINDEKPCWYLDRKLEKAASVLRFFTDIFYILHIIFQFRTGFIASSHTTFGRSVLIEDRYAITKRYLSTYFFIDVFAILPIPQVIILVVLPNLHGSKVMKAKNVLMLIIICQYVPRLIRIRPLYLQITRSAGVITETARAGAAFNLLLYMLASHVLGALWYLLSIQRQDSCWRQYCRGNSTCDPAYLYCGDYDKDGKNAFLTTNCLLSNQSNLPDPYFGIYAPAIKNVSRSKSFFANCSLCLLGLLNS

SEQ ID NO: 187005 - protein, 95 aa, Zea Mays
MTELIEVISEENKSGPLIVLLKDVEKSFIGVTESLSSLRSKFESLPSGVLIIGSHTQMDSRKEKDEALLTDWKQQLDRDVETLKAKSNIGSIRTH

SEQ ID NO: 187006 - protein, 116 aa, Zea Mays
MCHSTRSKSLDEKSIECVFLGYASNIVAYIFLIIDSRVPELNVGAIMESRDAMHFIPEIPKLVIHADFETHVENLEEDTTIVTQKSKLQRTTKSFGDDYIIYLMILQNYRRCIFSS

SEQ ID NO: 187007 - protein, 530 aa, Zea Mays
MVQLPSSGKRHAEPAEQTMAPARRAAAVKLEVEELGANERGPLSKRARPAQPMPPTPPQPQQDMYHNVLDEPSPLGLRLKKSPSLLDLIQMRLSQASNAGESSMDNSGSEPSKKKDSKSGVSSAGERLKASNFPANILKIGSWEYVSRYEGDLVAKCYFAKHKLVWEVLEGGLKSKIEIQWSDIAALKAICPENGQGTLDVVLARPPLFFKETDPQPRKHTLWQAASDFTGGQASMHRRHFLQCPSTLLSKNFEKLIQCDQRLYQLSQQPEITLDPTLFEPRCTIFEDPVESKCAGFTNLKDEHRALPGYSDSVSPCAGSSISAKKENNDSIRMPAEYPPQTVGIGAQAVSRNVNGAAPEFNIPNWWSQLKVPGLRPSMSVDDLVNHLGNCISEQITSGDPALANNEVPTKETLEGIAQYLLGDTQGPPVTAAVERSLMARVDSLCCLIQKDTAPVAKPKPEPNDGDSIGVEASDGSDEEFTSAPTGKPTDATNPPAMSRKDSFGELLTNLPRIASLPQFLFKIPEGTEN

SEQ ID NO: 187008 - protein, 167 aa, Zea Mays
MTTPSGRFAPHKRICLSMSDFHPESWNPMWSVASILTGLLSFMMDDALTTGSIKTSDAEKRRLAKASLVYNCESKNCPHFRKLFPEYVEKYNQQLQLENTAAEPVPQENPAPAPSPAVQQAPTVANRAQPLAEARRDKNQKKAVPFWMVLVMFSVFGAVMALPLMQL

SEQ ID NO: 187009 - protein, 369 aa, Zea Mays
MDFSAGSYFSSWPINSASESYSLADGSAESYGEGSMPPSTYFMTARSDHNLNFSVHEQDSTMLPNEQLTYAGAGQIDLLPAETLSRDKLPENLLELQGLQNISNLQSNLVAPGVFQHNLTPGVFHPQLNTPGLSELPHALSSSIDSNGSEVSAFLADLNAVSSAPTLCSTFQNASSFMEPVNLEAFSIQGAQSDCVLNRTSHPNGNISDSKEFISGSLPSFASVQETNLAASGFKTQKQEQNAVCNIPTFTARNQMSVAAMQGALVPQKIPSRINDNKSEGPVSHPSDVQTQPNSAVNGVGVKPRVRARRGQATDPHSIAERLRREKISDRMKNLQDLVPNSNKVLFLEGGGGLTCLVHTAGRQGIHAG

SEQ ID NO: 187010 - protein, 216 aa, Zea Mays
MPPSTYFMTARSDHNLNFSVHEQDSTMLPNEQLTYAGAGQIDLLPAETLSRDKLPENLLELQGLQNISNLQSNLVAPGVFQHNLTPGVFHPQLNTPGLSELPHALSSSIDSNGSEVSAFLADLNAVSSAPTLCSTFQNASSFMEPVNLEAFSIQGAQSDCVLNRTSHPNGNISDSKEFISGSLPSFASVQETNLAASGFKTQKQVIYINSAIKENI

SEQ ID NO: 187011 - protein, 380 aa, Zea Mays
MDFSAGSYFSSWPINSASESYSLADGSAESYGEGSMPPSTYFMTARSDHNLNFSVHEQDSTMLPNEQLTYAGAGQIDLLPAETLSRDKLPENLLELQGLQNISNLQSNLVAPGVFQHNLTPGVFHPQLNTPGLSELPHALSSSIDSNGSEVSAFLADLNAVSSAPTLCSTFQNASSFMEPVNLEAFSIQGAQSDCVLNRTSHPNGNISVCDSAALASLHDSKEFISGSLPSFASVQETNLAASGFKTQKQEQNAVCNIPTFTARNQMSVAAMQGALVPQKIPSRINDNKSEGPVSHPSDVQTQPNSAVNGVGVKPRVRARRGQATDPHSIAERLRREKISDRMKNLQDLVPNSNKVLFLEGGGGLTCLVHTAGRQGIHAG

SEQ ID NO: 187012 - protein, 635 aa, Zea Mays
MAEADSCLESFELYESESKFYILGTNCNKTIWRLLKIDRMEPSEVNVHEDSTVLSQSDYLDMLKNLDEQHRSTGGVKFVTNCFGIIGFIKFLGPYYMLIITEQRKIGDIFGHMVYQVSKTAMIELSNSTTRPKLINSKDENRYKKLLQTIDLRKDFFFSHSYHIMRSLQKNFNDPQEGWELYDTMFVWNEFLTRGIRDILKTTLWTVALVYGFFKQDKLAICGKDIMLTLIARRSRHYAGTRYLKRGVNEEGRVANDVETEQIVYEDMLGPWQISSVVQNRGSIPLFWSQETSKLNLKPDIILHGKDKNYEATRLHFENLRKRYGNPIIILNLIKTREKRPREIILRREFDRAIKIINSGLPGEDHLRYLHWDLHKNSQSKSTNALQVLLKVAFEALNLTEFFYRQVSPAQRAENSPNLSPTLKNGFGPHVCDDDNNCGNADYVDDLDDISQEDTCGNYDPGNGIAEDRSEVNGSTQIKPPKFQKGVLRTNCIDCLDRTNVAQYAYGLAALGYQLHALGSVESPEVHLDSPLSRHLMHFYERMGDTLALQYGGSAAHNKIFSAKRGHLKFAIQSQEFFRTLQRYYSNAYMDAYKQAAINLFLGYFQPQVGKPALWEPESGDEHVLDDETRYLSVN

SEQ ID NO: 187013 - protein, 637 aa, Zea Mays
MAEADSCLESFELYESESKFYILGTNCNKTIWRLLKIDRMEPSEVNVHEDSTVLSQSDYLDMLKNLDEQHRSTGGVKFVTNCFGIIGFIKFLGPYYMLIITEQRKIGDIFGHMVYQVSKTAMIELSNSTTRPKLINSKDENRYKKLLQTIDLRKDFFFSHSYHIMRSLQKNFNDPQEGWELYDTMFVWNEFLTRGIRDILKTTLWTVALVYGFFKQDKLAICGKDIMLTLIARRSRHYAGTRYLKRGVNEEGRVANDVETEQIVYEDMLGPWQISSVVQNRGSIPLFWSQETSKLNLKPDIILHGKDKNYEATRLHFENLRKRYGNPIIILNLIKTREKRPREIILRREFDRAIKIINSGLPGEDHLRYLHWDLHKNSQSKSTNALQVLLKVAFEALNLTEFFYRQVSPAQRAENSPNLSPTLKNGFGPHVCDDDNNCGNADYVDDLDDISQEDTCGNYDPGNGIAEDRSEVNGSTQIKPPKFQKGVLRTNCIDCLDRTNVAQYAYGLAALGYQLHALGSVESPEVHLDSPLSRHLMHFYERMGDTLALQYGGSAAHNKIFSAKRGHLKFAIQSQEFFRTLQRYYSNAYMDAYKQAAINLFLGYFQPQVGKPALWEPESGDEHVLDDETRATSKLEF

SEQ ID NO: 187014 - protein, 802 aa, Zea Mays
MAEADSCLESFELYESESKFYILGTNCNKTIWRLLKIDRMEPSEVNVHEDSTVLSQSDYLDMLKNLDEQHRSTGGVKFVTNCFGIIGFIKFLGPYYMLIITEQRKIGDIFGHMVYQVSKTAMIELSNSTTRPKLINSKDENRYKKLLQTIDLRKDFFFSHSYHIMRSLQKNFNDPQEGWELYDTMFVWNEFLTRGIRDILKTTLWTVALVYGFFKQDKLAICGKDIMLTLIARRSRHYAGTRYLKRGVNEEGRVANDVETEQIVYEDMLGPWQISSVVQNRGSIPLFWSQETSKLNLKPDIILHGKDKNYEATRLHFENLRKRYGNPIIILNLIKTREKRPREIILRREFDRAIKIINSGLPGEDHLRYLHWDLHKNSQSKSTNALQVLLKVAFEALNLTEFFYRQVSPAQRAENSPNLSPTLKNGFGPHVCDDDNNCGNADYVDDLDDISQEDTCGNYDPGNGIAEDRSEVNGSTQIKPPKFQKGVLRTNCIDCLDRTNVAQYAYGLAALGYQLHALGSVESPEVHLDSPLSRHLMHFYERMGDTLALQYGGSAAHNKVLIECCYILLSDRKTIFSAKRGHLKFAIQSQEFFRTLQRYYSNAYMDAYKQAAINLFLGYFQPQVGKPALWEPESGDEHVLDDETSKLMKRARSDGSILNKSKLSMSSNGPNGVLNSALTGSKNEGQHPNWSSDSVHGMSSASDNSMSKSRYTPTVSHIKHISCELDYYNGSGDSNFLDLDWLSASDNERSKAISTPDVNISTDDGVHDVIYGITDDQAAEIQAQGLSKDFVQWVNQGETFWY

SEQ ID NO: 187015 - protein, 641 aa, Zea Mays
MAEADSCLESFELYESESKFYILGTNCNKTIWRLLKIDRMEPSEVNVHEDSTVLSQSDYLDMLKNLDEQHRSTGGVKFVTNCFGIIGFIKFLGPYYMLIITEQRKIGDIFGHMVYQVSKTAMIELSNSTTRPKLINSKDENRYKKLLQTIDLRKDFFFSHSYHIMRSLQKNFNDPQEGWELYDTMFVWNEFLTRGIRDILKTTLWTVALVYGFFKQDKLAICGKDIMLTLIARRSRHYAGTRYLKRGVNEEGRVANDVETEQIVYEDMLGPWQISSVVQNRGSIPLFWSQETSKLNLKPDIILHGKDKNYEATRLHFENLRKRYGNPIIILNLIKTREKRPREIILRREFDRAIKIINSGLPGEDHLRYLHWDLHKNSQSKSTNALQVLLKVAFEALNLTEFFYRQVSPAQRAENSPNLSPTLKNGFGPHVCDDDNNCGNADYVDDLDDISQEDTCGNYDPGNGIAEDRSEVNGSTQIKPPKFQKGVLRTNCIDCLDRTNVAQYAYGLAALGYQLHALGSVESPEVHLDSPLSRHLMHFYERMGDTLALQYGGSAAHNKIFSAKRGHLKFAIQSQEFFRTLQRYYSNAYMDAYKQAAINLWENLHFGSQNLVTSMYLMTRQATVCRRLGVANYGTNQTGKY

SEQ ID NO: 187016 - protein, 623 aa, Zea Mays
MAEADSCLESFELYESESKFYILGTNCNKTIWRLLKIDRMEPSEVNVHEDSTVLSQSDYLDMLKNLDEQHRSTGGVKFVTNCFGIIGFIKFLGPYYMLIITEQRKIGDIFGHMVYQVSKTAMIELSNSTTRPKLINSKDENRYKKLLQTIDLRKDFFFSHSYHIMRSLQKNFNDPQEGWELYDTMFVWNEFLTRGIRDILKTTLWTVALVYGFFKQDKLAICGKDIMLTLIARRSRHYAGTRYLKRGVNEEGRVANDVETEQIVYEDMLGPWQISSVVQNRGSIPLFWSQETSKLNLKPDIILHGKDKNYEATRLHFENLRKRYGNPIIILNLIKTREKRPREIILRREFDRAIKIINSGLPGEDHLRYLHWDLHKNSQSKSTNALQVLLKVAFEALNLTEFFYRQVSPAQRAENSPNLSPTLKNGFGPHVCDDDNNCGNADYVDDLDDISQEDTCGNYDPGNGIAEDRSEVNGSTQIKPPKFQKGVLRTNCIDCLDRTNVAQYAYGLAALGYQLHALGSVESPEVHLDSPLSRHLMHFYERMGDTLALQYGGSAAHNKIFSAKRGHLKFAIQSQEFFRTLQRYYSNAYMDAYKQAAINLWENLHFGSQNLVTSMYLMTRQVN

SEQ ID NO: 187017 - protein, 630 aa, Zea Mays
MAEADSCLESFELYESESKFYILGTNCNKTIWRLLKIDRMEPSEVNVHEDSTVLSQSDYLDMLKNLDEQHRSTGGVKFVTNCFGIIGFIKFLGPYYMLIITEQRKIGDIFGHMVYQVSKTAMIELSNSTTRPKLINSKDENRYKKLLQTIDLRKDFFFSHSYHIMRSLQKNFNDPQEGWELYDTMFVWNEFLTRGIRDILKTTLWTVALVYGFFKQDKLAICGKDIMLTLIARRSRHYAGTRYLKRGVNEEGRVANDVETEQIVYEDMLGPWQISSVVQNRGSIPLFWSQETSKLNLKPDIILHGKDKNYEATRLHFENLRKRYGNPIIILNLIKTREKRPREIILRREFDRAIKIINSGLPGEDHLRYLHWDLHKNSQSKSTNALQVLLKVAFEALNLTEFFYRQVSPAQRAENSPNLSPTLKNGFGPHVCDDDNNCGNADYVDDLDDISQEDTCGNYDPGNGIAEDRSEVNGSTQIKPPKFQKGVLRTNCIDCLDRTNVAQYAYGLAALGYQLHALGSVESPEVHLDSPLSRHLMHFYERMGDTLALQYGGSAAHNKIFSAKRGHLKFAIQSQEFFRTLQRYYSNAYMDAYKQAAINLFLGYFQPQVGKPALWEPESGDEHVLDDETR

SEQ ID NO: 187018 - protein, 765 aa, Zea Mays
MAEADSCLESFELYESESKFYILGTNCNKTIWRLLKIDRMEPSEVNVHEDSTVLSQSDYLDMLKNLDEQHRSTGGVKFVTNCFGIIGFIKFLGPYYMLIITEQRKIGDIFGHMVYQVSKTAMIELSNSTTRPKLINSKDENRYKKLLQTIDLRKDFFFSHSYHIMRSLQKNFNDPQEGWELYDTMFVWNEFLTRGIRDILKTTLWTVALVYGFFKQDKLAICGKDIMLTLIARRSRHYAGTRYLKRGVNEEGRVANDVETEQIVYEDMLGPWQISSVVQNRGSIPLFWSQETSKLNLKPDIILHGKDKNYEATRLHFENLRKRYGNPIIILNLIKTREKRPREIILRREFDRAIKIINSGLPGEDHLRYLHWDLHKNSQSKSTNALQVLLKVAFEALNLTEFFYRQVSPAQRAENSPNLSPTLKNGFGPHVCDDDNNCGNADYVDDLDDISQEDTCGNYDPGNGIAEDRSEVNGSTQIKPPKFQKGVLRTNCIDCLDRTNVAQYAYGLAALGYQLHALGSVESPEVHLDSPLSRHLMHFYERMGDTLALQYGGSAAHNKIFSAKRGHLKFAIQSQEFFRTLQRYYSNAYMDAYKQAAINLFLGYFQPQVGKPALWEPESGDEHVLDDETSKLMKRARSDGSILNKSKLSMSSNGPNGVLNSALTGSKNEGQHPNWSSDSVHGMSSASDNSMSKSRYTPTVSHIKHISCELDYYNGSGDSNFLDLDWLSASDNERLFMLFFSFCGLSGVLFFVHGMVYTEMTVRSK

SEQ ID NO: 187019 - protein, 566 aa, Zea Mays
MSSRAPAAPTTTVVRAAGTDHLWAKAAELERDFAGYKRRLAERRAHDAVAEVARAEEARGGDDAAGRGRRYEEYVRRRDERLRQEWRARMERKEAEVQALWARLDRAGSRGRRGGDGELAAATATGHAREDQVKPPQKPGGNLVVKVKPSTPIPVTPRGNLGQPPAAKPARPRTSVPSSLAAGSPRLSTPDPRLRPSSHLQRELRQAQPQPPATPRKENRLPPPPSTAASPATPRPRTTMLSRSRSMFKDRGCSSVAVAVGESPRPSRFQPPRSSYEGASNLKKPAPSCSRDQAVVADRRKASSAVAPEPFLVKASRDDMPAPLVLVASKERDLPYRSGAISPAGCANEDSKSNVQEHVDRSPDKFGSEEITGDSDTEPSYVYVKKDSDEQIPGPPPPETPAAAAAAADDAEEEFRRESSESLYSNVQSSFSPRSELASAASSATTGSSPRPSATAQSPEASVSPRPRKSAEAEEGAEKRVPAPTTTPRSSAQSPMDAVNGLKRLLTFGKRSGNGKASEAAAAPRAPPARDGDSSTLLDNSYVISPNVGSLQSIAASSELKEPVLH

SEQ ID NO: 187020 - protein, 77 aa, Zea Mays
MIGHCLGAAGGLEAIATIKAITTGWVHPSINQFNPEEAVEFDTVPNVKKQHEVNVGISNSFGFGGHNSVVVFAPFKP

SEQ ID NO: 187021 - protein, 221 aa, Zea Mays
MVSIRNSGQWKFKKGPEYGNGISALSVPKQYSSSTKQSSGNKFQSISSGRVAPWLETGDAVASMYSESRGEARDFARVRNTCFEQARQAYLVGNKALAKELSMKGQAYNVQMKAAHEKAREAIYRQRNPVSSQRGGGDHLIDLHGLHVNEAIHILKGELTALKSAARAAGERMQVMVCVGTGHHTKGSRTARLPIAVEQFLLDEGLQYTQPQAGLLRVMVY

SEQ ID NO: 187022 - protein, 476 aa, Zea Mays
MSSLNKVVSNSGDACSVLASKVTSLNPNAAEFVPSFVKPSFGNGTVLDKSDFRGSSGKTILDRPEPSKSNNSDDEAHQFWHKQLPDDIIPDFTSFEKVEQGPELSLAGLSLNAPPFYGTTSSRFSREYHELSSPVTKGLELELEHTNMLYEDKSNWEQNYIGDLHIANGNQDLHYDSESGVSFSDSFASEYVAPSDGLFAPLEYLASQFPGFSAESLAELYYANGCDFNHTIEILTQLEMQVDATPNHTLNLPHSTPNFSTGDFPALPTAEDQNGFNQALSVPKQYSSSTKQSSGNKFQSISSGRVAPWLETGDAVASMYSESRGEARDFARVRNTCFEQARQAYLVGNKALAKELSMKGQAYNVQMKAAHEKAREAIYRQRNPVSSQRGGGDHLIDLHGLHVNEAIHILKGELTALKSAARAAGERMQVMVCVGTGHHTKGSRTARLPIAVEQFLLDEGLQYTQPQAGLLRVMVY

SEQ ID NO: 187023 - protein, 438 aa, Zea Mays
MSSLNKVVSNSGDACSVLASKVTSLNPNAAEFVPSFVKPSFGNGTVLDKSDFRGSSGKTILDRPEPSKSNNSDDEAHQFWHKQLPDDIIPDFTSFEKVEQGPELSLAGLSLNAPPFYGTTSSRFSREYHELSSPVTKGLELELEHTNMLYEDKSNWEQNYIGDLHIANGNQDLHYDSESGVSFSDSFASEYVAPSDGLFAPLEYLASQFPGFSAESLAELYYANGCDFNHTIEILTQLEMQVDATPNHTLNLPHSTPNFSTGDFPALPTAEDQNGFNQASMYSESRGEARDFARVRNTCFEQARQAYLVGNKALAKELSMKGQAYNVQMKAAHEKAREAIYRQRNPVSSQRGGGDHLIDLHGLHVNEAIHILKGELTALKSAARAAGERMQVMVCVGTGHHTKGSRTARLPIAVEQFLLDEGLQYTQPQAGLLRVMVY

SEQ ID NO: 187024 - protein, 285 aa, Zea Mays
MSSLNKVVSNSGDACSVLASKVTSLNPNAAEFVPSFVKPSFGNGTVLDKSDFRGSSGKTILDRPEPSKSNNSDDEAHQFWHKQLPDDIIPDFTSFEKVEQGPELSLAGLSLNAPPFYGTTSSRFSREYHELSSPVTKGLELELEHTNMLYEDKSNWEQNYIGDLHIANGNQDLHYDSESGVSFSDSFASEYVAPSDGLFAPLEYLASQFPGFSAESLAELYYANGCDFNHTIEILTQLEMQVDATPNHTLNLPHSTPNFSTGDFPALPTAEDQNGFNQELWPVEV

SEQ ID NO: 187025 - protein, 408 aa, Zea Mays
MSSLNKVVSNSGDACSVLASKVTSLNPNAAEFVPSFVKPSFGNGTVLDKSDFRGSSGKTILDRPEPSKSNNSDDEAHQFWHKQLPDDIIPDFTSFEKVEQGPELSLAGLSLNAPPFYGTTSSRFSREYHELSSPVTKGLELELEHTNMLYEDKSNWEQNYIGDLHIANGNQDLHYDSESGVSFSDSFASEYVAPSDGLFAPLEYLASQFPGFSAESLAELYYANGCDFNHTIEILTQLEMQVDATPNHTLNLPHSTPNFSTGDFPALPTAEDQNGFNQGNVDVLGMFNGRSSSAMPTGAGDFVSAVRKLASQNSGQWKFKKGPEYGNGISALSVPKQYSSSTKQSSGNKFQSISSGRVAPWLETGDAQVCTQNQGERLVILLGSGIPALSRLDRLTWLATRLLRRSSA

SEQ ID NO: 187026 - protein, 437 aa, Zea Mays
MTGNPGLCGYWLGSSCRSTGHRDKPPISKAAIIGVAVGGLVILLMILVAVCRPHHPPAFKDATVSKPVSNGPPKLVILHMNMALHVFDDIMRMTENLSEKYIIGYGASSTVYKCVLKNCKPVAIKKLYAHYPQSLKEFETELETVGSIKHRNLVSLQGYSLSPVGNLLFYDYMESGSLWDVLHEGSSKKNKLDWVTRLRIALGAAQGLAYLHHDCSPRIIHRDVKSKNILLDKDYEAHLTDFGIAKSLCVSKTHTSTYVMGTIGYIDPEYARTSRLNEKSDVYSYGIVLLELLTGKKPVDNECNLHHLILSKTASNEVMETVDPDVGDTCKDLGEVKKLFQLALLCTKRQPSDRPTMHEVVRVLDCLVNPEPPPQPQQQQQKAHAHHQLPPQPSPPAYVDEYVSLRGTGALSCANSSSTSDAELFLKFGEAISQNMV

SEQ ID NO: 187027 - protein, 781 aa, Zea Mays
MCQLTGLWYFDVKNNSLTGAIPDTIGNCTSFQVLDLSYNRFTGPIPFNIGFLQVATLSLQGNKFTGPIPSVIGLMQALAVLDLSYNQLSGPIPSILGNLTYTEKLYMQGNRLTGSIPPELGNMSTLHYLELNDNQLTGSIPPELGRLTGLFDLNLANNHLEGPIPDNLSSCVNLNSFNAYGNKLNGTIPRSLRKLESMTYLNLSSNFISGSIPIELSRINNLDTLDLSCNMMTGPIPSSIGNLEHLLRLNLSKNDLVGFIPAEFGNLRSVMEIDLSYNHLGGLIPQELGMLQNLMLLKLENNNITGDVSSLMNCFSLNILNVSYNNLAGAVPTDNNFTRFSHDSFLGNPGLCGYWLGSSCRSTGHRDKPPISKAAIIGVAVGGLVILLMILVAVCRPHHPPAFKDATVSKPVSNGPPKLVILHMNMALHVFDDIMRMTENLSEKYIIGYGASSTVYKCVLKNCKPVAIKKLYAHYPQSLKEFETELETVGSIKHRNLVSLQGYSLSPVGNLLFYDYMESGSLWDVLHEGSSKKNKLDWVTRLRIALGAAQGLAYLHHDCSPRIIHRDVKSKNILLDKDYEAHLTDFGIAKSLCVSKTHTSTYVMGTIGYIDPEYARTSRLNEKSDVYSYGIVLLELLTGKKPVDNECNLHHLILSKTASNEVMETVDPDVGDTCKDLGEVKKLFQLALLCTKRQPSDRPTMHEVVRVLDCLVNPEPPPQPQQQQQKAHAHHQLPPQPSPPAYVDEYVSLRGTGALSCANSSSTSDAELFLKFGEAISQNMV

SEQ ID NO: 187028 - protein, 874 aa, Zea Mays
MPVRSSVAMTTTAARALAALVLVTAAAAAAAVADDGAALVEIKKSFRNVGNVLYDWAGDDYCSWRGVLCDNVTFAVAALDLKSNGLSGQIPDEIGDCSSLRTLDFSFNNLDGDIPFSISKLKHLENLILKNNQLIGAIPSTLSQLPNLKILDLAQNKLTGEIPRLIYWNEVLQYLGLRGNHLEGSLSPDMCQLTGLWYFDVKNNSLTGAIPDTIGNCTSFQVLDLSYNRFTGPIPFNIGFLQVATLSLQGNKFTGPIPSVIGLMQALAVLDLSYNQLSGPIPSILGNLTYTEKLYMQGNRLTGSIPPELGNMSTLHYLELNDNQLTGSIPPELGRLTGLFDLNLANNHLEGPIPDNLSSCVNLNSFNAYGNKLNGTIPRSLRKLESMTYLNLSSNFISGSIPIELSRINNLDTLDLSCNMMTGPIPSSIGNLEHLLRLNLSKNDLVGFIPAEFGNLRSVMEIDLSYNHLGGLIPQELGMLQNLMLLKLENNNITGDVSSLMNCFSLNILNVSYNNLAGAVPTDNNFTRFSHDSFLGNPGLCGYWLGSSCRSTGHRDKPPISKAAIIGVAVGGLVILLMILVAVCRPHHPPAFKDATVSKPVSNGPPKLVILHMNMALHVFDDIMRMTENLSEKYIIGYGASSTVYKCVLKNCKPVAIKKLYAHYPQSLKEFETELETVGSIKHRNLVSLQGYSLSPVGNLLFYDYMESGSLWDVLHEGSSKKNKLDWVTRLRIALGAAQGLAYLHHDCSPRIIHRDVKSKNILLDKDYEAHLTDFGIAKSLCVSKTHTSTYVMGTIGYIDPEYARTSRLNEKSDVYSYGIVLLELLTGKKPVDNECNLHHLVTILQSPAFVELEAGSRFLLFTSLWIPAVLNNC

SEQ ID NO: 187029 - protein, 629 aa, Zea Mays
MCGGWTLCFWVVAAVPFYLATWEHFFTNTLILPTINGPTEGLMLIYVSHLFTFFTGAEWWAQDFRKSLPFFGWIPLPFLSEIEIPLYVLVLILMIVCAVIPTVRSNVSNVQEVVEARKGSMALALAMFGFATLLLETILPFIVLLAGVAIWCYLSPSSIMRNQPHLLVIGTGFNFGYLVGRMILAHLCDEPKGLKSGMFMSLVFLCFPIANALIAKINDGSPLVDELVLLLLYCAYTVGLYLHLAVSVVHEIKDALGIYCFRCGNWKPPCALTAQKPPSHVFNLSSAAAATRKDGDQLIMTKSDVGGFSRSCNGTGRGRGRAYREEDTGQSATAVPHPLHEKTMTRARDPGTISSFMADVSTASAVSPLENRRAGPSSAMHCKYQGDELECKWMDSCEKIRPSTHPIRRPENYMVVLHSALSAQHCKHDSSVQSDELDGKLSWKPGFGSRKQFCSKPSRARSVDVDLRGQTYFSTDLMPIFNLLFGVITRGSEITRLDVIDYSVENRPATEAWRVLLQKLQTGLVRWMRVGAQPPWMPRSTQTTLFMALADYVCVVTYDSTQRLNRVCSGLLDTIRQMQVCADELKRLSIRNHVPEYLEYVHKNTLVNAMSAVTEHKSRASSYWSATSS

SEQ ID NO: 187030 - protein, 343 aa, Zea Mays
MGFIGAHGVETLKRYRYSGEDRSVVAKYVLQPFWSRCVTLFPLWMPTWLCFPTFQITLTGFSFLVLSALLGYICSPHLDTAPPRWVHLAHGLLLFLYQFEALALGSTLMCGGWTLCFWVVAAVPFYLATWEQGLGGMEPKNWIHLASTHTHGPTVPRCQDFRKSLPFFGWIPLPFLSEIEIPLYVLVLILMIVCAVIPTVRSNVSNVQEVVEARKGSMALALAMILPFIVLLAGVAIWCYLSPSSIMRNQPHLLVIGTGFNFGYLVGRMILAHLCDEPKGLKSGMFMSLVFLCFPIANALIAKINDGSPLVDELVLLLLYCAYTGEPEHFHFHTCVLNFTYKI

SEQ ID NO: 187031 - protein, 489 aa, Zea Mays
MGFIGAHGVETLKRYRYSGEDRSVVAKYVLQPFWSRCVTLFPLWMPTWLCFPTFQITLTGFSFLVLSALLGYICSPHLDTAPPRWVHLAHGLLLFLYQTFDAVDGKQARRTSSSSPLGELFDHGCDALACAFEALALGSTLMCGGWTLCFWVVAAVPFYLATWEHFFTNTLILPTINGPTEGLMLIYVSHLFTFFTGAEWWAQDFRKSLPFFGWIPLPFLSEIEIPLYVLVLILMIVCAVIPTVRSNVSNVQEVVEARKGSMALALAMILPFIVLLAGVAIWCYLSPSSIMRNQPHLLVIGTGFNFGYLVGRMILAHLCDEPKGLKSGMFMSLVFLCFPIANALIAKINDGSPLVDELVLLLLYCAYTVGLYLHLAVSVVHEIKDALGIYCFRDFWPSLSLTAERVGRPLPSDSSIAVDGLFSVSWGVCVEEETTMQPLSLQFSGPVCCFACLFVSQALHGHGAATWHVKKNGPIYISCAGFLYHKTFA

SEQ ID NO: 187032 - protein, 399 aa, Zea Mays
MGFIGAHGVETLKRYRYSGEDRSVVAKYVLQPFWSRCVTLFPLWMPTWLCFPTFQITLTGFSFLVLSALLGYICSPHLDTAPPRWVHLAHGLLLFLYQTFDAVDGKQARRTSSSSPLGELFDHGCDALACAFEALALGSTLMCGGWTLCFWVVAAVPFYLATWEHFFTNTLILPTINGPTEGLMLIYVSHLFTFFTGAEWWAQDFRKSLPFFGWIPLPFLSEIEIPLYVLVLILMIVCAVIPTVRSNVSNVQEVVEARKGSMALALAMILPFIVLLAGVAIWCYLSPSSIMRNQPHLLVIGTGFNFGYLVGRMILAHLCDEPKGLKSGMFMSLVFLCFPIANALIAKINDGSPLVDELVLLLLYCAYTVGLYLHLAVSVVHEIKDALGIYCFRITRKEA

SEQ ID NO: 187033 - protein, 355 aa, Zea Mays
MGFIGAHGVETLKRYRYSGEDRSVVAKYVLQPFWSRCVTLFPLWMPTWLCFPTFQITLTGFSFLVLSALLGYICSPHLDTAPPRWVHLAHGLLLFLYQFEALALGSTLMCGGWTLCFWVVAAVPFYLATWEQGLGGMEPKNWIHLASTHTHGPTVPRCQDFRKSLPFFGWIPLPFLSEIEIPLYVLVLILMIVCAVIPTVRSNVSNVQEVVEARKGSMALALAMILPFIVLLAGVAIWCYLSPSSIMRNQPHLLVIGTGFNFGYLVGRMILAHLCDEPKGLKSGMFMSLVFLCFPIANALIAKINDGSPLVDELVLLLLYCAYTVGLYLHLAVSVVHEIKDALGIYCFRITRKEA

SEQ ID NO: 187034 - protein, 361 aa, Zea Mays
MGFIGAHGVETLKRYRYSGEDRSVVAKYVLQPFWSRCVTLFPLWMPWVHLAHGLLLFLYQTFDAVDGKQARRTSSSSPLGELFDHGCDALACAFEALALGSTLMCGGWTLCFWVVAAVPFYLATWEHFFTNTLILPTINGPTEGLMLIYVSHLFTFFTGAEWWAQDFRKSLPFFGWIPLPFLSEIEIPLYVLVLILMIVCAVIPTVRSNVSNVQEVVEARKGSMALALAMILPFIVLLAGVAIWCYLSPSSIMRNQPHLLVIGTGFNFGYLVGRMILAHLCDEPKGLKSGMFMSLVFLCFPIANALIAKINDGSPLVDELVLLLLYCAYTVGLYLHLAVSVVHEIKDALGIYCFRITRKEA

SEQ ID NO: 187035 - protein, 376 aa, Zea Mays
MGFIGAHGVETLKRYRYSGEDRSVVAKYVLQPFWSRCVTLFPLWMPTWLCFPTFQITLTGFSFLVLSALLGYICSPHLDTAPPRWVHLAHGLLLFLYQFEALALGSTLMCGGWTLCFWVVAAVPFYLATWEHFFTNTLILPTINGPTEGLMLIYVSHLFTFFTGAEWWAQDFRKSLPFFGWIPLPFLSEIEIPLYVLVLILMIVCAVIPTVRSNVSNVQEVVEARKGSMALALAMFGFATLLLETILPFIVLLAGVAIWCYLSPSSIMRNQPHLLVIGTGFNFGYLVGRMILAHLCDEPKGLKSGMFMSLVFLCFPIANALIAKINDGSPLVDELVLLLLYCAYTVGLYLHLAVSVVHEIKDALGIYCFRITRKEA

SEQ ID NO: 187036 - protein, 366 aa, Zea Mays
MGFIGAHGVETLKRYRYSGEDRSVVAKYVLQPFWSRCVTLFPLWMPTWLCFPTFQITLTGFSFLVLSALLGYICSPHLDTAPPRWVHLAHGLLLFLYQFEALALGSTLMCGGWTLCFWVVAAVPFYLATWEHFFTNTLILPTINGPTEGLMLIYVSHLFTFFTGAEWWAQDFRKSLPFFGWIPLPFLSEIEIPLYVLVLILMIVCAVIPTVRSNVSNVQEVVEARKGSMALALAMILPFIVLLAGVAIWCYLSPSSIMRNQPHLLVIGTGFNFGYLVGRMILAHLCDEPKGLKSGMFMSLVFLCFPIANALIAKINDGSPLVDELVLLLLYCAYTVGLYLHLAVSVVHEIKDALGIYCFRITRKEA

SEQ ID NO: 187037 - protein, 409 aa, Zea Mays
MGFIGAHGVETLKRYRYSGEDRSVVAKYVLQPFWSRCVTLFPLWMPTWLCFPTFQITLTGFSFLVLSALLGYICSPHLDTAPPRWVHLAHGLLLFLYQTFDAVDGKQARRTSSSSPLGELFDHGCDALACAFEALALGSTLMCGGWTLCFWVVAAVPFYLATWEHFFTNTLILPTINGPTEGLMLIYVSHLFTFFTGAEWWAQDFRKSLPFFGWIPLPFLSEIEIPLYVLVLILMIVCAVIPTVRSNVSNVQEVVEARKGSMALALAMFGFATLLLETILPFIVLLAGVAIWCYLSPSSIMRNQPHLLVIGTGFNFGYLVGRMILAHLCDEPKGLKSGMFMSLVFLCFPIANALIAKINDGSPLVDELVLLLLYCAYTVGLYLHLAVSVVHEIKDALGIYCFRITRKEA

SEQ ID NO: 187038 - protein, 388 aa, Zea Mays
MGFIGAHGVETLKRYRYSGEDRSVVAKYVLQPFWSRCVTLFPLWMPTWLCFPTFQITLTGFSFLVLSALLGYICSPHLDTAPPRWVHLAHGLLLFLYQTFDAVDGKQARRTSSSSPLGELFDHGCDALACAFEALALGSTLMCGGWTLCFWVVAAVPFYLATWEQGLGGMEPKNWIHLASTHTHGPTVPRCQDFRKSLPFFGWIPLPFLSEIEIPLYVLVLILMIVCAVIPTVRSNVSNVQEVVEARKGSMALALAMILPFIVLLAGVAIWCYLSPSSIMRNQPHLLVIGTGFNFGYLVGRMILAHLCDEPKGLKSGMFMSLVFLCFPIANALIAKINDGSPLVDELVLLLLYCAYTVGLYLHLAVSVVHEIKDALGIYCFRITRKEA

SEQ ID NO: 187039 - protein, 126 aa, Zea Mays
MGFIGAHGVETLKRYRYSGEDRSVVAKYVLQPFWSRCVTLFPLWMPTWLCFPTFQITLTGFSFLVLSALLGYICSPHLDTAPPRLLMLLMVNKQGVLAHRVLLENFLIMDVMHLRVLLKHWPLEAP

SEQ ID NO: 187040 - protein, 716 aa, Zea Mays
MDPSTAKAAAPPNNADHVLHIQPDNLPPPHPSNNQQPNPPPPETPKLSQNPEKPPASSPSRPPLPPALLRRRSSIAKPKSRFVEPPTPMHPDSAHPSPVHPAATAAASLTATPTHRAASVSTPHTPAEADDDEDIFRNKDGSRAPASAARCRRRVRLGLELCVLVLFLGLLVVSLVVRPLQGRVLWGLEIWKWCVMVTAVFSGHLLSQWLVTLIVFVVERNFLLRTKVLYFVFGLKKSFQVCLWLALVLIAWSQLFDSEVGRSRKTARTLNYVSRFLASMLIGSVIWLVKTFLMKVVASTFHRKTFFDRIQESVFHQYVLQTLSGPPLMELAENVGREGSGLGRVSIGRAKEDKGVPEVIDVVKLRRMSQEKVSAWTMRGLITAIRSSRLSTISNTIESFDDVDGMEQKDKEINSEWEAKAAAYAIFKNVAKPSYKHIEEVDLLRFFTKEEVHLVIPMFEGAPETGKIKKSALKNWVVKAYLDRKSLAHSLNDTKTAVMQLHNLISVIVIIIIIIVTLLLMGIATTKILVVISSQLLVAGFIFGNACKTVFEALIFVFIMHPFDVGDRCVIDGTQMIVEEMNILTTVLLKNDNEKIYYPNSVLSTKPISNFYRSPNMYDTIDFAIDVSTSVESIGALRSKIKGYLESKPTHWHPVHTVNLKDILDVNKINMSLSVQHTMNFQNIREKNIRRSELVMELKKIFEEMSIRTMEWLFSK

SEQ ID NO: 187041 - protein, 575 aa, Zea Mays
MRPVFREIQEKKLEIYNAIVKLQKGDESDEKLQERANKIQSDLEELVKSLNEQCKRYGLRAKPTTLVELPFGWQTGIQETAATWDEEWDRFGDEGFSIIKELTVEVEPPVVPKSQPTVEDVKVSTNGASTEKEDNKFAKSTAAAAVEQAVEPEAIPSNSKLESTKSPPVSPVKNRDDGSTDELDTKQSGPNDVLPRATESVSNRGMDSSAHGDKTYDGHSWAPSFDHGTDNDSLWNFGHKIYCTIWYLPPRSVSQDGENGDSDLFFGPQGLPPIRTGGSSSNSLFVKEQKPSFDSVPGTPMEKPFFDSIPGTPVQKSVFDYSVPSTPMQNSVFDYSIPSTPMQKPLFDSVPGTPVQKSVFDSVPSTPMQKSVFDSAPSTPTQKPFFDSFPSTPMQRSMFDSGPSRAESPTAGSVYGKEQKGFFDSSVPSTPMYNSNLTPRYSEAGDDSFDTMSQYSSFGMHDNNSFGQIDSFSRFDSFRSNADNGGNDAFARFDSFRSTSDQGGGNSFMRYDSMNSSSDHDRTDTFARFDSMKNSDFNNQGYSFDDDDPFGTGPFKSTETSNSPTRHGTDAWSAF

SEQ ID NO: 187042 - protein, 470 aa, Zea Mays
MKNGTDLEMKELTVEVEPPVVPKSQPTVEDVKVSTNGASTEKEDNKFAKSTAAAAVEQAVEPEAIPSNSKLESTKSPPVSPVKNRDDGSTDELDTKQSGPNDVLPRATESVSNRGMDSSAHGDKTYDGHSWAPSFDHGTDNDSLWNFGHKDGENGDSDLFFGPQGLPPIRTGGSSSNSLFVKEQKPSFDSVPGTPMEKPFFDSIPGTPVQKSVFDYSVPSTPMQNSVFDYSIPSTPMQKPLFDSVPGTPVQKSVFDSVPSTPMQKSVFDSAPSTPTQKPFFDSFPSTPMQRSMFDSGPSRAESPTAGSVYGKEQKGFFDSSVPSTPMYNSNLTPRYSEAGDDSFDTMSQYSSFGMHDNNSFGQIDSFSRFDSFRSNADNGGNDAFARFDSFRSTSDQGGGNSFMRYDSMNSSSDHDRTDTFARFDSMKNSDFNNQGYSFDDDDPFGTGPFKSTETSNSPTRHGTDAWSAF

SEQ ID NO: 187043 - protein, 560 aa, Zea Mays
MRPVFREIQEKKLEIYNAIVKLQKGDESDEKLQERANKIQSDLEELVKSLNEQCKRYGLRAKPTTLVELPFGWQTGIQETAATWDEEWDRFGDEGFSIIKELTVEVEPPVVPKSQPTVEDVKVSTNGASTEKEDNKFAKSTAAAAVEQAVEPEAIPSNSKLESTKSPPVSPVKNRDDGSTDELDTKQSGPNDVLPRATESVSNRGMDSSAHGDKTYDGHSWAPSFDHGTDNDSLWNFGHKDGENGDSDLFFGPQGLPPIRTGGSSSNSLFVKEQKPSFDSVPGTPMEKPFFDSIPGTPVQKSVFDYSVPSTPMQNSVFDYSIPSTPMQKPLFDSVPGTPVQKSVFDSVPSTPMQKSVFDSAPSTPTQKPFFDSFPSTPMQRSMFDSGPSRAESPTAGSVYGKEQKGFFDSSVPSTPMYNSNLTPRYSEAGDDSFDTMSQYSSFGMHDNNSFGQIDSFSRFDSFRSNADNGGNDAFARFDSFRSTSDQGGGNSFMRYDSMNSSSDHDRTDTFARFDSMKNSDFNNQGYSFDDDDPFGTGPFKSTETSNSPTRHGTDAWSAF

SEQ ID NO: 187044 - protein, 1185 aa, Zea Mays
MEAAFDAYFCAADLDRDGRISGQEAVAFFKGSGLPQPVLAQIWTYADKNRTGFLGREDFCNSLKLVTVAQSGRELTPDIVRSALFGPAAAKIPAPRINVSTAGPQTNSVASPPNATRALGSGQQNPAVRGPQVLPGASSNPQVRPPQPPNANTVPPVQGVASRPPVGGGPSGLNHTSSTTTNLATDWFSGKRSASSLGATSQAPTRGISPQGNLTTAGISAQNSTPLPVYNSHMPGATTPANANSTNVNMMPSQPSVSDSKTLVPLGNGLPSNSTFGVDPFSVTLQAKQESALTPNVPNNLPSSTAPASAAGPHHPPKPMQAGPLQGISSLPSHTSQLPHSQPAPRQQQFNAIPSTPGPVGANIPGGQIPSNPYQSQAPWPKITQVDVRKYMIVFIKVDRDRDGKITGEEARNLFLSWRLPRDILRKVWDLSDQDKDGMLSFKEFCVAVYLMERHREHRPLPDVLPDGIWAEGTSLPSTGQFAGNPSGPPSHASTGFASRGMQGPHHGMLPSSMKPTSRRPLPLDADDTVKAEQQKPKIPVLEEHLVGQLSKEEQGTLDAKFKEASDADKKVQELEKEIQDSREKTEFYRTKMQELILYKSRCENRLNEVSESMSADKREVQSLAAKYDERCKKEKKLEIYNAIVKLQKGDESDEKLQERANKIQSDLEELVKSLNEQCKRYGLRAKPTTLVELPFGWQTGIQETAATWDEEWDRFGDEGFSIIKELTVEVEPPVVPKSQPTVEDVKVSTNGASTEKEDNKFAKSTAAAAVEQAVEPEAIPSNSKLESTKSPPVSPVKNRDDGSTDELDTKQSGPNDVLPRATESVSNRGMDSSAHGDKTYDGHSWAPSFDHGTDNDSLWNFGHKDGENGDSDLFFGPQGLPPIRTGGSSSNSLFVKEQKPSFDSVPGTPMEKPFFDSIPGTPVQKSVFDYSVPSTPMQNSVFDYSIPSTPMQKPLFDSVPGTPVQKSVFDSVPSTPMQKSVFDSAPSTPTQKPFFDSFPSTPMQRSMFDSGPSRAESPTAGSVYGKEQKGFFDSSVPSTPMYNSNLTPRYSEAGDDSFDTMSQYSSFGMHDNNSFGQIDSFSRFDSFRSNADNGGNDAFARFDSFRSTSDQGGGNSFMRYDSMNSSSDHDRTDTFARFDSMKNSDFNNQGYSFDDDDPFGTGPFKSTETSNSPTRHGTDAWSAF

SEQ ID NO: 187045 - protein, 60 aa, Zea Mays
MSHPVLEGKPNANHVRARISNSRTQQLHNMDIITQCSNSTKKGIIVDYIISLRHPHSLYK

SEQ ID NO: 187046 - protein, 54 aa, Zea Mays
MPKDKHKTSLNLLWLTMSLSMGVLSTCVSSICTEHVLHMLVLSFFIKLNTISTM

SEQ ID NO: 187047 - protein, 53 aa, Zea Mays
MPNNNSIKTIKKEGTREGSSVQYVISLDIRLDDLHHQISTVTMLMLLDVSPCI

SEQ ID NO: 187048 - protein, 94 aa, Zea Mays
MTTQSCLGRIANLLVLHAPRSFSSVLRLVASFRPSAAGPLGPRSLCRFLLLNPSAASLSKKISRKIQLPPFSLLQSSCSSPRFLHLRTPSVFVF

SEQ ID NO: 187049 - protein, 201 aa, Zea Mays
MSVLYLAEDLILKVVQNISYELDSFNKRKWDHIIVNQFLRDLREAKKRGNSERRHKEALAILAATAPSVTPTSRNTTVRKETENNVTPAKREVILVVRHYRFLLISVCFQNMPRSITGSSRIGQLSSSPQAKDLSFSNSDVSDETNFGIFNLAKFSKKSALPCDICMRCDTILNRIFVCSSCYCTLRLLPESGVSHWPMEM

SEQ ID NO: 187050 - protein, 738 aa, Zea Mays
MIKWLQNSECAPSVQVKSFKEGSLAQGTLPRSESKNLTTATFQSGQEEAISSIDHHFLENDNANNGDLVQNGFHRCPDPDVNQISGRHLLNMDGYCCYIHPIIEKRLQGLWSNSLEQTIQKNGYHEELSWSLHDEDFGGSSTKLVQLTGKTAMEVCKAQSSDTLKLSPDDEIEGEIVYLQSRLLDGVVSMKQRYEDLILKVVQNISYELDSFNKRKWDHIIVNQFLRDLREAKKRGNSERRHKEALAILAATAPSVTPTSRNTTVRKETENNVTPAKRENMPRSITGSSRIGQLSSSPQAKDLSFSNSDVSDETNFGIFNLAKFSKKSALPCDICMRCDTILNRIFVCSSCKATVHLDCYQSLVYPTGPWKCELCHEMPSDSVTSGEQSDQNGPKACLVQCGLCHGTSGAFRKTVKGQWVHAFCAEWLLETTFRRGQHNPVDGMERLHHKDKDTCSICHRCVGACLKCCTLDCQITFHPSCARDAGLYMNTKRLGNMLQHKAYCCRHSIEQRKAYSQQYGPDEIKGMKQMRVELELLRFLCERIVKREKVKKDLVGCAHDILAARRITAVSSLWTSCYTSGPGASSESATTSVNNKSYGGTIQRSDDVTVRLEDVTVDSTVTKKHTVRFSLHNRDTDRNTADSSTSTISYKRKLDDGESLAFKSHPGTPATALLESRDAEKPIDKKLRDMYQKELVMVTSHQALLKNKTPPERYVYTRRSSMSKRKQCSQHVVQRPGG

SEQ ID NO: 187051 - protein, 551 aa, Zea Mays
MSVLYLAEDLILKVVQNISYELDSFNKRKWDHIIVNQFLRDLREAKKRGNSERRHKEALAILAATAPSVTPTSRNTTVRKETENNVTPAKRENMPRSITGSSRIGQLSSSPQAKDLSFSNSDVSDETNFGIFNLAKFSKKSALPCDICMRCDTILNRIFVCSSCKATVHLDCYQSLVYPTGPWKCELCHEMPSDSVTSGEQSDQNGPKACLVQCGLCHGTSGAFRKTVKGQWVHAFCAEWLLETTFRRGQHNPVDGMERLHHKDKDTCSICHRCVGACLKCCTLDCQITFHPSCARDAGLYMNTKRLGNMLQHKAYCCRHSIEQRKAYSQQYGPDEIKGMKQMRVELELLRFLCERIVKREKVKKDLVGCAHDILAARRITAVSSLWTSCYTSGPGASSESATTSVNNKSYGGTIQRSDDVTVRLEDVTVDSTVTKKHTVRFSLHNRDTDRNTADSSTSTISYKRKLDDGESLAFKSHPGTPATALLESRDAEKPIDKKLRDMYQKELVMVTSHQALLKNKTPPERYVYTRRSSMSKRKQCSQHVVQRPGG

SEQ ID NO: 187052 - protein, 1163 aa, Zea Mays
MQEVIVQQEEQPVEIALDQSRTDSIVLPGSREDRWRSLSWLLGARGRFVLTSERPNKKRKLLGADAGLEQLVLLPSPEGEAGSVCDVCCLGESDMVSNRMLHCKNCEISVHQKCYGVHVVPDRFWFCVWCTRNIGMPRRLTRSDACRTVLMPCVLCPKEKGALKPFKRDPGPSIDGGNQEFVHLFCSLWRPEFYVEDMESMEPVTNVVDTQENQSKLVCSLCKVMHGACVRCSHGACRTSFHPICAREFKLQIEIWGKFGHDNVEMRAFCAKHSSVKSISSIQNDKSVSELDSAQVELHDGKPVTGKEQQVRFTRSNKDKFVNSTITTSSCSLNEAHTNEVATISPVLGRTQETQSADMAADQPSSDGNLMSDSGDVSGILRKLVDQGKISLDDIELEPSLRSESVEAAFQPETTAYSPGLKLKMIKWLQNSECAPSVQVKSFKEGSLAQGTLPRSESKNLTTATFQSGQEEAISSIDHHFLENDNANNGDLVQNGFHRCPDPDVNQISGRHLLNMDGYCCYIHPIIEKRLQGLWSNSLEQTIQKNGYHEELSWSLHDEDFGGSSTKLVQLTGKTAMEVCKAQSSDTLKLSPDDEIEGEIVYLQSRLLDGVVSMKQRYEDLILKVVQNISYELDSFNKRKWDHIIVNQFLRDLREAKKRGNSERRHKEALAILAATAPSVTPTSRNTTVRKETENNVTPAKRENMPRSITGSSRIGQLSSSPQAKDLSFSNSDVSDETNFGIFNLAKFSKKSALPCDICMRCDTILNRIFVCSSCKQATVHLDCYQSLVYPTGPWKCELCHEMPSDSVTSGEQSDQNGPKACLVQCGLCHGTSGAFRKTVKGQWVHAFCAEWLLETTFRRGQHNPVDGMERLHHKDKDTCSICHRCVGACLKCCTLDCQITFHPSCARDAGLYMNTKRLGNMLQHKAYCCRHSIEQRKAYSQQYGPDEIKGMKQMRVELELLRFLCERIVKREKVKKDLVGCAHDILAARRITAVSSLWTSCYTSGPGASSESATTSVNNKSYGGTIQRSDDVTVRLEDVTVDSTVTKKHTVRFSLHNRDTDRNTADSSTSTISYKRKLDDGESLAFKSHPGTPATALLESRDAEKPIDKKLRDMYQKELVMVTSHQALLKNKTPPERYVYTRRSSMSKRKQCSQHVVQRPGG

SEQ ID NO: 187053 - protein, 1067 aa, Zea Mays
MQEVIVQQEEQPVEIALDQSRTDSIVLPGSREDRWRSLSWLLGARGRFVLTSERPNKKRKLLGADAGLEQLVLLPSPEGEAGSVCDEKGALKPFKRDPGPSIDGGNQEFVHLFCSLWRPEFYVEDMESMEPVTNVVDTQENQSKLVCSLCKVMHGACVRCSHGACRTSFHPICAREFKLQIEIWGKFGHDNVEMRAFCAKHSSVKSISSIQNDKSVSELDSAQVELHDGKPVTGKEQQVRFTRSNKDKFVNSTITTSSCSLNEAHTNEVATISPVLGRTQETQSADMAADQPSSDGNLMSDSGDVSGILRKLVDQGKISLDDIELEPSLRSESVEAAFQPETTAYSPGLKLKMIKWLQNSECAPSVQVKSFKEGSLAQGTLPRSESKNLTTATFQSGQEEAISSIDHHFLENDNANNGDLVQNGFHRCPDPDVNQISGRHLLNMDGYCCYIHPIIEKRLQGLWSNSLEQTIQKNGYHGKTAMEVCKAQSSDTLKLSPDDEIEGEIVYLQSRLLDGVVSMKQRYEDLILKVVQNISYELDSFNKRKWDHIIVNQFLRDLREAKKRGNSERRHKEALAILAATAPSVTPTSRNTTVRKETENNVTPAKRENMPRSITGSSRIGQLSSSPQAKDLSFSNSDVSDETNFGIFNLAKFSKKSALPCDICMRCDTILNRIFVCSSCKATVHLDCYQSLVYPTGPWKCELCHEMPSDSVTSGEQSDQNGPKACLVQCGLCHGTSGAFRKTVKGQWVHAFCAEWLLETTFRRGQHNPVDGMERLHHKDKDTCSICHRCVGACLKCCTLDCQITFHPSCARDAGLYMNTKRLGNMLQHKAYCCRHSIEQRKAYSQQYGPDEIKGMKQMRVELELLRFLCERIVKREKVKKDLVGCAHDILAARRITAVSSLWTSCYTSGPGASSESATTSVNNKSYGGTIQRSDDVTVRLEDVTVDSTVTKKHTVRFSLHNRDTDRNTADSSTSTISYKRKLDDGESLAFKSHPGTPATALLESRDAEKPIDKKLRDMYQKELVMVTSHQALLKNKTPPERYVYTRRSSMSKRKQCSQHVVQRPGG

SEQ ID NO: 187054 - protein, 1161 aa, Zea Mays
MQEVIVQQEEQPVEIALDQSRTDSIVLPGSREDRWRSLSWLLGARGRFVLTSERPNKKRKLLGADAGLEQLVLLPSPEGEAGSVCDVCCLGESDMVSNRMLHCKNCEISVHQKCYGVHVVPDRFWFCVWCTRNIGMPRRLTRSDACRTVLMPCVLCPKEKGALKPFKRDPGPSIDGGNQEFVHLFCSLWRPEFYVEDMESMEPVTNVVDTQENQSKLVCSLCKVMHGACVRCSHGACRTSFHPICAREFKLQIEIWGKFGHDNVEMRAFCAKHSSVKSISSIQNDKSVSELDSAQVELHDGKPVTGKEQQVRFTRSNKDKFVNSTITTSSCSLNEAHTNEVATISPVLGRTQETQSADMAADQPSSDGNLMSDSGDVSGILRKLVDQGKISLDDIELEPSLRSESVEAAFQPETTAYSPGLKLKMIKWLQNSECAPSVQVKSFKEGSLAQGTLPRSESKNLTTATFQSGQEEAISSIDHHFLENDNANNGDLVQNGFHRCPDPDVNQISGRHLLNMDGYCCYIHPIIEKRLQGLWSNSLEQTIQKNGYHEELSWSLHDEDFGGSSTKLVQLTGKTAMEVCKAQSSDTLKLSPDDEIEGEIVYLQSRLLDGVVSMKQRYEDLILKVVQNISYELDSFNKRKWDHIIVNQFLRDLREAKKRGNSERRHKEALAILAATAPSVTPTSRNTTVRKETENNVTPAKRENMPRSITGSSRIGQLSSSPQAKDLSFSNSDVSDETNFGIFNLAKFSKKSALPCDICMRCDTILNRIFVCSSCKATVHLDCYQSLVYPTGPWKCELCHEMPSDSVTSGEQSDQNGPKACLVQCGLCHGTSGAFRKTVKGQWVHAFCAEWLLETTFRRGQHNPVDGMRLHHKDKDTCSICHRCVGACLKCCTLDCQITFHPSCARDAGLYMNTKRLGNMLQHKAYCCRHSIEQRKAYSQQYGPDEIKGMKQMRVELELLRFLCERIVKREKVKKDLVGCAHDILAARRITAVSSLWTSCYTSGPGASSESATTSVNNKSYGGTIQRSDDVTVRLEDVTVDSTVTKKHTVRFSLHNRDTDRNTADSSTSTISYKRKLDDGESLAFKSHPGTPATALLESRDAEKPIDKKLRDMYQKELVMVTSHQALLKNKTPPERYVYTRRSSMSKRKQCSQHVVQRPGG

SEQ ID NO: 187055 - protein, 931 aa, Zea Mays
MCPLQPWTSFHPICAREFKLQIEIWGKFGHDNVEMRAFCAKHSSVKSISSIQNDKSVSELDSAQVELHDGKPVTGKEQQVRFTRSNKDKFVNSTITTSSCSLNEAHTNEVATISPVLGRTQETQSADMAADQPSSDGNLMSDSGDVSGILRKLVDQGKISLDDIELEPSLRSESVEAAFQPETTAYSPGLKLKMIKWLQNSECAPSVQVKSFKEGSLAQGTLPRSESKNLTTATFQSGQEEAISSIDHHFLENDNANNGDLVQNGFHRCPDPDVNQISGRHLLNMDGYCCYIHPIIEKRLQGLWSNSLEQTIQKNGYHEELSWSLHDEDFGGSSTKLVQLTGKTAMEVCKAQSSDTLKLSPDDEIEGEIVYLQSRLLDGVVSMKQRYEDLILKVVQNISYELDSFNKRKWDHIIVNQFLRDLREAKKRGNSERRHKEALAILAATAPSVTPTSRNTTVRKETENNVTPAKRENMPRSITGSSRIGQLSSSPQAKDLSFSNSDVSDETNFGIFNLAKFSKKSALPCDICMRCDTILNRIFVCSSCKATVHLDCYQSLVYPTGPWKCELCHEMPSDSVTSGEQSDQNGPKACLVQCGLCHGTSGAFRKTVKGQWVHAFCAEWLLETTFRRGQHNPVDGMERLHHKDKDTCSICHRCVGACLKCCTLDCQITFHPSCARDAGLYMNTKRLGNMLQHKAYCCRHSIEQRKAYSQQYGPDEIKGMKQMRVELELLRFLCERIVKREKVKKDLVGCAHDILAARRITAVSSLWTSCYTSGPGASSESATTSVNNKSYGGTIQRSDDVTVRLEDVTVDSTVTKKHTVRFSLHNRDTDRNTADSSTSTISYKRKLDDGESLAFKSHPGTPATALLESRDAEKPIDKKLRDMYQKELVMVTSHQALLKNKTPPERYVYTRRSSMSKRKQCSQHVVQRPGG

SEQ ID NO: 187056 - protein, 1090 aa, Zea Mays
MQEVIVQQEEQPVEIALDQSRTDSIVLPGSREDRWRSLSWLLGARGRFVLTSERPNKKRKLLGADAGLEQLVLLPSPEGEAGSVCDEKGALKPFKRDPGPSIDGGNQEFVHLFCSLWRPEFYVEDMESMEPVTNVVDTQENQSKLVCSLCKVMHGACVRCSHGACRTSFHPICAREFKLQIEIWGKFGHDNVEMRAFCAKHSSVKSISSIQNDKSVSELDSAQVELHDGKPVTGKEQQVRFTRSNKDKFVNSTITTSSCSLNEAHTNEVATISPVLGRTQETQSADMAADQPSSDGNLMSDSGDVSGILRKLVDQGKISLDDIELEPSLRSESVEAAFQPETTAYSPGLKLKMIKWLQNSECAPSVQVKSFKEGSLAQGTLPRSESKNLTTATFQSGQEEAISSIDHHFLENDNANNGDLVQNGFHRCPDPDVNQISGRHLLNMDGYCCYIHPIIEKRLQGLWSNSLEQTIQKNGYHEELSWSLHDEDFGGSSTKLVQLTGKTAMEVCKAQSSDTLKLSPDDEIEGEIVYLQSRLLDGVVSMKQRYEDLILKVVQNISYELDSFNKRKWDHIIVNQFLRDLREAKKRGNSERRHKEALAILAATAPSVTPTSRNTTVRKETENNVTPAKRENMPRSITGSSRIGQLSSSPQAKDLSFSNSDVSDETNFGIFNLAKFSKKSALPCDICMRCDTILNRIFVCSSCKATVHLDCYQSLVYPTGPWKCELCHEMPSDSVTSGEQSDQNGPKACLVQCGLCHGTSGAFRKTVKGQWVHAFCAEWLLETTFRRGQHNPVDGMERLHHKDKDTCSICHRCVGACLKCCTLDCQITFHPSCARDAGLYMNTKRLGNMLQHKAYCCRHSIEQRKAYSQQYGPDEIKGMKQMRVELELLRFLCERIVKREKVKKDLVGCAHDILAARRITAVSSLWTSCYTSGPGASSESATTSVNNKSYGGTIQRSDDVTVRLEDVTVDSTVTKKHTVRFSLHNRDTDRNTADSSTSTISYKRKLDDGESLAFKSHPGTPATALLESRDAEKPIDKKLRDMYQKELVMVTSHQALLKNKTPPERYVYTRRSSMSKRKQCSQHVVQRPGG

SEQ ID NO: 187057 - protein, 1142 aa, Zea Mays
MQEVIVQQEEQPVEIALDQSRTDSIVLPGSREDRWRSLSWLLGARGRFVLTSERPNKKRKLLGADAGLEQLVLLPSPEGEAGSVCDVCCLGESDMVSNRMLHCKNCEISVHQKCYGVHVVPDRFWFCVWCTRNIGMPRRLTRSDACRTVLMPCVLCPKEKGALKPFKRDPGPSIDGGNQEFVHLFCSLWRPEFYVEDMESMEPVTNVVDTQENQSKLVCSLCKVMHGACVRCSHGACRTSFHPICAREFKLQIEIWGKFGHDNVEMRAFCAKHSSVKSISSIQNDKSVSELDSAQVELHDGKPVTGKEQQVRFTRSNKDKFVNSTITTSSCSLNEAHTNEVATISPVLGRTQETQSADMAADQPSSDGNLMSDSGDVSGILRKLVDQGKISLDDIELEPSLRSESVEAAFQPETTAYSPGLKLKMIKWLQNSECAPSVQVKSFKEGSLAQGTLPRSESKNLTTATFQSGQEEAISSIDHHFLENDNANNGDLVQNGFHRCPDPDVNQISGRHLLNMDGYCCYIHPIIEKRLQGLWSNSLEQTIQKNGYHEELSWSLHDEDFGGSSTKLVQLTGKTAMEVCKAQSSDTLKLSPDDEIEGEIVYLQSRLLDGVVSMKQRYEDLILKVVQNISYELDSFNKRKWDHIIVNQFLRDLREAKKRGNSERRHKEALAILAATAPSVTPTSRNTTVRKETENNVTPAKRENMPRSITGSSRIGQLSSSPQAKDLSFSNSDVSDETNFGIFNLAKFSKKSALPCDICMRCDTILNRIFVCSSCKATVHLDCYQSLVYPTGPWKCELCHEMPSDSVTSGEQSDQNGPKACLVQCGLCHGTSGAFRKTVKGQWVHAFCAEWLLETTFRRGQHNPVDGMERLHHKDKDTCSICHRCVGACLKCCTLDCQITFHPSCARDAGLYMNTKRLGNMLQHKAYCCRHSIEQRKAYSQQYGPDEIKGMKQMRVELELLRFLCERIVKREKVKKDLVGCAHDILAARRITAVSSLWTSCYTSGPGASSESATTSVNNKSYGGTIQRSDDVTVRLEDVTVDSTVTKKHTVRFSLHNRDTDRNTADSSTSTISYKRKLDDGESLAFKSHPGTPATALLESRDAEKPIDKKNKTPPERYVYTRRSSMSKRKQCSQHVVQRPGG

SEQ ID NO: 187058 - protein, 59 aa, Zea Mays
MTRDPLQGLYKVPLASENPLRFMGRALARIPRLTTIAAKSTREPPCMQLPYCPCPFRVR

SEQ ID NO: 187059 - protein, 90 aa, Zea Mays
MRAPYRFLRCTVFCPRYRWLRGSGEQSPPPRLLIPAIESTNNPTNLPRCTLTQEEIPRHKVTGVGYESLHLWRRTMVTGHVPTFICVGEG

SEQ ID NO: 187060 - protein, 314 aa, Zea Mays
MSHSGKSETVRLPKVAVDISALRGSSMNISASSNSLVGAKRGRGRPPKVVVAGKEKMQPESVQSVDASLTKRGRGRPRKEKALESGRMKASQMTEGQREALTADQAGAVQNEVEDRDLQSLGTPLTEKRGRGRPRKRPLEIETAKAGAAKRGRPRKEKTSETGDLKVAQMTEGRHEALPAQAVDQTGPVQNEVEAMILQSLATTPLMEKRSRGRPRKRPLETETAETQVAASVEKRGRGRPRKKNPSAGWSAGTRDTALKGIKRGPGRPRKARPFETESVKTALEVSRDLTEDGPQKDGDLVSGKKADTHGVVW

SEQ ID NO: 187061 - protein, 129 aa, Zea Mays
MKKKQKKKSPTRNKQHLALILKRCVSQISCLFVALDSSVVRMAAPKPISRLISHVILDLDGTLLNTDSVVSKVVKPFILKNGKTWDSKKAHKLVGKTPYEAAAVVLEDYGLPYSTEEFLSMITPMFSEQ

SEQ ID NO: 187062 - protein, 239 aa, Zea Mays
MYAKCWSTREAWMVFQQMLERDIIVWNAMIMGLGMIGHEKIAFVLVGQMKNSGVKLNDNTFIGLLCSCTHTSLVNDGRRYFHNMTHVYSISPRIEHYGCMVDLLSRAGLLEEAHQLIGDMPMLANAVVWGARLGGCKIHRNADLAEYVLKQLTRLEPWNSGNYVMLSNIYSNSGRWEDAAKLRLEMKAKGIEKVAASSWVELDDKVHKFYVGDDSHPLSDKIYAKLDELGHGIPCRLSP

SEQ ID NO: 187063 - protein, 199 aa, Zea Mays
MAAPKPISRLISHVILDLDGTLLNTDSVVSKVVKPFILKNGKTWDSKKAHKLVGKTPYEAAAVVLEDYGLPYSTEEFLSMITPMFSEQWCNLKPLPGANRLIKHLKTNGVPTALASNSPRCNIEAKIFFQQGWKESFSAIVGGDEVEKGKPSPNIFLEAAKRMNCAPSNCLVIEDSLCYRWKSCRNACHSCTFNTQKDC

SEQ ID NO: 187064 - protein, 236 aa, Zea Mays
MNCAPSNCLVIEDSLPGVTGGKAAEMHVIAVPSIPKKTAEFSSADEVINSLLDVRPEKWGLPPFNDWIEGTLPIEPWFIGGPVIKGFGRGSKVLGIPTANLPAENFSDVVSEHTSGVYFGWAGLSTRGIYKMVMSIGWNPYFDNTEKTVEPWLLHNFGEDFYGEEVRLAIVGYIRPEANFPSLESLIERIHEDGRVAEKALDLPMYAKYKDSPYLRNPSKHGSSTTGGTQSEMDSK

SEQ ID NO: 187065 - protein, 128 aa, Zea Mays
MHVIAVPSIPKKTAEFSSADEVINSLLDVRPEKWGLPPFNDWIEGTLPIEPWFIGGPVIKGFGRGSKVLGIPTANLPAENFSDVVSEHTSGVYFGWAGLSTRGIYKMVMSIGWNPYFDNTEKTVVGTL

SEQ ID NO: 187066 - protein, 85 aa, Zea Mays
MSAIVVVVRPRQISPSTRVGSVVAQPLQPPQPMAPVGTARSGARGQDQQRQQVPARLPRRWQPPALDPPARNRCRAETLIRGGLG

SEQ ID NO: 187067 - protein, 246 aa, Zea Mays
MDNIITTRLLVPASEIACFDGREGSLSDIQRQTSANVQILPREDLPSCALESDELIQIVGEIKAARNALIQVTTKLRSFLYREMPDPIQVGNINLHGAISPVAGSPRGPYQGNDIPMGAYHQASQLATSWHSKDSGGSASGSFEQGSNINDDIRQSATKRFAVPLVTRSTLEIVIPNSAVASLTMRAGSKLAQISEISGAAVTLAEDRSDILQKVVRISGTPEQASKAENLLQGFILSIPDDIPSG

SEQ ID NO: 187068 - protein, 106 aa, Zea Mays
MLPPRSAAAAPCSVAGLLFHRFSSYSSSSVYSVRHHASSALSSQPSTRPTTTWSSSPHSSSRRIRGFAAWASAPGPAGSADSLATKADTVTVVDTSGDGRHVCIDV

SEQ ID NO: 187069 - protein, 158 aa, Zea Mays
MQEAKHLTTSKLPPQSQSSSPSPSAPAANPPPYHHDYGTFHRPFQPTLPVVGPAYHDYHASPIGFGSQGFVASPGAVQQQVFVEGIPVREPPLPFCGVGVGWFLFLLGFFLAAIPWYAGAFLLFFVALDHREKPGLIACTVAMTRCTMKLEMGLRGYM

SEQ ID NO: 187070 - protein, 95 aa, Zea Mays
MQEAKHLTTSKLPPQSQSSSPSPSAPAANPPPYHHDYGTFHRPFQPTLPVVGPAYHDYHASPIGSYWGSSWRQSPGMLVRSFYSLLLWTTERSLD

SEQ ID NO: 187071 - protein, 150 aa, Zea Mays
MHVKAHILDVVCDVGPGEGEVLEGFENALVGHHVAYRDTGIVGDLRLGVNRRGARLAVEHAIPLQDFEYVLPLMEKEALWTALHVDPQKAVEKTQVLHRELLLPGGDCALKEGGTGRREQNIVDIQQQVEGVSVVPEDEQGRVQLSFDEA

SEQ ID NO: 187072 - protein, 81 aa, Zea Mays
MLTPRHTLHLMTLMQPWRALNRHWSWSQMMLESKESWLLQRRRLLTEEIRSGRHLLGFSNLLESLTRATKRIIDLQFLSPV

SEQ ID NO: 187073 - protein, 86 aa, Zea Mays
MLKLFSDKDRHTLHLMTLMQPWRALNRHWSWSQMMLESKESWLLQRRRLLTEEIRSGRHLLGFSNLLESLTRATKRIIDLQFLSPV

SEQ ID NO: 187074 - protein, 306 aa, Zea Mays
MIQGGDTTAGDGTGGESIYGSKFEDENFVLKHERKGMLSMANSGPNTNGSQFFITTTRTPHLDGKHVVFGRVMKGMGVVRSIEHVSVGEADCPTLEVKIVDCGELPEGADDGVVNFFKDGDTYPDWPNDLEEKPAEVSWWMDAVESAKAYGNDNFKKQDYKAALRKYRKALRYLDLCWEKEEIDEDKSTALRKTKSIILTNSSACKLKLGDSSGALLDADFALREREGNAKAFFRQGQAHIALNDIDAAVESFKQALELEPNDAGIKRELAAAKKKIADRRDQERKAFARIFQSSGKSDKSNEENN

SEQ ID NO: 187075 - protein, 92 aa, Zea Mays
MEICDRSKDVIINGGENISSVEVESVLYSHPAVNEAAMVAWPDDFWGETSCAFVSLKEEGSTAADVIAIWFNIERVSPWNQWYSVVACSAWW

SEQ ID NO: 187076 - protein, 352 aa, Zea Mays
MLPDHFTFGSALKACGAISVLFNVELIHACIIKLGYWDENVAIASLIDSYAKCRSLSSARVIYDSMCEPDLVSSTALISGYSMDRNYSDDAMKLFCKIHRKGLRIDAILLSSLLGVCANVASIKFGTQIHAYMHKKQPMGDLALDNALVDMYAKSGEFLDSRRAFDEMPNRNVISWTSLITSCAQHGFGEDAVTLFARMEEDGVKPNDVTFLSLLSACSHSGMMNKGMEYFTSMMSKYGIDPRFKHYSSAVDLLARGGQLEDAWMLVQNTNTECKSSMYGTMLGACKVHGNMPLGETAAKNLLSIDPESSVNYAVLANMYAESHLWEDAQRTRKLLVETSKGKEAGFSVISR

SEQ ID NO: 187077 - protein, 204 aa, Zea Mays
MGSLDRRQGGCRQGWSLHRGTPPLAGPAVRSQGAGLSSPDDGAPAAAAARWCPSSCYLPVSSVWVLLVPAGLSIPTGPSQPASAAELLRPAVRSDDLAFGGGGALPPPVPRLHGAAASNAKDDTATTTAAGGAAGHRRATVGAASAAAGAAGHGAASAPASPATDSCPFLPGSLAPAAQLQAPSAAASYGSIASQHNRRIAATC

SEQ ID NO: 187078 - protein, 330 aa, Zea Mays
MAAAPAASSSTSGSPAAGGPRSRFGDTTLTKVFVGGLAWETPSEGLRQHFERYGDILEAVVITDRLTGRSKGYGFVTFREPEAARRAVQDPNPTIAGRRANCNIASLGPPRPTQPGGRGGPYTVGPHHLQVPQFVPRAPASPLQMMVPQQQQQHGGAPAAAIYPSPQFGYCWYPPDFQYQQALASPQALQNYYAQLYGLTTSPSAAAAPYHHQYLGYMAPPPPTPRMILPPPPPLAAQQVTAVQPLVQHPPPPAQQVTVQPLLQHPPPQIHAPFFPAPSLPQHNFRLHPPPQAMAVLPPNTTAGGSLPPADQAAAPAARATNASSTRPGA

SEQ ID NO: 187079 - protein, 267 aa, Zea Mays
MLPPPTHPILQFPSPLLSSTFSSHHMHNRRCTCLWLPPSSTLHACSDTFHCYLFALKTSTMAMACSADYLFHAAKPDLTLAICHVVVVVIVVVYSSCAINSRLIFDNTRECAILMTTEQALASPQALQNYYAQLYGLTTSPSAAAAPYHHQYLGYMAPPPPTPRMILPPPPPLAAQQVTAVQPLVQHPPPPAQQVTVQPLLQHPPPQIHAPFFPAPSLPQHNFRLHPPPQAMAVLPPNTTGGSLPPADQAAAPAARATNASSTRPGA

SEQ ID NO: 187080 - protein, 331 aa, Zea Mays
MAAAPAASSSTSGSPAAGGPRSRFGDTTLTKVFVGGLAWETPSEGLRQHFERYGDILEAVVITDRLTGRSKGYGFVTFREPEAARRAVQDPNPTIAGRRANCNIASLGPPRPTQPGVAGRGGPYTVGPHHLQVPQFVPRAPASPLQMMVPQQQQQHGGAPAAAIYPSPQFGYCWYPPDFQYQQALASPQALQNYYAQLYGLTTSPSAAAAPYHHQYLGYMAPPPPTPRMILPPPPPLAAQQVTAVQPLVQHPPPPAQQVTVQPLLQHPPPQIHAPFFPAPSLPQHNFRLHPPPQAMAVLPPNTTGGSLPPADQAAAPAARATNASSTRPGA

SEQ ID NO: 187081 - protein, 67 aa, Zea Mays
MTTSSAPPSASREALVAEHAADGRTLLFRHMEETGRAVAKLRPEEMGKALGESSEDSDGKESNRSHC

SEQ ID NO: 187082 - protein, 406 aa, Zea Mays
MESTDKNDKRNAVTEESSNPGQNCEDDGDFSMKTEMLNVEEAPSFSNDKLNNESEVQIQEGGNDSEEGLNGQMNERTSSDVMECASSNEITKENLSEDKTEEPVFDGTEVLEIEEMRRSSNQSGELDSEAQGSVLNDRAVAIKNFVKERSAIAVSTFMRRLSGKKDENEFKAEADKTIGSEYMDCEKTRTDAESNPKEVQQKSVERTVWNPLNFIKIGRDSDTFVTGEALNENVPGLLEIPPLKGRIIIYTKLGCEDCKKVRLFLLRKRLKYVEINIDIFPGRKLELEKNTGSSTVPKVYFNDLLIGGLIELRKMEDSGILDENIDVLFNEESPYSAPLPPLLGEDDESGSGKIDELATIVKKMRESITPKDRFYKMRRFSNCFLGSEAVDFISEDQYLERDELSM

SEQ ID NO: 187083 - protein, 503 aa, Zea Mays
MESTDKNDKRNAVTEESSNPGQNCEDDGDFSMKTEMLNVEEAPSFSNDKLNNESEVQIQEGGNDSEEGLNGQMNERTSSDVMECASSNEITKENLSEDKTEEPVFDGTEVLEIEEMRRSSNQSGELDSEAQGSVLNDRAVAIKNFVKERSAIAVSTFMRRLSGKKDENEFKAEADKTIGSEYMDCEKTRTDAESNPKEVQQKSVERTVWNPLNFIKIGRDSDTFVTGEALNENVPGLLEIPPLKGRIIIYTKLGCEDCKKVRLFLLRKRLKYVEINIDIFPGRKLELEKNTGSSTVPKVYFNDLLIGGLIELRKMEDSGILDENIDVLFNEESPYSAPLPPLLGEDDESGSGKIDELATIVKKMRESITPKDRFYKMRRFSNCFLGSEAVDFISEDQYLERDEAVEFARKLARKYFFRHVLDENVFEDGNHIYRFLDHDPIVMTQCYNIPRGIIDVAPKPIAEVASRLRLLSCAIFEAYVSADGRHVDYQSIQGSEEFKSSPT

SEQ ID NO: 187084 - protein, 605 aa, Zea Mays
MESTDKNDKRNAVTEESSNPGQNCEDDGDFSMKTEMLNVEEAPSFSNDKLNNESEVQIQEGGNDSEEGLNGQMNERTSSDVMECASSNEITKENLSEDKTEEPVFDGTEVLEIEEMRRSSNQSGELDSEAQGSVLNDRAVAIKNFVKERSAIAVSTFMRRLSGKKDENEFKAEADKTIGSEYMDCEKTRTDAESNPKEVQQKSVERTVWNPLNFIKIGRDSDTFVTGEALNENVPGLLEIPPLKGRIIIYTKLGCEDCKKVRLFLLRKRLKYVEINIDIFPGRKLELEKNTGSSTVPKVYFNDLLIGGLIELRKMEDSGILDENIDVLFNEESPYSAPLPPLLGEDDESGSGKIDELATIVKKMRESITPKDRFYKMRRFSNCFLGSEAVDFISEDQYLERDEAVEFARKLARKYFFRHVLDENVFEDGNHIYRFLDHDPIVMTQCYNIPRGIIDVAPKPIAEVASRLRLLSCAIFEAYVSADGRHVDYQSIQGSEEFKRYIRTVEELQRVEIDYLSREEKLAFFINLYNMMAIHALVTCGHPAGPLDRKKFFGDFKYIIGGCAYSLSAIQNGILRGNQRPPYNIAKPFGQKDRRSKVLLTRGYR

SEQ ID NO: 187085 - protein, 68 aa, Zea Mays
MDTVGTSSLDETFGFTMATMNGSESVFATCKGDKNMNTLMHHPFSNWADTVSRYFARSSWPYQERRCS

SEQ ID NO: 187086 - protein, 102 aa, Zea Mays
MGSGSFLKVLANNFDVLAGLPFWSYAKLFFNCWLVLPWFNGAAYVYDHFVRPMFVNRQIVNIWYIPRNEKLGKSDDVLSAAERYIEQNGPEAFEKQLGGWRG

SEQ ID NO: 187087 - protein, 702 aa, Zea Mays
MMDYIIPQTKHSIKAPVPSKTVVDQVRLVADVADDHVPDDHDEPPAHLPGTGRVQAGASRLLRSAALGFGLGLARRDPARARAETTPPSPALAPEEVTSNRMSYSRFLDYLNANAVRKVDFFENGTVAVVELDDPALASRVHRVRVQLPAGGLPAELVRKLRDRGVDFAAHPVEPNLGLMFLDLLLNFGFPLLFLASLIWRSVTMNNPGAGGGGPNLPFGLGRSKAKFQMEPNTGITFDDVAGVDEAKQDFQEIVQFLKSPEKFTAVGARIPKGVLLVGPPGTGKTLLAKAIAGEAGVPFFSLSGSEFIEMFVGVGASRVRDLFNKAKANAPCLVFIDEIDAVGRQRGTGIGGGNDEREQTLNQLLTEMDGFSGDSGVVVIAATNRPDILDAALLRPGRFDRQVSVGLPDVRGREEILRVHSSNKRLDPDVSLSVVAMRTPGFSGADLANLMNEAAILAGRRGKDRIGVKEIDDSIDRIVAGLEGTSMTDGKSKLLVAYHEIGHAVCATLTPGHDAVQKVTLIPRGQSRGLTWFLPGEDPTLVSKQQIFARIVGGLGGRAAEEVIFGEPEVTTGAAGDLQQVTQVARQMVTTFGMSEIGPWALMEPAAQSGDVVLRMLARNSISEKLAADIDRAAKHIIDQAYEVAKEHVRRNRAAIDQLVDVLMEKETLTGDEFRALLSEHVDIGREQRETAARKKLVVTA

SEQ ID NO: 187088 - protein, 91 aa, Zea Mays
MTETRTKLLKIRQQHMLKNKCANKHSNNQALISAPTVCRCLASFACFLYIHAGAPNLLMMFFIQNLSCLSEHLFNVSIHHLWNKTHGRAMV

SEQ ID NO: 187089 - protein, 217 aa, Zea Mays
MRHRHREPDPPAHLVGMLPLQVLQHSFQVGAPGAQHHQLHVLPRDPRHRVPDDVHALLSIQTPDEAEQRHVVAHFQAQLPLQGRLALPLSSVECLEGVVGVAVRPQVHVHLGVPLLVVDAVHDAIDLPVVRTDDVVEAPAAFHCLQLPQVAAADSHHPVCHLQTRGKDVGVLATDGIVQLEMLKVVFRQVHVREFIYRTTALVGDVMYDEDGASVLH

SEQ ID NO: 187090 - protein, 114 aa, Zea Mays
MEVPPLPTASEGERRSVATGSCLPRLVSGVLSGALTGIFAVAGGLTGAFTGALAGRASDSGVLRGAGLGAFAGAVLSIEVLEASRAYWSADRSSPQSTSSMVRELLLQFVRGIS

SEQ ID NO: 187091 - protein, 159 aa, Zea Mays
MEVPPLPTASEGERRSVATGSCLPRLVSGVLSGALTGIFAVAGGLTGAFTGALAGRASDSGVLRGAGLGAFAGAVLSIEVLEASRAYWSADRSSPQSTSSMGDFIEQLLHARFVQDQYEPSAYMAYRWQIFSNRLALPTMMICLMSLKMFYPKGSHKIL

SEQ ID NO: 187092 - protein, 118 aa, Zea Mays
MEVPPLPTASEGERRSVATGSCLPRLVSGVLSGALTGIFAVAGGLTGAFTGALAGRASDSGVLRGAGLGAFAGAVLSIEVLEASRAYWSADRSSPQSTSSMWFMGAANLRKITCRGIS

SEQ ID NO: 187093 - protein, 95 aa, Zea Mays
MAYRWQVGIADNDDMFDVLEDVLSEGLSQDTLKKLPHHVVPAPIGESLSCAICLQDVISGETARKLPKCSHTFHQPCVDRWFIDHGSCPVCRQDV

SEQ ID NO: 187094 - protein, 204 aa, Zea Mays
MEVPPLPTASEGERRSVATGSCLPRLVSGVLSGALTGIFAVAGGLTGAFTGALAGRASDSGVLRGAGLGAFAGAVLSIEVLEASRAYWSADRSSPQSTSSMGDFIEQLLHARFVQDQYEPSAYMAYRWQDVLSEGLSQDTLKKLPHHVVPAPIGESLSCAICLQDVISGETARKLPKCSHTFHQPCVDRWFIDHGSCPVCRQDV

SEQ ID NO: 187095 - protein, 154 aa, Zea Mays
MEVPPLPTASEGERRSVATGSCLPRLVSGVLSGALTGIFAVAGGLTGAFTGALAGRASDSGVLRGAGLGAFAGAVLSIEVLEASRAYWSADRSSPQSTSSMGDFIEQLLHARFVQDQYEPSAYMAYRWQRCFIRRALTRYSKEVATSCGSCTNW

SEQ ID NO: 187096 - protein, 140 aa, Zea Mays
MEVPPLPTASEGERRSVATGSCLPRLVSGVLSGALTGIFAVAGGLTGAFTGALAGRASDSGVLRGAGLGAFAGAVLSIEVLEASRAYWSADRSSPQSTSSMGDFIEQLLHARFVQDQYEPSAYMAYRWQMFYPKGSHKIL

SEQ ID NO: 187097 - protein, 202 aa, Zea Mays
MGEDSPMFDFEEGLEEGRLSEDCDDGFGLPGLKASGLAQTPVAEKKVFPVRLGKFKNVGTHGAVEGGHANANANANANPRVLTRDEGESSSSRLDGRRCFSMGTYQYVLGTSELRVALQPGCIRNGTGGAMRGMPPGLSSINADIMEGKKICARNKGESFSVSKIWQWSNLKGKLPAGSDECSDAGSLPWMKKGGAVDTSNL

SEQ ID NO: 187098 - protein, 176 aa, Zea Mays
MIMVEGISQFCNDLQVDPQDIVMLVISWHMKAATMCEFTRQEFIGGLQSIGVDSIEKFRGKLPSLRAELKDDNKFRDIYNFAFTWAREKSLSLETAIGMWQLLFAERNWPLLDHWCQFLQVRHNKAISRDTWSQLLEFVKTTDPQLSNYDDEGAWPYLIDEFVEYLTENGLVQRKR

SEQ ID NO: 187099 - protein, 218 aa, Zea Mays
MYKLGRGNRDKVQQFMTITGASQPQVSVVNTRHLEDIFNRYKEPDADMIMVEGISQFCNDLQLVISWHMKAATMCEFTRQEFIGGLQSIGVDSIEKFRGKLPSLRAELKDDNKFRDIYNFAFTWAREKGQKSLSLETAIGMWQLLFAERNWPLLDHWCQFLQVRHNKAISRDTWSQLLEFVKTTDPQLSNYDDEGAWPYLIDEFVEYLTENGLVQRKR

SEQ ID NO: 187100 - protein, 1285 aa, Zea Mays
MVKGNFSQFEDNSGNAKVTIEKLPETEEATKNPDQGDEATRKPVENEPTDEKTSKNNVAAEKQLQSGVDVTKPSESTTAENERGTEGESKSNVVNKKPSESIVEKPLQNSVVDVKPSGNSAAMRKPWQRSMQTDKPFLSSTSTVNPSSSSDTTEKLSSSNGVDMKQSESSTLVKTTCKQNSPTENPPQSVLPSDKPSATSVDDAKPSESSKVIKKPWQRNMAAEKQLQNSAPSQKSVATDKPSPTTGMKSLDNTTEVKSPWGRRMFNNKSLKRSVDTEKSSETSVVDVRPGETSTVAPVPQQQTENVEKPSATSADDAKSADDTKSADDVKPSVASPDAKSTDDVKSSENNAAVVRKPWQRNIGTGKQPLTTVVGPKTTETSGTVKRLWQRSAATASKSGTAVVTPLQSSVVVSKPFQSNVAVKKTWQRSVTPENQLESNMSSNKPLPSKVVVESLLQSNTVEKVFQSTVPTEEPQKGIMATENQSQTIKVTKKSNETSMELSVTSETTKPPPLAATVLQSDVSTEQPSQTDMPTMAPSQIPEPTEKPSESDFNAEKLSESVVKAEKSSTTDTAAEKPLPSMITEKVESVAGTLKPSQSDTALQEILERNMATEEILQTAMAVEDAPPTNLITEKSLMKDASEEPVQTNEPSEQPLKTEEIEKPQQSEKIATDTRGSEVSTEEMLELESNATKLNKDQSELEGLSSGRNPPNFQSNPNAGQRSESKGIVAEKAADHIMEAEDDVDAEHSSESQSVAPAEVRKEQPSEHQKDVDMEQLLEPQNQDHPWNPLDPVSDTAAKDSSEPKSDIATEKPAESQNNAEQSVEQQSEPQSDKSTERPEVHQSNTSNDELSRLQNDAGTDKLSVQSSDPESNASVSKPSESQTDVATMEALEPQIDAPPDKATDQPVKPQDDASAKNPMGTESDAVCDKPSESSSDTETLLVCHQNSSITTDEPVQGGISYDTPHQRSAPIETTPGSETVVDDCIHHEDTSSKPSEENKAIEEPEEVSAKLPDDHVTSEKSSEEDKENAEASVDSAPLGNPLEVNEESSNPSGDTVTPEKPLEEDKTSAEPSESDASFGKILEADEVSANPSEDIATPEKPLEEGVGSVEPSEDNSVLDKPLEEEEVDAKPVKDVVTPEKPLEEGSTTAEPLEDNAAHEEAKEEDEVIAKPLSSVALEKSLEGSEASVEPSEDNAALEKPSEDDEANAKSSEDSVYVEKPQQEEDDNGVKALEEGVSPEKSAAGKPLEEDPVHEKPADAVAEPSSQDDTATEKPSATTDTAETA

SEQ ID NO: 187101 - protein, 89 aa, Zea Mays
MEAKTVGGGGVGAALGMRSSAVAETWCPAPFAKQDFSSILFRSSNISFSGQFIQKIKYACIFWRSCHGKKLSYKTVLIALYRICYHMFK

SEQ ID NO: 187102 - protein, 66 aa, Zea Mays
MNRYVIHAIGLKIDGPGDNHARSDLIRPIVNKRLGSYYATKRYPAPILDPPFESNDRSLSLTLRSP

SEQ ID NO: 187103 - protein, 155 aa, Zea Mays
MISPAHLAFAAAFLLVVRSSAPGAAAARPIFDGKPSPSEATATARWLAAQNTWGVLSTISSDLSGAPFGNVVSYSDGVPGEGRGIPYFYLTTLDPSARDALEDERTSFTLSEFPLGTCGEIDPENPTCAKLTLKWKGTKNYIHDKMIDHSPFVCI

SEQ ID NO: 187104 - protein, 55 aa, Zea Mays
MLLIMAPWKEYLHGTNGKCFRLQKFLKCDVFSWSHMHGDTWKARVLFWSGTFFDV

SEQ ID NO: 187105 - protein, 87 aa, Zea Mays
MVFGGATAVLLYTADKLQLHSVDDVKTKGKDALQPRADMIKEQIAPLRSWAEEMSRKWHFEGGKEAKEKSGIVKELSRILGSRTPPG

SEQ ID NO: 187106 - protein, 177 aa, Zea Mays
MSFLAGRLAAKEGAYFLQESKTAVGRLAEKLPPSASAPGGASAQPSPDVLPEILRHSVPIKGTPPPAEASLSASSRWALPPGGGEAAGLHPDALNPLRSYVSLPQATFGPKRWQLPNEQPNYLASTANERRRDRAPPPLDPENLKALGRHSLLQLLWCLEEQQLCCCTQQISYSCIQ

SEQ ID NO: 187107 - protein, 479 aa, Zea Mays
MLTRLLALAGHALAEAETRPEPKDLWEEPINATLWRPCSDQRDWKASEGTNGYIMISANGGINQQRVAICNAVTISRLLNATLVLPKFLYSNVWLDKSQFGDIYQEEYFIKYLKSDIQIVKDLPVELQSLDLEAIGSLVNDTDVMKEAKPSLYMKKILPILLRNRVVHFIGFGNRLSFDPIPSDLQRLRCRCNFHALRFVYKIQETGAVLVERLHGHRASSSPLKDNLLGQFAVKSDPRANKSDASKYLAVHLRFEIDMVAYSLCYFGGGKDEEDELEAYRQIHFPVLSELKKMTKLPSAAFLRSEGKCPLAPEEAVLMLAAIGFKRSTNIYVAGAEIYGGKDRMAAISRLYPALVTKETLLSPSELEPFRNFSSQLAALDFIACAAADAFAMTDPGSQFSSLVQGYRMYYGGGDLPTIRPNKRRLASILVKNATIEWNGFENRVRKLIQQTKQVHERPVARSVFRHPRCPECMCRTEH

SEQ ID NO: 187108 - protein, 221 aa, Zea Mays
MVAYSLCYFGGGKDEEDELEAYRQIHFPVLSELKKMTKLPSAAFLRSEGKCPLAPEEAVLMLAAIGFKRSTNIYVAGAEIYGGKDRMAAISRLYPALVTKETLLSPSELEPFRNFSSQLAALDFIACAAADAFAMTDPGSQFSSLVQGYRMYYGGGDLPTIRPNKRRLASILVKNATIEWNGFENRVRKLIQQTKQVHERPVARSVFRHPRCPECMCRTEH

SEQ ID NO: 187109 - protein, 265 aa, Zea Mays
MAAAASGGDTPKQLLSIIRDFAYEKSHGERRVSDLRRRLADARAAADVAAAELDAAKRAREAAEQEFRGSQVQDAIAADSILALEATISCLHEEISKASTDLDALKSKEDSEREDFISKMYEMNAKIRQFQQMVSLELAEYNHCELPSTDGEHVKDKSKTVDSEGISEELSDKVSNIEAEVQLLEEEYKKDLLYHDKVRQELAEVQAKRALMEAVMEETKQLQELGERAAELEKVHASLAVELQRRYVCPGCGVNNMPGLEEAAN

SEQ ID NO: 187110 - protein, 968 aa, Zea Mays
MSYLERWWRDATPKMREAFAKLVRDGQLEIVSGGWVMNDEANSHYFAIIEQMMEGNMWLNDTIGVIPKNSWSIDPFGYSSTMAYLLRRMGFHNMLIQRTHYEVKKELAMKKNLEYLWRQNWDIEETTDIFVHMMPFYSYDIPHTCGPEPAICCQFDFARMRGFSYESCPWRSDPVEINPDNVEERATTLLDQYRKKSTLYRTNTLLIPLGDDFRYVSMEEAEVQFRNYEKLFDYINSNPHLNAEVKFGTLEDYFSTLRDEAEKINYSRPGELGSAELQGFPTLSGDFFTYADRNQDYWSGYYVSRPFFKAVDRVLEQTLRAAEILGSFVLGYCQKFQCAKLPISFSHKLTAARRNLALFQHHDGVTGTAKDHVVVDYGTRMHTSLQDLQLFMSRAVEVLLGDFHDRSDPTLLSHFESVQERSKYDVQLVHKVLHPLEGKAQSVVFFNPLEQTRDEIVMVVVSSPDVSVLNSNGSCLPSQLSPEWQFVSDENISTGRHRLYWRAYVPPLGLETYYVVTGQDCEKAIPAAVKTYTTEQEFSCPQPYDCSKLEAKTVEMKNSNYTLSFDTSRGLLQTVTRHKDGQQTVIGEEIGMYKSHGSGAYLFKPVGDARSIVEEGGHFILTEGPLVQEAHSLPKTEWRKSPLSHSTRIYNCGDAIQDMLIEKEYHVELVGHAFNDRELIVRYKTDIDNQRIFYSDLNGFQMSKRQTYDKIPLQGNYYPMPSLAFLQDSHGNRFSVHSKQSLGAASLKNGWLEIMLDRRLVQDDGRGLGQGVMDNKPMNVIFHLLTESNVSALPKTHSLHTLQPSILSHRVGAHLNYPMHAFMSKKPHEKSFKRAQQSFAPLTASLPCDIHIVNLKVPRPLRFPHTESAEPKFAVLLQRRGWDASYCKRGGLQCTTVGEEPVNLFYMFKDLSAVNVKATSLNLLHDDPEMLGYLEQTGDVAQEGDVLISPMEILAYKLDLQPPSSQEE

SEQ ID NO: 187111 - protein, 362 aa, Zea Mays
MKCKYVELTSDFVYPYRNQGGFDMICSGRDKIETPEQFKQAEDTANKLDLDGLVVIGGDDSNTNACLLGEYFRSRNMKTRVIGCPKTIDGDLKCKEVPTSFGFDTACKIYSEMIGNVMTDARSTGKYYHFVRLMGRAASHITLECALQTHPNAALIGEEVAAKKQTLKNVTNYITDIICKRADLGYNYGVILIPEGLIDFIPEVQKLIAELNEILAHDVVDEAGAWKSKLQPESRELFEFLPNTIQEQLMLERDPHGNVQVAKIETEKMLISMVETELEKRKAEGRYSAHFRGQAHFFGYEGRCGLPTNFDSNYCYALGYGAGALLQSGKTGLISSICEELSDATEKIGTGVQLCWQPCGSS

SEQ ID NO: 187112 - protein, 427 aa, Zea Mays
MKCKYVELTSDFVYPYRNQGGFDMICSGRDKIETPEQFKQAEDTANKLDLDGLVVIGGDDSNTNACLLGEYFRSRNMKTRVIGCPKTIDGDLKCKEVPTSFGFDTACKIYSEMIGNVMTDARSTGKYYHFVRLMGRAASHITLECALQTHPNAALIGEEVAAKKQTLKNVTNYITDIICKRADLGYNYGVILIPEGLIDFIPEVQKLIAELNEILAHDVVDEAGAWKSKLQPESRELFEFLPNTIQEQLMLERDPHGNVQVAKIETEKMLISMVETELEKRKAEGRYSAHFRGQAHFFGYEGRCGLPTNFDSNYCYALGYGAGALLQSGKTGLISSVGNLAAPVEEWTVGGTALTSLMDVERRHGKFKPVIKKAMVELDAAPFKKYASMRDEWALKNRYISPGPIQFSGPGSNDSNHTLMLELGAAL

SEQ ID NO: 187113 - protein, 570 aa, Zea Mays
MAAAAVTSNGGAVAANGPAPGRLASVYSEVQTNRLLHALPLPSVLRSNFSVVVGPASSAAGNPDEIAKLFPNLFGQPSASLVPSAEPAATRPLKIGVVLSGGQAPGGHNVICGIFDYLQERAKGSTLYGFKGGPAGIMKCKYVELTSDFVYPYRNQGGFDMICSGRDKIETPEQFKQAEDTANKLDLDGLVVIGGDDSNTNACLLGEYFRSRNMKTRVIGCPKTIDGDLKCKEVPTSFGFDTACKIYSEMIGNVMTDARSTGKYYHFVRLMGRAASHITLECALQTHPNAALIGEEVAAKKQTLKNVTNYITDIICKRADLGYNYGVILIPEGLIDFIPEVQKLIAELNEILAHDVVDEAGAWKSKLQPESRELFEFLPNTIQEQLMLERDPHGNVQVAKIETEKMLISMVETELEKRKAEGRYSAHFRGQAHFFGFFAICRYEGRCGLPTNFDSNYCYALGYGAGALLQSGKTGLISSVGNLAAPVEEWTVGGTALTSLMDVERRHGKFKPVIKKAMVELDAAPFKKYASMRDEWALKNRYISPGPIQFSGPGSNDSNHTLMLELGAAL

SEQ ID NO: 187114 - protein, 512 aa, Zea Mays
MAAAAVTSNGGAVAANGPAPGRLASVYSEVQTNRLLHALPLPSVLRSNFSVVVGPASSAAGNPDYLQERAKGSTLYGFKGGPAGIMKCKYVELTSDFVYPYRNQGGFDMICSGRDKIETPEQFKQAEDTANKLDLDGLVVIGGDDSNTNACLLGEYFRSRNMKTRVIGCPKTIDGDLKCKEVPTSFGFDTACKIYSEMIGNVMTDARSTGKYYHFVRLMGRAASHITLECALQTHPNAALIGEEVAAKKQTLKNVTNYITDIICKRADLGYNYGVILIPEGLIDFIPEVQKLIAELNEILAHDVVDEAGAWKSKLQPESRELFEFLPNTIQEQLMLERDPHGNVQVAKIETEKMLISMVETELEKRKAEGRYSAHFRGQAHFFGYEGRCGLPTNFDSNYCYALGYGAGALLQSGKTGLISSVGNLAAPVEEWTVGGTALTSLMDVERRHGKFKPVIKKAMVELDAAPFKKYASMRDEWALKNRYISPGPIQFSGPGSNDSNHTLMLELGAAL

SEQ ID NO: 187115 - protein, 87 aa, Zea Mays
MTEAPSGLDPGLLQFTRVFCFLGSWNKKNVPREAGLPACLAPALLRACDQDQSSTSPSRRAKAVQHATTKFRAHRVGSSRTERVVQD

SEQ ID NO: 187116 - protein, 116 aa, Zea Mays
MQQYTGHSSLPIQVSKICIMFKRCKIPGVTCELIFCRAGPAKKGELQHHGRQFKLEQRSNVDWNHGKAVGGVHIFRQLMTCPGRWQAKLTTKQLAPFNLSEGTRTESSQLYVTFWS

SEQ ID NO: 187117 - protein, 240 aa, Zea Mays
MATKVRYVLCVKKYQESLSDEERETWGFLRVMFEDDDFARTKLLAHLGFEPPQAPPASSTDELSQILADTLNIDHAAVTDNADAQFLIDNGDDFFNNPQPSEASLAEESVSTNGQQIEQEVSGDAVPSDPSIDKSIQHALVVGDYKGAVNQCLASNRMADALVIAHAGGSALWESTRNHYLKNSISPYLKVVSAMVGNDLMSFVSTWPLSSWKETHAHLWTYPLASQHGRRLGVAPDQGY

SEQ ID NO: 187118 - protein, 650 aa, Zea Mays
MEGHTWIGSLQLGDYRFTHFREIDLAKRYITSLYFAIVTMATVGYGDIHAVNIREMIFIMIYVSFDMILGAYLIGNMTALIVKGSRTERFRDKMKEVIRYMNRNKLGKEIREQIKGHLRLQYESSYTEASVLQDIPISIRAKISQTLYKPYIESIPLFKGCSAEFIQQIVIRLQEEFFLPGEVILEQGSAVDQLYFVCHGALEGVGIGEDGQEETLLMLEPESSFGEISILCNIPQPYTVRVCELCRLLRLDKQSFTNILEIYFVDGRRILSNLSESEYGGRVKQLESDITFHIGKQEAELTLRVNSAAFYGDLHQLKSLIRAGADPKNTDYDGRSPLHLAASRGYEDVVQFLINEGVDIDLTDQFGNTPLLEAVKQGHERVAALLFAKGAKLSLKNAGSHLCTAVAKGDSDFIRRALAYGADPNCRDYDHRTPLHIAAAEGLYLIAKMLVEAGASVFTTDSADGAPLRSTKRASAAAARWGRCWRRRGPASCPCSRSAARKSGTRCTRDGARCSRTTRGGRAQAKSGARRGWCCGSRTPSRAWSRRRRRSSACLARRRRGCGCCARTGPGCSTSTWSMTARSSTWSEARTAIRKVVSRLGIPVWHLHAAFFSTLYAGCCFFGYIYVCSRRKCNQVHHPCWTLYRTTNWE

SEQ ID NO: 187119 - protein, 575 aa, Zea Mays
MEGHTWIGSLQLGDYRFTHFREIDLAKRYITSLYFAIVTMATVGYGDIHAVNIREMIFIMIYVSFDMILGAYLIGNMTALIVKGSRTERFRDKMKEVIRYMNRNKLGKEIREQIKGHLRLQYESSYTEASVLQDIPISIRAKISQTLYKPYIESIPLFKGCSAEFIQQIVIRLQEEFFLPGEVILEQGSAVDQLYFVCHGALEGVGIGEDGQEETLLMLEPESSFGEISILCNIPQPYTVRVCELCRLLRLDKQSFTNILEIYFVDGRRILSNLSESEYGGRVKQLESDITFHIGKQEAELTLRVNSAAFYGDLHQLKSLIRAGADPKNTDYDGRSPLHLAASRGYEDVVQFLINEGVDIDLTVREHAVAGGGEAGARTGGSAAVRQGCEAEPQERRQPPVHGSCQGGLGLHPARPGLRRRPKLQGLRPPHAAPHRRRRGPLPHRQDARRGRRQRVHHGQMGHHSARRSAQVRRPHAGGAAGGGAGQRAVHVPGARRGSQGQGAPATVLGVPVPPVAGERRRRAARGGGGAVDPAHHREPGRVGAGEARLAWPGGVAAAAAVRGRGQGARRRHGQ

SEQ ID NO: 187120 - protein, 579 aa, Zea Mays
MEGHTWIGSLQLGDYRSPAVNFFPSSGYGDIHAVNIREMIFIMIYVSFDMILGAYLIGNMTALIVKGSRTERFRDKMKEVIRYMNRNKLGKEIREQIKGHLRLQYESSYTEASVLQDIPISIRAKISQTLYKPYIESIPLFKGCSAEFIQQIVIRLQEEFFLPGEVILEQGSAVDQLYFVCHGALEGVGIGEDGQEETLLMLEPESSFGEISILCNIPQPYTVRVCELCRLLRLDKQSFTNILEIYFVDGRRILSNLSESEYGGRVKQLESDITFHIGKQEAELTLRVNSAAFYGDLHQLKSLIRAGADPKNTDYDGRSPLHLAASRGYEDVVQFLINEGVDIDLTDQFGNTPLLEAVKQGHERVAALLFAKGAKLSLKNAGSHLCTAVAKGDSDFIRRALAYGADPNCRDYDHRTPLHIAAAEGLYLIAKMLVEAGASVFTTDRWGTTPLDEARKCGGRTLGALLEEARASELSMFPERGEEVRDKVHPRRCSVFPYHPWRASAGEERRAEGVVLWIPHTIESLVASAQEKLGLPGPAASRLRLLCEDGARVLDVDMVNDGQKLYLVGGEDGDQEGGQ

SEQ ID NO: 187121 - protein, 603 aa, Zea Mays
MTDGGEDGNVALPRGPARRRGPVRASFDADEFIALMHGSDPVRVELTRLENELRDKERELGEAQTEIRALRLSERAREKAVEELTDELEKMAEKLKLTESLLESKNLEVKKINDEKKAALAAQFAAEATLRRVHAAQKDDDMPPIEAILAPLEAELKLSRQENAKLQDDNRALDRLTKQKEAALLEAERTVQIAMAKAAMVDDLQNKNQELIKQIEICHEENKILDKLHRQKIAEVEKLSQTVRELEEAVLQGGATANVVRDYQRRFQEINEEKRTLDRELARAKVTANRVASVVANEWKDSNDKVMPVKQWLEERRFFQGEMQQLRDKLAITERTARSEAQLKEKYQLRLKVLEDGLRGPPSGSIRPPTEGKSFSNVPSRRLSLGGADNISRLSPNGLLSRRSPSFNSRSSLTSNSSLVLKHAKGTSKSFDGGTRSLDRRKVHGNGAHLLNRSTDAVRDKETNDSWKGDMDEKTNESADSNTDGKSNETMNNNSAETVSGFLYDMLQKEVISLRKTCHEKDQILKDKDDAIEMLAKKVDTLTKAMEVEAKKVRREVASMEKEVAAMRASKEQEIRAKRLGTKGSGSSQLLPGRGIGEAATPC

SEQ ID NO: 187122 - protein, 516 aa, Zea Mays
MAEKLKLTESLLESKNLEVKKINDEKKAALAAQFAAEATLRRVHAAQKDDDMPPIEAILAPLEAELKLSRQENAKLQDDNRALDRLTKQKEAALLEAERTVQIAMAKAAMVDDLQNKNQELIKQIEICHEENKILDKLHRQKIAEVEKLSQTVRELEEAVLQGGATANVVRDYQRRFQEINEEKRTLDRELARAKVTANRVASVVANEWKDSNDKVMPVKQWLEERRFFQGEMQQLRDKLAITERTARSEAQLKEKYQLRLKVLEDGLRGPPSGSIRPPTEGKSFSNVPSRRLSLGGADNISRLSPNGLLSRRSPSFNSRSSLTSNSSLVLKHAKGTSKSFDGGTRSLDRRKVHGNGAHLLNRSTDAVRDKETNDSWKGDMDEKTNESADSNTDGKSNETMNNNSAETVSGFLYDMLQKEVISLRKTCHEKDQILKDKDDAIEMLAKKVDTLTKAMEVEAKKVRREVASMEKEVAAMRASKEQEIRAKRLGTKGSGSSQLLPGRNAPRSGSMRNFQ

SEQ ID NO: 187123 - protein, 614 aa, Zea Mays
MEEAPPSSSPPSPPVMLLLLLLLIVSSPCSSSALLSPKGVNPEVQALMTIKNTLKDPHGVLKNWDQDSVDPCSWTTVSCSLENFVTGLEVPGQNLSGLLSPSIGNLTNLETILLQNNNITGLIPAEIGKLTKLRTLDLSSNHLYGAIPTSVGNLESLQYLRLNNNTLSGPFPSASANLSQLVFLDLSYNNLSGPVPGSLARTFNIVGNPLICGTNNAERDCYGTAPMPPYNLNSSLPPAIMSKSHKFAIAFGTAIGCIGLLVLAAGFLFWWRHRRNRQVLFDVDDQHMENVSLGNVKRFQFRELQSATGNFSSKNILGKGGFGYVYRGQFPDGTLVAVKRLKDGNAAGGEAQFQTEVEMISLALHRNLLRLYGFCMTATERLLVYPYMSNGSVASRLKGKPPLDWVTRKRIALGAGRGLLYLHEQCDPKIIHRDVKAANILLDDCCEAIVGDFGLAKLLDHRDSHVTTAVRGTVGHIAPEYLSTGQSSEKTDVFGFGILLLELVTGQTALEFGKTANQKGAMLDWVKKTHQEKKLDVLVDQGLRGGYDKMELEEMVRVALLCTQYLPGHRPKMSEVVRMLEAGEGLAERWEASHSQSQSADSHEFKAVELSGPR

SEQ ID NO: 187124 - protein, 589 aa, Zea Mays
MTIKNTLKDPHGVLKNWDQDSVDPCSWTTVSCSLENFVTGLEVPGQNLSGLLSPSIGNLTNLETILLQNNNITGLIPAEIGKLTKLRTLDLSSNHLYGAIPTSVGNLESLQYLRLNNNTLSGPFPSASANLSQLVFLDLSYNNLSGPVPGSLARTFNIVGNPLICGTNNAERDCYGTAPMPPYNLNSSLPPAIMSKSHKFAIAFGTAIGCIGLLVLAAGFLFWWRHRRNRQVLFDVDDQHMENVSLGNVKRFQFRELQSATGNFSSKNILGKGGFGYVYRGQFPDGTLVAVKRLKDGNAAGGEAQFQTEVEMISLALHRNLLRLYGFCMTATERLLVYPYMSNGSVASRLKASSTTSIRFLSSLYSTMIATPTGKPPLDWVTRKRIALGAGRGLLYLHEQCDPKIIHRDVKAANILLDDCCEAIVGDFGLAKLLDHRDSHVTTAVRGTVGHIAPEYLSTGQSSEKTDVFGFGILLLELVTGQTALEFGKTANQKGAMLDWVKKTHQEKKLDVLVDQGLRGGYDKMELEEMVRVALLCTQYLPGHRPKMSEVVRMLEAGEGLAERWEASHSQSQSADSHEFKAVELSGPR

SEQ ID NO: 187125 - protein, 567 aa, Zea Mays
MTIKNTLKDPHGVLKNWDQDSVDPCSWTTVSCSLENFVTGLEVPGQNLSGLLSPSIGNLTNLETILLQNNNITGLIPAEIGKLTKLRTLDLSSNHLYGAIPTSVGNLESLQYLRLNNNTLSGPFPSASANLSQLVFLDLSYNNLSGPVPGSLARTFNIVGNPLICGTNNAERDCYGTAPMPPYNLNSSLPPAIMSKSHKFAIAFGTAIGCIGLLVLAAGFLFWWRHRRNRQVLFDVDDQHMENVSLGNVKRFQFRELQSATGNFSSKNILGKGGFGYVYRGQFPDGTLVAVKRLKDGNAAGGEAQFQTEVEMISLALHRNLLRLYGFCMTATERLLVYPYMSNGSVASRLKGKPPLDWVTRKRIALGAGRGLLYLHEQCDPKIIHRDVKAANILLDDCCEAIVGDFGLAKLLDHRDSHVTTAVRGTVGHIAPEYLSTGQSSEKTDVFGFGILLLELVTGQTALEFGKTANQKGAMLDWVKKTHQEKKLDVLVDQGLRGGYDKMELEEMVRVALLCTQYLPGHRPKMSEVVRMLEAGEGLAERWEASHSQSQSADSHEFKAVELSGPR

SEQ ID NO: 187126 - protein, 762 aa, Zea Mays
MDAESGRGAAGARKKSWRSELVLAYQSLGVVYGDLATSPLYVYKSAFAGGDIEHSEGNEEIYGVLSLVFWTLTLITLLKYVLVVLRAADDGEGGTFALYSLICRRVRAGLLPGVGDSAVDELKDQPDGALPPPASSVRAALQQRRELQWLLLLFALLGTSMVIGDGVLTPAVSVFSAVSGLKLSMVNEQHQYVLLPVTCVILVGLFALQHFGTHRVGFLFAPIVCLWLLCISTIGVYNIFIWNPHIYKALSPYYMYRFLQKTQVGGWMSLGGILLCVTGSEAMYADLGHFSQSSIKIAFTAVVYPSLVLAYMGQAAYISRHHNFERNHHIGFYISVPEKIRWPILGIAILAAVVGSQAVITGTFSVIKQCCSLNCFPRVKIVHTSSTVHGQIYIPEINWILMILCLAVTIGFRNTKQMANAQGLAVITVMIVTTCFMSLVIVLCWNKNVVFALAFLLFFGAIEAVYFSASLMKFHEGAWVPIIVSFIFLTVMCVWHYGTAKKYEFDVENKVSISWLLNLGSSLGIVRVRGIGLIHTELVSGIPAIFSHFVTNLPAFHQVLVFLCIKSVSVPHVQPEERFLVGRIGLKQYRLYRVVVRYGYRDVQQDSLQFEKALVSSIAEFIRSGDSDQNGYPDGSESPYERLSIISKGLPFQEADGDGSPSPESSARKDTNPILVSSKSRRVRFVLPENAQINSQVRNELQELTEAREAGMSFIMGRSYMKAKSGSSLMKRIAINFIYEFLTRNSRGPAYAANVPHVSTLE

SEQ ID NO: 187127 - protein, 368 aa, Zea Mays
MILCLAVTIGFRNTKQMANAQGLAVITVMIVTTCFMSLVIVLCWNKNVVFALAFLLFFGAIEAVYFSASLMKFHEGAWVPIIVSFIFLTVMCVWHYGTAKKYEFDVENKVSISWLLNLGSSLGIVRVRGIGLIHTELVSGIPAIFSHFVTNLPAFHQVLVFLCIKSVSVPHVQPEERFLVGRIGLKQYRLYRVVVRYGYRDVQQDSLQFEKALVSSIAEFIRSGDSDQNGYPDGSESPYERLSIISKGLPFQEADGDGSPSPESSARKDTNPILVSSKSRRVRFVLPENAQINSQVRNELQELTEAREAGMSFIMGRSYMKAKSGSSLMKRIAINFIYEFLTRNSRGPAYAANVPHVSTLEVGMVCQV

SEQ ID NO: 187128 - protein, 60 aa, Zea Mays
MLGAITFRGLLQSSYIRGESRFFDHGPVYNLFMAKVGSVHHRRSNLTLIMISSAEGTVID

SEQ ID NO: 187129 - protein, 275 aa, Zea Mays
MFLPKHPSPTRPGRTCLQPGVPLVRPRSRIPATTLSERRHLLRSSAAASSSFPSRDSPLSAAKGSSQNKPPDEIRRWKAVSPGMRESADPETETEDPSPPRTALWSARRRARAAWRKVVSWVPRKARSLVLLNLVTLIFASNISVVKQAEALLDPDLFNMLRFTIAAIPFVPLLLKSLRNMQILFRGLELGIWVSVAYLAQAMGLVTAGAGRASFISALTVIIVPFLDGLIGAEVPAHTWFGAFLSLFGVIMLELSGSPPCVSRIIYMDRLTCLS

SEQ ID NO: 187130 - protein, 274 aa, Zea Mays
MFLPKHPSPTRPGRTCLQPGVPLVRPRSRIPATTLSERRHLLRSSAAASSSFPSRDSPLSAAKGSSQNKPPDEIRRWKAVSPGMRESADPETETEDPSPPRTALWSARRRARAAWRKVVSWVPRKARSLVLLNLVTLIFASNISVVKQAEALLDPDLFNMLRFTIAAIPFVPLLLKSLRNMQILFRGLELGIWVSVAYLAQAMGLVTAGAGRASFISALTVIIVPFLDGLIGAEVPAHTWFGAFLSLFGVIMLELSGSPPCVSRIIYMDRLVIF

SEQ ID NO: 187131 - protein, 1173 aa, Zea Mays
MMGIEGIAATVTEDPEPSIPPGFGPFAASASWGIQNDVKPADDHSSSVLALQSIDDDVEILEYLSSSVDHQSDTGCCISGSNTCRKSLRNRPPIDYSRFDQIADEDSDAEVADKGVNAVKHRQQFPKGVLRGCPECANCQKVIARWNPSGARRPVLDEAPVYYPTEEEFQDTLKYIEIIRPTAEPYGICRIVPPASWKPPCLLKEKNIWECSKFSTRVQKVDKLQNRKSPKKSRRGGMMKKRRKISETEENNHHQIGMQQNQERFGFEPGPEFTLQMFQKYADDFSDQYFMKDKCRDSPPSVEDIEGEYWRIVERPTEEIEVIYGADLETGTFGSGFPKLCPEMKSDVEDKYAQSGWNLNNLPRLQGSVLSFEGGDISGVLVPWLYVGMCFSSFCWHVEDHHLYSLNYMHWGAPKMWYGVPGKDAVNLEAAMRKHLPELFEEQPDLLHNLVTQFSPSLLKSEGVPVYRCVQHEGEFVLTFPRAYHAGFNCGFNCAEAVNVAPIDWLPVGQNAVDLYREQARKITISHDKLLLGAAREAIRAQWDILFLKRNSSVNLRWKSICGPDSTICKSLKLQAVHAPQRNMLAWYMQSSFVHAIGTKGGKLSAIHRWGVSDLGLSLSSCVKREKVQDSKTVRRLTDGPRRSYMSQASTVSLIPSSVSTEQKKNEDKTLDLGCPGMNLPKISPEANNLRPSTEQIKSENLSQLKEPCVKNELSCPTSNGTSQEHKGGIGGHKLAAASMMVLSGQSFPANAGESVRNAHVLAVFKEGRDCTSSLTLREYHNRPVSMIDNGANMKLDLENIDNSHMLMSSPDFNATVCHSYKDQTFLTLETNTSVMTEKDSSQARNASQQFVSTALRTQNVSQEPLCTAIAPKQLIDPQVQKKSYGVFGSGSAHLGHLTVGNQQLNERWHQRQSDSLSSVEVRARGHSAMIVQPALENHSRNGVAQKGPRIANVVHRFKCSVEPIEIGAVLSGKLWSSSQAIFPKGFKSRVKYFSVVDPVQMTYYISEILDAGQQGPLFMVTVENCPGEIFINISPTKCWNMVRERLNMEIRRQLNMGRANLPTLQPPGSVDGHEMFGLLTPAIVQAIEARDRDYICTEYWRSRPHATIENRDNQNMSPQDPPLVALRGLFQRANCDELRALRSLLMSNRILGDNSRQQACQILDEEIAKQWH

SEQ ID NO: 187132 - protein, 99 aa, Zea Mays
MKINAGRRDDGIAAATLLAAVLFGCLATSVQLPADATTGDGERGQEAELALPPPFCYKACGNGRCDFCCASQYTPTFCWDTQAMCKRECHPPISPPSSV

SEQ ID NO: 187133 - protein, 741 aa, Zea Mays
MFGNRVPHMLDNDYTPYSAVDIFVKDLGIVSCESSNSRIPVHVSSIAHQLFISGSASGWGRYDDAAVVKVYETLTGVKVEGKAPMLSKEDVLQSLPSEWPEDPIDNLVPIASHSSKKFLVVLDDDPTGTQTVHDIEVLTEWPVEALVEQFLKLPTCFFILTNSRSMTADKAMLLVQTICKNLKAAAEKVPGVSYTIVLRGDSTLRGHFPEEADAAVSVLGEMDAWIICPFFLQGGRYTINDIHYVADSDRLIPAGETEFAKDAVFGYKSSNLRQWVEEKTKGRVLENQVSTISITLLRKQGPTAVCEHLCSLEKVSVEMVSMKSMEDRDQEIRRIVELGNAYIQSRKDTLILTSRQLITGKTPEESLEINYKVSSALVEIVRRIDSKPHYIIAKGGITSSDIATKALEAKRAKVMGQALAGVPLWQLGPESRFPGVPYIVFPGNVGDNSALAKVVKSWASPSRSSTKEILLNAEKGGYAVGAFNVYNLEGIEAVVAAAEAEKSPAILQIHPSALKQGGVPLVACCIAAAEQSSVPISVHYDHGISKSDLLQALEAGFDSVMVDGSHLTLGDNILYTKSISSLAHAKGLLVEAELGRLSGSEDGMTVEEYEARFTDVAQAEEFIDETSIDALAVCIGNVHGKYPPSGPNLKFDLLKDLRALTLKKGVSLVLHGASGLSHELVKECIDLGVRKFNVNTEVRNSYLASLRKPEKDLIQVMASAKEAMKAVVAEKLRLFGSCGKA

SEQ ID NO: 187134 - protein, 871 aa, Zea Mays
MNASAAEAMSFAARLNLRTRRVFEIMQHARGYSWMFGNRVPHMLDNDYTPYSAVDIFVKDLGIVSCESSNSRIPVHVSSIAHQLFISGSASGWGRYDDAAVVKVYETLTGVKVEGKAPMLSKEDVLQSLPSEWPEDPIDNLVPIASHSSKKFLVVLDDDPTGTQTVHDIEVLTEWPVEALVEQFLKLPTCFFILTNSRSMTADKAMLLVQTICKNLKAAAEKVPGVSYTIVLRGDSTLRGHFPEEADAAVSVLGEMDAWIICPFFLQGGRYTINDIHYVADSDRLIPAGETEFAKDAVFGYKSSNLRQWVEEKTKGRVLENQVSTISITLLRKQGPTAVCEHLCSLEKGSVCIVNAASDRDMAVFASGMIQAELKGKRFLCRTAASFVSARIGIKPKPPICPNDLGLKRALTGGLIIVGSYVPKTTKQVDELRSQFGQSLRVIEVSVEMVSMKSMEDRDQEIRRIVELGNAYIQSRKDTLILTSRQLITGKTPEESLEINYKVSSALVEIVRRIDSKPHYIIAKGGITSSDIATKALEAKRAKVMGQALAGVPLWQLGPESRFPGVPYIVFPGNVGDNSALAKVVKSWASPSRSSTKEILLNAEKGGYAVGAFNVYNLEGIEAVVAAAEAEKSPAILQIHPSALKQGGVPLVACCIAAAEQSSVPISVHYDHGISKSDLLQALEAGFDSVMVDGSHLTLGDNILYTKSISSLAHAKGLLVEAELGRLSGSEDGMTVEEYEARFTDVAQAEEFIDETSIDALAVCIGNVHGKYPPSGPNLKFDLLKDLRALTLKKGVSLVLHGASGLSHELVKECIDLGVRKFNVNTEVRNSYLASLRKPEKDLIQVMASAKEAMKAVVAEKLRLFGSCGKA

SEQ ID NO: 187135 - protein, 1043 aa, Zea Mays
MGFGMASHLLKSGFCVVAYDVYKPTMARFADLGGSTKGSPEEIAKDVEILIIMVANESQADSVLFGNAGAVPVLSAGTSVILSSTVSPGFVIHLNRRLEAECRQIKLVDAPVSGGVKRAADGTLTIMTSGTDEALHCTGSVLSALSEKLYVIKGGCGAASSVKMVNQLLAGVHIASAAEAMSFAARLNLRTRRVFEIMQHARGYSWMFGNRVPHMLDNDYTPYSAVDIFVKDLGIVSCESSNSRIPVHVSSIAHQLFISGSASGWGRYDDAAVVKVYETLTGVKVEGKAPMLSKEDVLQSLPSEWPEDPIDNLVPIASHSSKKFLVVLDDDPTGTQTVHDIEVLTEWPVEALVEQFLKLPTCFFILTNSRSMTADKAMLLVQTICKNLKAAAEKVPGVSYTIVLRGDSTLRGHFPEEADAAVSVLGEMDAWIICPFFLQGGRYTINDIHYVADSDRLIPAGETEFAKDAVFGYKSSNLRQWVEEKTKGRVLENQVSTISITLLRKQGPTAVCEHLCSLEKGSVCIVNAASDRDMAVFASGMIQAELKGKRFLCRTAASFVSARIGIKPKPPICPNDLGLKRALTGGLIIVGSYVPKTTKQVDELRSQFGQSLRVIEVSVEMVSMKSMEDRDQEIRRIVELGNAYIQSRKDTLILTSRQLITGKTPEESLEINYKVSSALVEIVRRIDSKPHYIIAKGGITSSDIATKALEAKRAKVMGQALAGVPLWQLGPESRFPGVPYIVFPGNVGDNSALAKVVKSWASPSRSSTKEILLNAEKGGYAVGAFNVYNLEGIEAVVAAAEAEKSPAILQIHPSALKQGGVPLVACCIAAAEQSSVPISVHYDHGISKSDLLQALEAGFDSVMVDGSHLTLGDNILYTKSISSLAHAKGLLVEAELGRLSGSEDGMTVEEYEARFTDVAQAEEFIDETSIDALAVCIGNVHGKYPPSGPNLKFDLLKDLRALTLKKGVSLVLHGASGLSHELVKECIDLGVRKFNVNTEVRNSYLASLRKPEKDLIQVMASAKEAMKAVVAEKLRLFGSCGKA

SEQ ID NO: 187136 - protein, 1135 aa, Zea Mays
MMRGLRSHVMDMSKSVTFPLPLLGVAYQQLVHGSSAVTGDGSASPLKVWEASFGVNIVDAAGEQIYDASKLADQLVAESKAAKRIGFIGLGAMGFGMASHLLKSGFCVVAYDVYKPTMARFADLGGSTKGSPEEIAKDVEILIIMVANESQADSVLFGNAGAVPVLSAGTSVILSSTVSPGFVIHLNRRLEAECRQIKLVDAPVSGGVKRAADGTLTIMTSGTDEALHCTGSVLSALSEKLYVIKGGCGAASSVKMVNQLLAGVHIASAAEAMSFAARLNLRTRRVFEIMQHARGYSWMFGNRVPHMLDNDYTPYSAVDIFVKDLGIVSCESSNSRIPVHVSSIAHQLFISGSASGWGRYDDAAVVKVYETLTGVKVEGKAPMLSKEDVLQSLPSEWPEDPIDNLVPIASHSSKKFLVVLDDDPTGTQTVHDIEVLTEWPVEALVEQFLKLPTCFFILTNSRSMTADKAMLLVQTICKNLKAAAEKVPGVSYTIVLRGDSTLRGHFPEEADAAVSVLGEMDAWIICPFFLQGGRYTINDIHYVADSDRLIPAGETEFAKDAVFGYKSSNLRQWVEEKTKGRVLENQVSTISITLLRKQGPTAVCEHLCSLEKGSVCIVNAASDRDMAVFASGMIQAELKGKRFLCRTAASFVSARIGIKPKPPICPNDLGLKRALTGGLIIVGSYVPKTTKQVDELRSQFGQSLRVIEVSVEMVSMKSMEDRDQEIRRIVELGNAYIQSRKDTLILTSRQLITGKTPEESLEINYKVSSALVEIVRRIDSKPHYIIAKGGITSSDIATKALEAKRAKVMGQALAGVPLWQLGPESRFPGVPYIVFPGNVGDNSALAKVVKSWASPSRSSTKEILLNAEKGGYAVGAFNVYNLEGIEAVVAAAEAEKSPAILQIHPSALKQGGVPLVACCIAAAEQSSVPISVHYDHGISKSDLLQALEAGFDSVMVDGSHLTLGDNILYTKSISSLAHAKGLLVEAELGRLSGSEDGMTVEEYEARFTDVAQAEEFIDETSIDALAVCIGNVHGKYPPSGPNLKFDLLKDLRALTLKKGVSLVLHGASGLSHELVKECIDLGVRKFNVNTEVRNSYLASLRKPEKDLIQVMASAKEAMKAVVAEKLRLFGSCGKA

SEQ ID NO: 187137 - protein, 1325 aa, Zea Mays
MSLTAAPVAFIGLDELSVELAASFLRSGACVRSFTPEAERSPSAALAELNGLLQCASPVEAARDAALVVVLSDAGGVDELFFGVEGIAKGLCAGSIVLIHSTLLPSQLEKLEQELTDQKKDVFLLDGYIFTGLSDELKQQIIIVASGRQDIAEKASKFFHGLYKTIYFAEGEFCTSRKIRMVNDLLEGIHFVASIEAMYLGVRAGIHPTIIYDIISNAAGSSRIFVELVPKLLSEDPLLIDFLKSTRKKASHVMDMSKSVTFPLPLLGVAYQQLVHGSSAVTGDGSASPLKVWEASFGVNIVDAAGEQIYDASKLADQLVAESKAAKRIGFIGLGAMGFGMASHLLKSGFCVVAYDVYKPTMARFADLGGSTKGSPEEIAKDVEILIIMVANESQADSVLFGNAGAVPVLSAGTSVILSSTVSPGFVIHLNRRLEAECRQIKLVDAPVSGGVKRAADGTLTIMTSGTDEALHCTGSVLSALSEKLYVIKGGCGAASSVKMVNQLLAGVHIASAAEAMSFAARLNLRTRRVFEIMQHARGYSWMFGNRVPHMLDNDYTPYSAVDIFVKDLGIVSCESSNSRIPVHVSSIAHQLFISGSASGWGRYDDAAVVKVYETLTGVKVEGKAPMLSKEDVLQSLPSEWPEDPIDNLVPIASHSSKKFLVVLDDDPTGTQTVHDIEVLTEWPVEALVEQFLKLPTCFFILTNSRSMTADKAMLLVQTICKNLKAAAEKVPGVSYTIVLRGDSTLRGHFPEEADAAVSVLGEMDAWIICPFFLQGGRYTINDIHYVADSDRLIPAGETEFAKDAVFGYKSSNLRQWVEEKTKGRVLENQVSTISITLLRKQGPTAVCEHLCSLEKGSVCIVNAASDRDMAVFASGMIQAELKGKRFLCRTAASFVSARIGIKPKPPICPNDLGLKRALTGGLIIVGSYVPKTTKQVDELRSQFGQSLRVIEVSVEMVSMKSMEDRDQEIRRIVELGNAYIQSRKDTLILTSRQLITGKTPEESLEINYKVSSALVEIVRRIDSKPHYIIAKGGITSSDIATKALEAKRAKVMGQALAGVPLWQLGPESRFPGVPYIVFPGNVGDNSALAKVVKSWASPSRSSTKEILLNAEKGGYAVGAFNVYNLEGIEAVVAAAEAEKSPAILQIHPSALKQGGVPLVACCIAAAEQSSVPISVHYDHGISKSDLLQALEAGFDSVMVDGSHLTLGDNILYTKSISSLAHAKGLLVEAELGRLSGSEDGMTVEEYEARFTDVAQAEEFIDETSIDALAVCIGNVHGKYPPSGPNLKFDLLKDLRALTLKKGVSLVLHGASGLSHELVKPANKP

SEQ ID NO: 187138 - protein, 1357 aa, Zea Mays
MSLTAAPVAFIGLDELSVELAASFLRSGACVRSFTPEAERSPSAALAELNGLLQCASPVEAARDAALVVVLSDAGGVDELFFGVEGIAKGLCAGSIVLIHSTLLPSQLEKLEQELTDQKKDVFLLDGYIFTGLSDELKQQIIIVASGRQDIAEKASKFFHGLYKTIYFAEGEFCTSRKIRMVNDLLEGIHFVASIEAMYLGVRAGIHPTIIYDIISNAAGSSRIFVELVPKLLSEDPLLIDFLKSTRKKASHVMDMSKSVTFPLPLLGVAYQQLVHGSSAVTGDGSASPLKVWEASFGVNIVDAAGEQIYDASKLADQLVAESKAAKRIGFIGLGAMGFGMASHLLKSGFCVVAYDVYKPTMARFADLGGSTKGSPEEIAKDVEILIIMVANESQADSVLFGNAGAVPVLSAGTSVILSSTVSPGFVIHLNRRLEAECRQIKLVDAPVSGGVKRAADGTLTIMTSGTDEALHCTGSVLSALSEKLYVIKGGCGAASSVKMVNQLLAGVHIASAAEAMSFAARLNLRTRRVFEIMQHARGYSWMFGNRVPHMLDNDYTPYSAVDIFVKDLGIVSCESSNSRIPVHVSSIAHQLFISGSASGWGRYDDAAVVKVYETLTGVKVEGKAPMLSKEDVLQSLPSEWPEDPIDNLVPIASHSSKKFLVVLDDDPTGTQTVHDIEVLTEWPVEALVEQFLKLPTCFFILTNSRSMTADKAMLLVQTICKNLKAAAEKVPGVSYTIVLRGDSTLRGHFPEEADAAVSVLGEMDAWIICPFFLQGGRYTINDIHYVADSDRLIPAGETEFAKDAVFGYKSSNLRQWVEEKTKGRVLENQVSTISITLLRKQGPTAVCEHLCSLEKGSVCIVNAASDRDMAVFASGMIQAELKGKRFLCRTAASFVSARIGIKPKPPICPNDLGLKRALTGGLIIVGSYVPKTTKQVDELRSQFGQSLRVIEVSVEMVSMKSMEDRDQEIRRIVELGNAYIQSRKDTLILTSRQLITGKTPEESLEINYKVSSALVEIVRRIDSKPHYIIAKGGITSSDIATKALEAKRAKVMGQALAGVPLWQLGPESRFPGVPYIVFPGNVGDNSALAKVVKSWASPSRSSTKEILLNAEKGGYAVGAFNVYNLEGIEAVVAAAEAEKSPAILQIHPSALKQGGVPLVACCIAAAEQSSGFDSVMVDGSHLTLGDNILYTKSISSLAHAKGLLVEAELGRLSGSEDGMTVEEYEARFTDVAQAEEFIDETSIDALAVCIGNVHGKYPPSGPNLKFDLLKDLRALTLKKGVSLVLHGASGLSHELVKECIDLGVRKFNVNTEVRNSYLASLRKPEKDLIQVMASAKEAMKAVVAEKLRLFGSCGKA

SEQ ID NO: 187139 - protein, 1261 aa, Zea Mays
MSLTAAPVAFIGLDELSVELAASFLRSGACVRSFTPEAERSPSAALAELNGLLQCASPVEAARDAALVVVLSDAGGVDELFFGVEGIAKGLCAGSIVLIHSTLLPSQLEKLEQELTDQKKDVFLLDGYIFTGLSDELKQQIIIVASGRQDIAEKASKFFHGLYKTIYFAEGEFCTSRKIRMVNDLLEGIHFVASIEAMYLGVRAGIHPTIIYDIISNAAGSSRIFVELVPKLLSEDPLLIDFLKSTRKKASHVMDMSKSVTFPLPLLGVAYQQLVHGSSAVTGDGSASPLKVWEASFGVNIVDAAGEQIYDASKLADQLVAESKAAKRIGFIGLGAMGFGMASHLLKSGFCVVAYDVYKPTMARFADLGGSTKGSPEEIAKDVEILIIMVANESQADSVLFGNAGAVPVLSAGTSVILSSTVSPGFVIHLNRRLEAECRQIKLVDAPVSGGVKRAADGTLTIMTSGTDEALHCTGSVLSALSEKLYVIKGGCGAASSVKMVNQLLAGVHIASAAEAMSFAARLNLRTRRVFEIMQHARGYSWMFGNRVPHMLDNDYTPYSAVDIFVKDLGIVSCESSNSRIPVHVSSIAHQLFISGSASGWGRYDDAAVVKVYETLTGVKVEGKAPMLSKEDVLQSLPSEWPEDPIDNLVPIASHSSKKFLVVLDDDPTGTQTVHDIEVLTEWPVEALVEQFLKLPTCFFILTNSRSMTADKAMLLVQTICKNLKAAAEKVPGVSYTIVLRGDSTLRGHFPEEADAAVSVLGEMDAWIICPFFLQGGRYTINDIHYVADSDRLIPAGETEFAKDAVFGYKSSNLRQWVEEKTKGRVLENQVSTISITLLRKQGPTAVCEHLCSLEKVSVEMVSMKSMEDRDQEIRRIVELGNAYIQSRKDTLILTSRQLITGKTPEESLEINYKVSSALVEIVRRIDSKPHYIIAKGGITSSDIATKALEAKRAKVMGQALAGVPLWQLGPESRFPGVPYIVFPGNVGDNSALAKVVKSWASPSRSSTKEILLNAEKGGYAVGAFNVYNLEGIEAVVAAAEAEKSPAILQIHPSALKQGGVPLVACCIAAAEQSSGFDSVMVDGSHLTLGDNILYTKSISSLAHAKGLLVEAELGRLSGSEDGMTVEEYEARFTDVAQAEEFIDETSIDALAVCIGNVHGKYPPSGPNLKFDLLKDLRALTLKKGVSLVLHGASGLSHELVKECIDLGVRKFNVNTEVRNSYLASLRKPEKDLIQVMASAKEAMKAVVAEKLRLFGSCGKA

SEQ ID NO: 187140 - protein, 97 aa, Zea Mays
MDLDADMIPTSPSADSSPSSSDLDTECAASRKQASAAPSSASGDTCPAAAQARKRRWGWAVGRSLTPRLASQQGSPAPQLHGSSAPADPRRCAASKG

SEQ ID NO: 187141 - protein, 166 aa, Zea Mays
MLGVVLPLQGSAEVIFTRRSEALAALKRYNNMRLDGKAMKIEVIGAELGLSAAAVPQISVVPGASRRGQREVVMMPGGSGFGQGASGPSSSLPGWKRGGFVRRGQGRVSFPQRGRGQVRSRGRGRGRSSFVQSRGRGYVRRGNAEKSAKQLDNELDNYNSGAMNVD

SEQ ID NO: 187142 - protein, 210 aa, Zea Mays
MVAAGLSGIESGTKLYISNLHYGVTSEDLQELFSEMGHLKHCAVHYDSYRHPTGSAEVIFTRRSEALAALKRYNNMRLDGKAMKIEVIGAELGLSAAAVPQISVVPGASRRGQREVVMMPGGSGFGQGASGPSSSLPGWKRGGFVRRGQGRVSFPQRGRGQVRSRGRGRGRSSFVQSRGRGYVRRGNAEKSAKQLDNELDNYNSGAMNVD

SEQ ID NO: 187143 - protein, 123 aa, Zea Mays
MKSELPTMALSTCETRKPLPAMTATMSSAVTGFLSSSTMGCSTVYATPVLTVTTYSAYRRMLSQNSSTRGPSGPSARAGPGPADRASATVTPTVMPPRSAHVGRAHVLPPPPASLLLPAAASS

SEQ ID NO: 187144 - protein, 262 aa, Zea Mays
MRIQEISISMDIDNVSAGSTEWKGLLKDYWERFSKYCADVSKLDGRKVERMLEEKFGPILFSDVYKDCRICPSCSEGTLRFKVSRYGEGYFVGCDRHPKCKYIARSLSQQEDETEPIEENAKSFEPRLLGVMPDSDQKVFLKQGPYGYYVQVGEDKKGLFPKRVSLSKVKDIDSVTLEDAIELLQYPKILGKHPEDDNLVLITHSKVGYNIKHRRFIAQVPKNMDPKKMTLERALKLLSSKSVRRIGRLKGKVEKKEPIEWH

SEQ ID NO: 187145 - protein, 212 aa, Zea Mays
MLEEKFGPILFSDVYKDCRICPSCSEGTLRFKVSRYGEGYFVGCDRHPKCKYIARSLSQQEDETEPIEENAKSFEPRLLGVMPDSDQKVFLKQGPYGYYVQVGEDKKGLFPKRVSLSKVKDIDSVTLEDAIELLQYPKILGKHPEDDNLVLITHSKVGYNIKHRRFIAQVPKNMDPKKMTLERALKLLSSKSVRRIGRLKGKVEKKEPIEWH

SEQ ID NO: 187146 - protein, 283 aa, Zea Mays
MLEQQGVLGFDVTVARVVFHEISEDAIKKALMSPRYIDMDLVNAYLARRSLDYLIGFGISPLLWRKLPGCQSAGRVQSAALALVCDREAEIEQFKAHEYWTVQTDFKIQSADPSNATCIPFCIKHLNSKKLDQLSIPSQEEAQAIEKMIHSSTFEVLGVKRSKIHKNPPLPYITSSLQQDAANKLHFTAGYTMKIAQNLYEGINLSSEETTGLITYIRTDGFHISDGAVEDIRSLVKERYGQKYVSEDIRKYLKKVKNAQEAHEAIRPTSIRRPPYSSGCWHS

SEQ ID NO: 187147 - protein, 370 aa, Zea Mays
MMTSAWSGRCLLLPGHTLRALKLHCKGEAIAWHIKEMLEQQGVLGFDVTVARVVFHEISEDAIKKALMSPRYIDMDLVNAYLARRSLDYLIGFGISPLLWRKLPGCQSAGRVQSAALALVCDREAEIEQFKAHEYWTVQTDFKIQSADPSNATCIPFCIKHLNSKKLDQLSIPSQEEAQAIEKMIHSSTFEVLGVKRSKIHKNPPLPYITSSLQQDAANKLHFTAGYTMKIAQNLYEGINLSSEETTGLITYIRTDGFHISDGAVEDIRSLVKERYGQKYVSEDIRKYLKKVKNAQEAHEAIRPTSIRRPPSSLVGILDDDSLKLYTLIWKRTMACQMEASRTEMIQVDVGIPEGEMNFHSTASKLDFKG

SEQ ID NO: 187148 - protein, 685 aa, Zea Mays
MALQLRRLLPHGYAQRHRAVIHALSLLPPPPAMLQFEVFQRYSSSPWPFSPFRPCKMCGVAFRSNSTRKISSRNNFGVALQPKSSAFITPRLFGSYSSVCFRATASCGIALKANNIGNSRPFSTTYSKKIRFLVKNKISFSNLNMRRKDGSVAHSLLHRSEKCQSTLATCSTIVDEASTSTSNNSKSVTDAKTDTAKRKSSRGSKKEVDGDMKEKEVHTNKKRIFARTRKAATKTSDNISTNQENKKTDNCKLKRGADSFKEKKVNNRAKSKAEVSAASSVPEICMQSSIDGSVIEKKPLVPLYPPRAKSVVVVESATKAKVIQKYLGDMYEVLPSYGHVRDLAGRSKSVRPDDDFSMVWEVPAAAWTHLKSIKVALQRAENLILASDPDREGEAIAWHIKEMLEQQGVLGFDVTVARVVFHEISEDAIKKALMSPRYIDMDLVNAYLARRSLDYLIGFGISPLLWRKLPGCQSAGRVQSAALALVCDREAEIEQFKAHEYWTVQTDFKIQSADPSNATCIPFCIKHLNSKKLDQLSIPSQEEAQAIEKMIHSSTFEVLGVKRSKIHKNPPLPYITSSLQQDAANKLHFTAGYTMKIAQNLYEGINLSSEETTGLITYIRTDGFHISDGAVEDIRSLVKERYGQKYVSEDIRKYLKKVKNAQEAHEAIRPTSIRRPPYSSGCWHS

SEQ ID NO: 187149 - protein, 382 aa, Zea Mays
MMTSAWSGRCLLLPGHTLRALKLHCKENLILASDPDREGEAIAWHIKEMLEQQGVLGFDVTVARVVFHEISEDAIKKALMSPRYIDMDLVNAYLARRSLDYLIGFGISPLLWRKLPGCQSAGRVQSAALALVCDREAEIEQFKAHEYWTVQTDFKIQSADPSNATCIPFCIKHLNSKKLDQLSIPSQEEAQAIEKMIHSSTFEVLGVKRSKIHKNPPLPYITSSLQQDAANKLHFTAGYTMKIAQNLYEGINLSSEETTGLITYIRTDGFHISDGAVEDIRSLVKERYGQKYVSEDIRKYLKKVKNAQEAHEAIRPTSIRRPPSSLVGILDDDSLKLYTLIWKRTMACQMEASRTEMIQVDVGIPEGEMNFHSTASKLDFKG

SEQ ID NO: 187150 - protein, 722 aa, Zea Mays
MALQLRRLLPHGYAQRHRAVIHALSLLPPPPAMLQFEVFQRYSSSPWPFSPFRPCKMCGVAFRSNSTRKISSRNNFGVALQPKSSAFITPRLFGSYSSVCFRATASCGIALKANNIGNSRPFSTTYSKKIRFLVKNKISFSNLNMRRKDGSVAHSLLHRSEKCQSTLATCSTIVDEASTSTSNNSKSVTDAKTDTAKRKSSRGSKKEVDGDMKEKEVHTNKKRIFARTRKAATKTSDNISTNQENKKTDNCKLKRGADSFKEKKVNNRAKSKAEVSAASSVPEICMQSSIDGSVIEKKPLVPLYPPRAKSVVVVESATKAKVIQKYLGDMYEVLPSYGHVRDLAGRSKSVRPDDDFSMVWEVPAAAWTHLKSIKVALQRAENLILASDPDREGEAIAWHIKEMLEQQGVLGFDVTVARVVFHEISEDAIKKALMSPRYIDMDLVNAYLARRSLDYLIGFGISPLLWRKLPGCQSAGRVQSAALALVCDREAEIEQFKAHEYWTVQTDFKIQSADPSNATCIPFCIKHLNSKKLDQLSIPSQEEAQAIEKMIHSSTFEVLGVKRSKIHKNPPLPYITSSLQQDAANKLHFTAGYTMKIAQNLYEGINLSSEETTGLITYIRTDGFHISDGAVEDIRSLVKERYGQKYVSEDIRKYLKKVKNAQEAHEAIRPTSIRRPPSSLVGILDDDSLKLYTLIWKRTMACQMEASRTEMPDVERGDLQLS

SEQ ID NO: 187151 - protein, 80 aa, Zea Mays
MGLLPLILSQPSKVFSLTLKDQLKGLKLLHYANRLALPDDGTITTVRPKPATLDFLGLGIGGTMDGSTANNGLPALMVGG

SEQ ID NO: 187152 - protein, 50 aa, Zea Mays
MGLLPLILSQPSKVFSLTLKDQLKTQLFSMLYRYSTIAKGPLAELVRWSE

SEQ ID NO: 187153 - protein, 389 aa, Zea Mays
MRLYLILSILLGEEGLQHSVPGMKKDSFTTIISIFKSIKSSQDVVDGSKTKTVCAICDLGTLIAKRLCQDQTSLSEAQTVPLPAQLYTPLHDNQNENSVENNEQIWLGCEKVLAHFEAVRTANMDKVESPKHKMLIDVTDEFGNEVPLGKIVKLLKSRGERKIGEKQKAPSSSSVNAENDDVLGLVREINLNNQEDLEESHKDKSEKRHTNAKDSNQKPLDFSSPKRKRSISKSRPHSAKGSKSSDERLLHTPNSERTNISLETKMKEKDRDDSTDTELLVSPSTRTPVSKQNKGAKKSNINILSSVPKKSADADSTKRTVEPRSLNGSLKRQKSKPISGLLKCSTQDSSSTDLVGHRIKVWWPLDKRFYEGAVQSYDSSKKKHRGAIR

SEQ ID NO: 187154 - protein, 333 aa, Zea Mays
MWVIPNDAIFLLLMRLYLILSILLGEEGLQHSVPGMKKDSFTTIISIFKSIKSSQDVVDGSKTKTVCAICDLGTLIAKRLCQDQTSLSEAQTVPLPAQLYTPLHDNQNENSVENNEQIWLGCEKVLAHFEAVRTANMDKVESPKHKMLIDVTDEFGNEVPLGKIVKLLKSRGERKIGEKQKAPSSSSVNAENDDVLGLVREINLNNQEDLEESHKDKSEKRHTNAKDSNQKPLDFSSPKRKRSISKSRPHSAKGSKSSDERLLHTPNSERTNISLETKMKEKDRDDSTDTELLVSPSTRTPVSKQNKGAKKSNINILSSVPKTVLRELLNREV

SEQ ID NO: 187155 - protein, 848 aa, Zea Mays
MPIFETRKEEIISFITKKILECNDDMVRNSSNKSEWGDSTENCLLKIYGIKTLVKSYLPCKDAHAQPGIEKLIDILKNILTYGDVSPNMVSSAADKAHLRLAAAKAVLRLSKQWDHKVPVDVFYLTLRISQDDFPQVRKLFLCKVLQYIKERALDAKYACTFMFGVNDYHAPPYEEFKYNLTEVVQICQQVKMRQLSVQADMDLLTAYPEYIISFLVHALAHDPSSPEIEEHENVNAFGPIYWISWIQCILLVSRPFDLGGLGIPNLLTMNWALQIHWLWLQKTAPSKPWSGLDLKISPQVRALFQAAVATTIGNGSTTFFWKDRWIHGCCVKDTAPLIVAAVPKKYRDERTVQQALTDLTWVQDIQGNLSLTGIEQYLQLWSKGLQKGWSVECVRCAYGGESVCKHWRLYLILSILLGEEGLQHSVPGMKKDSFTTIISIFKSIKSSQDVVDGSKTKTVCAICDLGTLIAKRLCQDQTSLSEAQTVPLPAQLYTPLHDNQNENSVENNEQIWLGCEKVLAHFEAVRTANMDKVESPKHKMLIDVTDEFGNEVPLGKIVKLLKSRGERKIGEKQKAPSSSSVNAENDDVLGLVREINLNNQEDLEESHKDKSEKRHTNAKDSNQKPLDFSSPKRKRSISKSRPHSAKGSKSSDERLLHTPNSERTNISLETKMKEKDRDDSTDTELLVSPSTRTPVSKQNKGAKKSNINILSSVPKKSADADSTKRTVEPRSLNGSLKRQKSKPISGLLKCSTQDSSSTDLVGHRIKVWWPLDKRFYEGAVQSYDSSKKKHRVLYDDGDVEVLNLAKEKWILIESNDSSVKRQKKDHLGTNPGRALEITSSSKSPPSL

SEQ ID NO: 187156 - protein, 1460 aa, Zea Mays
MELPPCSSPPNLASPGSSVAEAAAAGDGDRREQQHAVGKEMSVRIMREGGWCCTCVSHEGGDAAVLRLCEGEVESPQADHSTQALSCLILVLNSLVMHTCLIEILLLHVLQKAVECLHGIEQSPVSSVMEAIQPSLKAVTREELLKHEDDNVKVLLATCFCEITRITAPDAPYNDDILRDIFYLIVGTFGGLNDVNSQSFGRKVAILETVARYRACVVMLDLECDDLITNMFQTFLVVVSESHEEYIVKSMQTIMTLIIDESEDVHESLLRVLLSALGQKKTGAAMSARKLACSVIEHSATKLEPYLKKFLMSSWAGNVSSSNDQIDHQGVVFDLYQCAPKVLKVIVPYITGELLADEVDNRSKSVELLGEIFSLPGSPIVECFETLFTEFLKRLTDRVVEIRISVVEYLKRCLISNPSRAEAPEIIKALCDRLLDYEENVRKGVVAALCDVATHSPDAIPIDTIKVVAERVRDKSLAVKCYTMERLADIYKLYCQRGFDSSTNSDDFEWIPGKILRCLYDKDFRPESINSILCGSLFPPEFPMKGRVKHWVTAATYFDKVEMKALEQILLQKQRLQQEMMKYISLRQLSQEDAPDLQKRIIGCFRNISRLFSDSAKCEENLNMLHQLKDADIWKIFTSLLNCSTTFEKAWSLRADLLKIFGEKHVLYNFVGALAMGCSYLLVNKEYAKEILSEASEQKTSGNTKLISSCMNLLTAISSFFPSLLSGLEEDIVELLKEDNEVLKEGIAHVLSKAGGTIREQLASTSSLDLLLERLCLEGTRRQAKYSVHALAAITKDDGLMSLSVLYKDMVRNSSNKSEWGDSTENCLLKIYGIKTLVKSYLPCKDAHAQPGIEKLIDILKNILTYGDVSPNMVSSAADKAHLRLAAAKAVLRLSKQWDHKVPVDVFYLTLRISQDDFPQVRKLFLCKVLQYIKERALDAKYACTFMFGVNDYHAPPYEEFKYNLTEVVQICQQVKMRQLSVQADMDLLTAYPEYIISFLVHALAHDPSSPEIEEHENVNAFGPIYWRLYLILSILLGEEGLQHSVPGMKKDSFTTIISIFKSIKSSQDVVDGSKTKTVCAICDLGTLIAKRLCQDQTSLSEAQTVPLPAQLYTPLHDNQNENSVENNEQIWLGCEKVLAHFEAVRTANMDKVESPKHKMLIDVTDEFGNEVPLGKIVKLLKSRGERKIGEKQKAPSSSSVNAENDDVLGLVREINLNNQEDLEESHKDKSEKRHTNAKDSNQKPLDFSSPKRKRSISKSRPHSAKGSKSSDERLLHTPNSERTNISLETKMKEKDRDDSTDTELLVSPSTRTPVSKQNKGAKKSNINILSSVPKKSADADSTKRTVEPRSLNGSLKRQKSKPISGLLKCSTQDSSSTDLVGHRIKVWWPLDKRFYEGAVQSYDSSKKKHRVLYDDGDVEVLNLAKEKWILIESNDSSVKRQKKDHLGTNPGSHLAEHWR

SEQ ID NO: 187157 - protein, 1350 aa, Zea Mays
MAAVEQLKELGEKLQAVAPAPADELAKLLEKAVECLHGIEQSPVSSVMEAIQPSLKAVTREELLKHEDDNVKVLLATCFCEITRITAPDAPYNDDILRDIFYLIVGTFGGLNDVNSQSFGRKVAILETVARYRACVVMLDLECDDLITNMFQTFLVVVSESHEEYIVKSMQTIMTLIIDESEDVHESLLRVLLSALGQKKTGAAMSARKLACSVIEHSATKLEPYLKKFLMSSWAGNVSSSNDQIDHQGVVFDLYQCAPKVLKVIVPYITGELLADEVDNRSKSVELLGEIFSLPGSPIVECFETLFTEFLKRLTDRVVEIRISVVEYLKRCLISNPSRAEAPEIIKALCDRLLDYEENVRKGVVAALCDVATHSPDAIPIDTIKVVAERVRDKSLAVKCYTMERLADIYKLYCQRGFDSSTNSDDFEWIPGKILRCLYDKDFRPESINSILCGSLFPPEFPMKGRVKHWVTAATYFDKVEMKALEQILLQKQRLQQEMMKYISLRQLSQEDAPDLQKRIIGCFRNISRLFSDSAKCEENLNMLHQLKDADIWKIFTSLLNCSTTFEKAWSLRADLLKIFGEKHVLYNFVGALAMGCSYLLVNKEYAKEILSEASEQKTSGNTKLISSCMNLLTAISSFFPSLLSGLEEDIVELLKEDNEVLKEGIAHVLSKAGGTIREQLASTSSLDLLLERLCLEGTRRQAKYSVHALAAITKDDGLMSLSVLYKDMVRNSSNKSEWGDSTENCLLKIYGIKTLVKSYLPCKDAHAQPGIEKLIDILKNILTYGDVSPNMVSSAADKAHLRLAAAKAVLRLSKQWDHKVPVDVFYLTLRISQDDFPQVRKLFLCKVLQYIKERALDAKYACTFMFGVNDYHAPPYEEFKYNLTEVVQICQQVKMRQLSVQADMDLLTAYPEYIISFLVHALAHDPSSPEIEEHENVNAFGPIYWRLYLILSILLGEEGLQHSVPGMKKDSFTTIISIFKSIKSSQDVVDGSKTKTVCAICDLGTLIAKRLCQDQTSLSEAQTVPLPAQLYTPLHDNQNENSVENNEQIWLGCEKVLAHFEAVRTANMDKVESPKHKMLIDVTDEFGNEVPLGKIVKLLKSRGERKIGEKQKAPSSSSVNAENDDVLGLVREINLNNQEDLEESHKDKSEKRHTNAKDSNQKPLDFSSPKRKRSISKSRPHSAKGSKSSDERLLHTPNSERTNISLETKMKEKDRDDSTDTELLVSPSTRTPVSKQNKGAKKSNINILSSVPKKSADADSTKRTVEPRSLNGSLKRQKSKPISGLLKCSTQDSSSTDLVGHRIKVWWPLDKRDFMKVPCNHTIHPRKNIGCYTMTEMLKCLTWLKRSGY

SEQ ID NO: 187158 - protein, 1372 aa, Zea Mays
MAAVEQLKELGEKLQAVAPAPADELAKLLEKAVECLHGIEQSPVSSVMEAIQPSLKAVTREELLKHEDDNVKVLLATCFCEITRITAPDAPYNDDILRDIFYLIVGTFGGLNDVNSQSFGRKVAILETVARYRACVVMLDLECDDLITNMFQTFLVVVSESHEEYIVKSMQTIMTLIIDESEDVHESLLRVLLSALGQKKTGAAMSARKLACSVIEHSATKLEPYLKKFLMSSWAGNVSSSNDQIDHQGVVFDLYQCAPKVLKVIVPYITGELLADEVDNRSKSVELLGEIFSLPGSPIVECFETLFTEFLKRLTDRVVEIRISVVEYLKRCLISNPSRAEAPEIIKALCDRLLDYEENVRKGVVAALCDVATHSPDAIPIDTIKVVAERVRDKSLAVKCYTMERLADIYKLYCQRGFDSSTNSDDFEWIPGKILRCLYDKDFRPESINSILCGSLFPPEFPMKGRVKHWVTAATYFDKVEMKALEQILLQKQRLQQEMMKYISLRQLSQEDAPDLQKRIIGCFRNISRLFSDSAKCEENLNMLHQLKDADIWKIFTSLLNCSTTFEKAWSLRADLLKIFGEKHVLYNFVGALAMGCSYLLVNKEYAKEILSEASEQKTSGNTKLISSCMNLLTAISSFFPSLLSGLEEDIVELLKEDNEVLKEGIAHVLSKAGGTIREQLASTSSLDLLLERLCLEGTRRQAKYSVHALAAITKDDGLMSLSVLYKDMVRNSSNKSEWGDSTENCLLKIYGIKTLVKSYLPCKDAHAQPGIEKLIDILKNILTYGDVSPNMVSSAADKAHLRLAAAKAVLRLSKQWDHKVPVDVFYLTLRISQDDFPQVRKLFLCKVLQYIKERALDAKYACTFMFGVNDYHAPPYEEFKYNLTEVVQICQQVKMRQLSVQADMDLLTAYPEYIISFLVHALAHDPSSPEIEEHENVNAFGPIYWRLYLILSILLGEEGLQHSVPGMKKDSFTTIISIFKSIKSSQDVVDGSKTKTVCAICDLGTLIAKRLCQDQTSLSEAQTVPLPAQLYTPLHDNQNENSVENNEQIWLGCEKVLAHFEAVRTANMDKVESPKHKMLIDVTDEFGNEVPLGKIVKLLKSRGERKIGEKQKAPSSSSVNAENDDVLGLVREINLNNQEDLEESHKDKSEKRHTNAKDSNQKPLDFSSPKRKRSISKSRPHSAKGSKSSDERLLHTPNSERTNISLETKMKEKDRDDSTDTELLVSPSTRTPVSKQNKGAKKSNINILSSVPKKSADADSTKRTVEPRSLNGSLKRQKSKPISGLLKCSTQDSSSTDLVGHRIKVWWPLDKRFYEGAVQSYDSSKKKHRVLYDDGDVEVLNLAKEKWILIESNDSSVKRQKKDHLGTNPGR

SEQ ID NO: 187159 - protein, 1359 aa, Zea Mays
MLQKAVECLHGIEQSPVSSVMEAIQPSLKAVTREELLKHEDDNVKVLLATCFCEITRITAPDAPYNDDILRDIFYLIVGTFGGLNDVNSQSFGRKVAILETVARYRACVVMLDLECDDLITNMFQTFLVVVSESHEEYIVKSMQTIMTLIIDESEDVHESLLRVLLSALGQKKTGAAMSARKLACSVIEHSATKLEPYLKKFLMSSWAGNVSSSNDQIDHQGVVFDLYQCAPKVLKVIVPYITGELLADEVDNRSKSVELLGEIFSLPGSPIVECFETLFTEFLKRLTDRVVEIRISVVEYLKRCLISNPSRAEAPEIIKALCDRLLDYEENVRKGVVAALCDVATHSPDAIPIDTIKVVAERVRDKSLAVKCYTMERLADIYKLYCQRGFDSSTNSDDFEWIPGKILRCLYDKDFRPESINSILCGSLFPPEFPMKGRVKHWVTAATYFDKVEMKALEQILLQKQRLQQEMMKYISLRQLSQEDAPDLQKRIIGCFRNISRLFSDSAKCEENLNMLHQLKDADIWKIFTSLLNCSTTFEKAWSLRADLLKIFGEKHVLYNFVGALAMGCSYLLVNKEYAKEILSEASEQKTSGNTKLISSCMNLLTAISSFFPSLLSGLEEDIVELLKEDNEVLKEGIAHVLSKAGGTIREQLASTSSLDLLLERLCLEGTRRQAKYSVHALAAITKDDGLMSLSVLYKDMVRNSSNKSEWGDSTENCLLKIYGIKTLVKSYLPCKDAHAQPGIEKLIDILKNILTYGDVSPNMVSSAADKAHLRLAAAKAVLRLSKQWDHKVPVDVFYLTLRISQDDFPQVRKLFLCKVLQYIKERALDAKYACTFMFGVNDYHAPPYEEFKYNLTEVVQICQQVKMRQLSVQADMDLLTAYPEYIISFLVHALAHDPSSPEIEEHENVNAFGPIYWRLYLILSILLGEEGLQHSVPGMKKDSFTTIISIFKSIKSSQDVVDGSKTKTVCAICDLGTLIAKRLCQDQTSLSEAQTVPLPAQLYTPLHDNQNENSVENNEQIWLGCEKVLAHFEAVRTANMDKVESPKHKMLIDVTDEFGNEVPLGKIVKLLKSRGERKIGEKQKAPSSSSVNAENDDVLGLVREINLNNQEDLEESHKDKSEKRHTNAKDSNQKPLDFSSPKRKRSISKSRPHSAKGSKSSDERLLHTPNSERTNISLETKMKEKDRDDSTDTELLVSPSTRTPVSKQNKGAKKSNINILSSVPKKSADADSTKRTVEPRSLNGSLKRQKSKPISGLLKCSTQDSSSTDLVGHRIKVWWPLDKRFYEGAVQSYDSSKKKHRVLYDDGDVEVLNLAKEKWILIESNDSSVKRQKKDHLGTNPGRALEITSSSKSPPSL

SEQ ID NO: 187160 - protein, 601 aa, Zea Mays
MYEVTPRQDDGDVNAGANPTDEHLKKSRTYLLLLAILAVSLAYQSGLNPPGGFWTQRGTNNSPKSTHHRPYHLPGDPILEDTRHRRYIAFFYLNAIAFVASLVMIIMLLNRRMSYKGIKRYALQMAMIVDLLALTGSYIMGSSRGTKSSIYIWLLVCLVLVYVAVHVLIATHVIPEGCKKVVAQKIENFSCRYIWTKASFRNRGIDGNGSDCEAGQSQRSDADDKTWERRRNLLLMLAVLAATVTYQAGINPPGGVWSDDSSASGKPGDPILQHNNSKRYDVFYYSNSLSFVASVVITILLVNKESCEHGIKSYALRVCLVVGLVSLLIAYSAGSSRKARESIYLIVIAVAVLIALVIQVLLLSCTQDSLRGPTGQFIERLLQLLFGTDKAWHGDTSKQKESSGRPEKKVRKRHKYLMLLAVLAASITYQAGLNPPGGFWSDDNEGHVEGNPGLKPPGALWSDNKGHLAGNPVLLDINPRRYEIFFCFNSISFMASIVVVMFLLNKSARKKAVPLEVLHLIMILDLLALMTAFAAGSCRKFRTSVYVYGLVLGVVVYLVIAVLLSSGIAKCLRPMDRNRVSSQRSPIRAPTASTRILGDHA

SEQ ID NO: 187161 - protein, 82 aa, Zea Mays
MQHWRSFLTRIECGRVALHPSVSLSSLFLTFYCLYNCMTCAFVTYIVCYDTSVHNFTCSIPCSLVHSLLGKQSKWRSYVSLY

SEQ ID NO: 187162 - protein, 647 aa, Zea Mays
MATSKLITITMTILLFLIVGFIPELCVAASSDHEQFVFNGFTGSNLSLDGAARITSTGLIELTNDSARIKGHAFHPSPLRFRRSSDGTVQSFSVSFVFGILSSFGDINDNHVGIDINSLNSLKSYAAGFYNDQNSGRFTNLPLIGSQQPIQAWVEYDGNKTRIDVTIAPLGLAKPLTPLLSLAFNLSTVLTEEEAYIGFSSSTGLSTGHHIILGWSFGMNRPAPAIDSTKLPKLPYLGPRAPSKLLEIVLPIASALFVLVVGTTAVILVRRHLRYKEDVREDWEVEYGPQRFTYKDLSHATKGFSSKHLVGVGGFGRVYRGVLPKSRSQVAVKTVPYNSKQGVKQFTAEVASMGHLQHSNIVQLHGYCRRKGEFFLVYDYMVNGSLDRYLYGYGGEEGRPPGATATVVLDWAQRFKIVRDIASGLLYLHEEWDKVVVHRDVKPSNVLLDNNMNGRLGDFGLARLYDHGTDPHTTHVVGTIGYLAPELAHRGKASTRTDVFAFGVFVLEVTCGRKPVVVSEDTDTPGRGTQLMLVDWVIQNWHKGSLVDAIDIKLQGRYDVDQACLALKLGLLCSHPSPDARPSMRQVLQYLDGDLPLPELLPAHFSFHMLALLQSETRLNTSTVSLYPSPAMTMMDYGSVSFSLDGR

SEQ ID NO: 187163 - protein, 780 aa, Zea Mays
MAVEDHDQSYLGKEERSVFVKAILKLLDRGQYSKDNSLAETVSVATSILSYIEPTLVLQFVAKNFQRALETTTATHQLKNAVTSVAFSGRALLLCSLCSSQNDDSSVVDSFSDLVVASLSNALLGMDANDPPKTIATMQLIGSIFSNLAAVSDDVPILLQSTTLSNWLDEFFSRLFSVLHNLESSSPINEGYQSSFMSGTFLVDSPYYFCMLEILLGKLSKPLFNQSLKRIAKFVNANILPGATSEVGLLCCACVHSYPEEASVYLVKPILETIMSSFEGTPTTGYVGRVVADKASTKAALSPALETAIDYYLRVLAISISYAGPTLLNYKEELNHIITSAFQSPSWKVNGAGDHLLRSLLGNLVSYYPIDQYKPFTCQPIGNIIEPWGCSKAHQDREDEMLNFPPKWHDPSHDELSFANELLQLHFQSALEDLLTICQTKVHSDTGDEKEHLKITLLRIHSALHGVMSCLPEIRPSYKDGRSLEVESAFFIAGSAGSTVGSSEMREKAAEFVHIACRYLLKERTDDSILLSLVVRVIDALVNYGSLEYQEWSSHVQAWKLESASIIEPPCNFIVPFHAQGKKRPRWALVDKANLHSTWRCSQSSYHRYRMNADVSPSVPMINLMNDLLDLSLHNYETVRSYAGRSLTKLLKRWPSLISNCVLTLTGNLRDPKAPEHVVLGSCSILISQTVLRHLTTDSVSLSSFIMGILESSHHESLKCQKAITELFVTYNIRFSGISRSFFKTPENQADKPGFLSLISQINALGFETNGLHWRRTAHH

SEQ ID NO: 187164 - protein, 1453 aa, Zea Mays
MAVEDHDQSYLGKEERSVFVKAILKLLDRGQYSKDNSLAETVSVATSILSYIEPTLVLQFVAKNFQRALETTTATHQLKNAVTSVAFSGRALLLCSLCSSQNDDSSVVDSFSDLVVASLSNALLGMDANDPPKTIATMQLIGSIFSNLAAVSDDVPILLQSTTLSNWLDEFFSRLFSVLHNLESSSPINEGYQSSFMSGTFLVDSPYYFCMLEILLGKLSKPLFNQSLKRIAKFVNANILPGATSEVGLLCCACVHSYPEEASVYLVKPILETIMSSFEGTPTTGYVGRVVADKASTKAALSPALETAIDYYLRVLAISISYAGPTLLNYKEELNHIITSAFQSPSWKVNGAGDHLLRSLLGNLVSYYPIDQYKPFTCQPIGNIIEPWGCSKAHQDREDEMLNFPPKWHDPSHDELSFANELLQLHFQSALEDLLTICQTKVHSDTGDEKEHLKITLLRIHSALHGVMSCLPEIRPSYKDGRSLEVESAFFIAGSAGSTVGSSEMREKAAEFVHIACRYLLKERTDDSILLSLVVRVIDALVNYGSLEYQEWSSHVQAWKLESASIIEPPCNFIVPFHAQGKKRPRWALVDKANLHSTWRCSQSSYHRYRMNADVSPSVPMINLMNDLLDLSLHNYETVRSYAGRSLTKLLKRWPSLISNCVLTLTGNLRDPKAPEHVVLGSCSILISQTVLRHLTTDSVSLSSFIMGILESSHHESLKCQKAITELFVTYNIRFSGISRSFFKTPENQADKPGFLSLISQINALGFETNGLHWRYNLMANRVLLLLILASRSESGIYSQMLAKIAGHFLRNLKSQLPHSRMLAISALNTLLQGSPHKTSAQNSKQPIDHPEDCNISSTEEILNEIIREEGFMNETLNSLSHVHIISDNDGSSKASYGASSFQSGSDKAITYFYFDFSASWPRTPSWISLLRGHTFYSSFARIFKRLIQQCGMPVISSLQSTLEEFLISKERPRQCVAAEAMAGMLHSDIIGNLECENNWLMAQLHKIMLAPSVESAPEWAACIRYAVTGKERAGTRAPVLRQKVLECLCTPLPHSMATSVLAKRYSFLSVALIEISPPKMSPAEKQYHVKILDELLDSMNHSSAQVREAIGIAMCVTTSNMRLSGLFGTGCSPQGLHGDVSMIEQTGNKYWSERLTDGANELAVSIQNSTQSKQLESTSDSAEDSMDDREQADAKRMETIFHFMIASLKSGRSSVLLDTIIRLVYPILSLQETSNKDLSLLAKSAFELLKWRILHRPFLETAITSILPLVSDPNWRTRSALLSYLRTFTYRHTFILSGSEKSQIWQTIEKLLVDNQVEVREHAAGVLASLMKGIDEDLSKDFRERSYAQAQHIFVARRRNLKFSVGTIHGAVLALTASVLSVPYDMPSWLPSNVSLLARFIREPPPIRSTVTKAVAEFKRTHADTWSIQKDAFTEDELEVLRDTSSSSSYFA

SEQ ID NO: 187165 - protein, 1823 aa, Zea Mays
MQVGDDRLGRGGSRQGVGVSGWCLVPGGCRPGRCGARQGRDGGGKRHLGKERRRQGAAAAGDRPWLTAARNFIKAKSDIASEDLQALVKLGLEVFHASHNKFVVQIKWGGLLIRLLRKHGKRLSLVVQWRPLYETLIRTHFKRNMGPEGWKVRKQHFETVTSLVCASRNFFTEGVAAEIWSEFRPLLENPWHNSAFEGVGFLRLFLPANSRNQDHFTTDWIRNCLDIWDSVTNCNFWDIQWASIIARCIKNSRSVNWDAFLPLLFTRYLNMFEVPISSGNGSYPFPVEVPGNTRFLFSSKTRTLSKAIAKSVVYLLKPKSLAFEYFEKLINFLEQFYHPSNGGRWTYSLERFLRYLVVYFEKRLQHEQFVMAVEDHDQSYLGKEERSVFVKAILKLLDRGQYSKDNSLAETVSVATSILSYIEPTLVLQFVAKNFQRALETTTATHQLKNAVTSVAFSGRALLLCSLCSSQNDDSSVVDSFSDLVVASLSNALLGMDANDPPKTIATMQLIGSIFSNLAAVSDDVPILLQSTTLSNWLDEFFSRLFSVLHNLESSSPINEGYQSSFMSGTFLVDSPYYFCMLEILLGKLSKPLFNQSLKRIAKFVNANILPGATSEVGLLCCACVHSYPEEASVYLVKPILETIMSSFEGTPTTGYVGRVVADKASTKAALSPALETAIDYYLRVLAISISYAGPTLLNYKEELNHIITSAFQSPSWKVNGAGDHLLRSLLGNLVSYYPIDQYKPFTCQPIGNIIEPWGCSKAHQDREDEMLNFPPKWHDPSHDELSFANELLQLHFQSALEDLLTICQTKVHSDTGDEKEHLKITLLRIHSALHGVMSCLPEIRPSYKDGRSLEVESAFFIAGSAGSTVGSSEMREKAAEFVHIACRYLLKERTDDSILLSLVVRVIDALVNYGSLEYQEWSSHVQAWKLESASIIEPPCNFIVPFHAQGKKRPRWALVDKANLHSTWRCSQSSYHRYRMNADVSPSVPMINLMNDLLDLSLHNYETVRSYAGRSLTKLLKRWPSLISNCVLTLTGNLRDPKAPEHVVLGSCSILISQTVLRHLTTDSVSLSSFIMGILESSHHESLKCQKAITELFVTYNIRFSGISRSFFKTPENQADKPGFLSLISQINALGFETNGLHWRYNLMANRVLLLLILASRSESGIYSQMLAKIAGHFLRNLKSQLPHSRMLAISALNTLLQGSPHKTSAQNSKQPIDHPEDCNISSTEEILNEIIREEGFMNETLNSLSHVHIISDNDGSSKASYGASSFQSGSDKAITYFYFDFSASWPRTPSWISLLRGHTFYSSFARIFKRLIQQCGMPVISSLQSTLEEFLISKERPRQCVAAEAMAGMLHSDIIGNLECENNWLMAQLHKIMLAPSVESAPEWAACIRYAVTGKERAGTRAPVLRQKVLECLCTPLPHSMATSVLAKRYSFLSVALIEISPPKMSPAEKQYHVKILDELLDSMNHSSAQVREAIGIAMCVTTSNMRLSGLFGTGCSPQGLHGDVSMIEQTGNKYWSERLTDGANELAVSIQNSTQSKQLESTSDSAEDSMDDREQADAKRMETIFHFMIASLKSGRSSVLLDTIIRLVYPILSLQETSNKDLSLLAKSAFELLKWRILHRPFLETAITSILPLVSDPNWRTRSALLSYLRTFTYRHTFILSGSEKSQIWQTIEKLLVDNQVEVREHAAGVLASLMKGIDEDLSKDFRERSYAQAQHIFVARRRNLKFSVGTIHGAVLALTASVLSVPYDMPSWLPSNVSLLARFIREPPPIRSTVTKAVAEFKRTHADTWSIQKDAFTEDELEVLRDTSSSSSYFA

SEQ ID NO: 187166 - protein, 1603 aa, Zea Mays
MHLYNAWLPPPVSTAARGEAAAFAGAVRTAADAWLPGDSDSAYATLKWISVFDLFIKAKSDIASEDLQALVKLGLEVFHASHNKFVVQIKWGGLLIRLLRKHGKRLSLVVQWRPLYETLIRTHFKRNMGPEGWKVRKQHFETVTSLVCASRNFFTEGVAAEIWSEFRPLLENPWHNSAFEGVGFLRLFLPANSRNQDHFTTDWIRNCLDIWDSVTNCNFWDIQWASIIARCIKNSRSVNWDAFLPLLFTRYLNMFEVPISSGNGSYPFPVEVPGNTRFLFSSKTRTLSKAIAKSVVYLLKPKSLAFEYFEKLINFLEQFYHPSNGGRWTYSLERFLRYLVVYFEKRLQHEQFVMAVEDHDQSYLGKEERSVFVKAILKLLDRGQYSKDNSLAETVSVATSILSYIEPTLVLQFVAKNFQRALETTTATHQLKNAVTSVAFSGRALLLCSLCSSQNDDSSVVDSFSDLVVASLSNALLGMDANDPPKTIATMQLIGSIFSNLAAVSDDVPILLQSTTLSNWLDEFFSRLFSVLHNLESSSPINEGYQSSFMSGTFLVDSPYYFCMLEILLGKLSKPLFNQSLKRIAKFVNANILPGATSEVGLLCCACVHSYPEEASVYLVKPILETIMSSFEGTPTTGYVGRVVADKASTKAALSPALETAIDYYLRVLAISISYAGPTLLNYKEELNHIITSAFQSPSWKVNGAGDHLLRSLLGNLVSYYPIDQYKPFTCQPIGNIIEPWGCSKAHQDREDEMLNFPPKWHDPSHDELSFANELLQLHFQSALEDLLTICQTKVHSDTGDEKEHLKITLLRIHSALHGVMSCLPEIRPSYKDGRSLEVESAFFIAGSAGSTVGSSEMREKAAEFVHIACRYLLKERTDDSILLSLVVRVIDALVNYGSLEYQEWSSHVQAWKLESASIIEPPCNFIVPFHAQGKKRPRWALVDKANLHSTWRCSQSSYHRYRMNADVSPSVPMINLMNDLLDLSLHNYETVRSYAGRSLTKLLKRWPSLISNCVLTLTGNLRDPKAPEHVVLGSCSILISQTVLRHLTTDSVSLSSFIMGILESSHHESLKCQKAITELFVTYNIRFSGISRSFFKTPENQADKPGFLSLISQINALGFETNGLHWRYNLMANRVLLLLILASRSESGIYSQMLAKIAEEILNEIIREEGFMNETLNSLSHVHIISDNDGSSKASYGASSFQSGSDKAITYFYFDFSASWPRTPSWISLLRGHTFYSSFARIFKRLIQQCGMPVISSLQSTLEEFLISKERPRQCVAAEAMAGMLHSDIIGNLECENNWLMAQLHKIMLAPSVESAPEWAACIRYAVTGKERAGTRAPVLRQKVLECLCTPLPHSMATSVLAKRYSFLSVALIEISPPKMSPAEKQYHVKILDELLDSMNHSSAQVREAIGIAMCVTTSNMRLSGLFGTGCSPQGLHGDVSMIEQTGNKYWSERLTDGANELAVSIQNSTQSKQLESTSDSAEDSMDDREQADAKRMETIFHFMIASLKSGRSSVLLDTIIRLVYPILSLQETSNKDLSLLAKSAFELLKWRILHRPFLETAITSILPLVSDPNWRTRSALLSYLRTFTYRLGSMLLVFLQA

SEQ ID NO: 187167 - protein, 735 aa, Zea Mays
MHLYNAWLPPPVSTAARGEAAAFAGAVRTAADAWLPGDSDSAYATLKWISVFDLFIKAKSDIASEDLQALVKLGLEVFHASHNKFVVQIKWGGLLIRLLRKHGKRLSLVVQWRPLYETLIRTHFKRNMGPEGWKVRKQHFETVTSLVCASRNFFTEGVAAEIWSEFRPLLENPWHNSAFEGVGFLRLFLPANSRNQDHFTTDWIRNCLDIWDSVTNCNFWDIQWASIIARCIKNSRSVNWDAFLPLLFTRYLNMFEVPISSGNGSYPFPVEVPGNTRFLFSSKTRTLSKAIAKSVVYLLKPKSLAFEYFEKLINFLEQFYHPSNGGRWTYSLERFLRYLVVYFEKRLQHEQFVMAVEDHDQSYLGKEERSVFVKAILKLLDRGQYSKDNSLAETVSVATSILSYIEPTLVLQFVAKNFQRALETTTATHQLKNAVTSVAFSGRALLLCSLCSSQNDDSSVVDSFSDLVVASLSNALLGMDANDPPKTIATMQLIGSIFSNLAAVSDDVPILLQSTTLSNWLDEFFSRLFSVLHNLESSSPINEGYQSSFMSGTFLVDSPYYFCMLEILLGKLSKPLFNQSLKRIAKFVNANILPGATSEVGLLCCACVHSYPEEASVYLVKPILETIMSSFEGTPTTGYVGRVVADKASTKAALSPALETAIDYYLRVLAISISYAGPTLLNYKEELNHIITSAFQSPSWKVIFFIYLFIHSNSYYFHVPIIYYRMTNFLFSWNV

SEQ ID NO: 187168 - protein, 1457 aa, Zea Mays
MGVVGPTHWNASCAILLFTLRNAFSMNNLLWQLRTMINLIWERKKVSVATSILSYIEPTLVLQFVAKNFQRALETTTATHQLKNAVTSVAFSGRALLLCSLCSSQNDDSSVVDSFSDLVVASLSNALLGMDANDPPKTIATMQLIGSIFSNLAAVSDDVPILLQSTTLSNWLDEFFSRLFSVLHNLESSSPINEGYQSSFMSGTFLVDSPYYFCMLEILLGKLSKPLFNQSLKRIAKFVNANILPGATSEVGLLCCACVHSYPEEASVYLVKPILETIMSSFEGTPTTGYVGRVVADKASTKAALSPALETAIDYYLRVLAISISYAGPTLLNYKEELNHIITSAFQSPSWKVNGAGDHLLRSLLGNLVSYYPIDQYKPFTCQPIGNIIEPWGCSKAHQDREDEMLNFPPKWHDPSHDELSFANELLQLHFQSALEDLLTICQTKVHSDTGDEKEHLKITLLRIHSALHGVMSCLPEIRPSYKDGRSLEVESAFFIAGSAGSTVGSSEMREKAAEFVHIACRYLLKERTDDSILLSLVVRVIDALVNYGSLEYQEWSSHVQAWKLESASIIEPPCNFIVPFHAQGKKRPRWALVDKANLHSTWRCSQSSYHRYRMNADVSPSVPMINLMNDLLDLSLHNYETVRSYAGRSLTKLLKRWPSLISNCVLTLTGNLRDPKAPEHVVLGSCSILISQTVLRHLTTDSVSLSSFIMGILESSHHESLKCQKAITELFVTYNIRFSGISRSFFKTPENQADKPGFLSLISQINALGFETNGLHWRYNLMANRVLLLLILASRSESGIYSQMLAKIAGHFLRNLKSQLPHSRMLAISALNTLLQGSPHKTSAQNSKQPIDHPEDCNISSTEEILNEIIREEGFMNETLNSLSHVHIISDNDGSSKASYGASSFQSGSDKAITYFYFDFSASWPRTPSWISLLRGHTFYSSFARIFKRLIQQCGMPVISSLQSTLEEFLISKERPRQCVAAEAMAGMLHSDIIGNLECENNWLMAQLHKIMLAPSVESAPEWAACIRYAVTGKERAGTRAPVLRQKVLECLCTPLPHSMATSVLAKRYSFLSVALIEISPPKMSPAEKQYHVKILDELLDSMNHSSAQVREAIGIAMCVTTSNMRLSGLFGTGCSPQGLHGDVSMIEQTGNKYWSERLTDGANELAVSIQNSTQSKQLESTSDSAEDSMDDREQADAKRMETIFHFMIASLKSGRSSVLLDTIIRLVYPILSLQETSNKDLSLLAKSAFELLKWRILHRPFLETAITSILPLVSDPNWRTRSALLSYLRTFTYRHTFILSGSEKSQIWQTIEKLLVDNQVEVREHAAGVLASLMKGIDEDLSKDFRERSYAQAQHIFVARRRNLKFSVGTIHGAVLALTASVLSVPYDMPSWLPSNVSLLARFIREPPPIRSTVTKAVAEFKRTHADTWSIQKDAFTEDELEVLRDTSSSSSYFA

SEQ ID NO: 187169 - protein, 1102 aa, Zea Mays
MSGTFLVDSPYYFCMLEILLGKLSKPLFNQSLKRIAKFVNANILPGATSEVGLLCCACVHSYPEEASVYLVKPILETIMSSFEGTPTTGYVGRVVADKASTKAALSPALETAIDYYLRVLAISISYAGPTLLNYKEELNHIITSAFQSPSWKVNGAGDHLLRSLLGNLVSYYPIDQYKPFTCQPIGNIIEPWGCSKAHQDREDEMLNFPPKWHDPSHDELSFANELLQLHFQSALEDLLTICQTKVHSDTGDEKEHLKITLLRIHSALHGVMSCLPEIRPSYKDGRSLEVESAFFIAGSAGSTVGSSEMREKAAEFVHIACRYLLKERTDDSILLSLVVRVIDALVNYGSLEYQEWSSHVQAWKLESASIIEPPCNFIVPFHAQGKKRPRWALVDKANLHSTWRCSQSSYHRYRMNADVSPSVPMINLMNDLLDLSLHNYETVRSYAGRSLTKLLKRWPSLISNCVLTLTGNLRDPKAPEHVVLGSCSILISQTVLRHLTTDSVSLSSFIMGILESSHHESLKCQKAITELFVTYNIRFSGISRSFFKTPENQADKPGFLSLISQINALGFETNGLHWRYNLMANRVLLLLILASRSESGIYSQMLAKIAGHFLRNLKSQLPHSRMLAISALNTLLQGSPHKTSAQNSKQPIDHPEDCNISSTEEILNEIIREEGFMNETLNSLSHVHIISDNDGSSKASYGASSFQSGSDKAITYFYFDFSASWPRTPSWISLLRGHTFYSSFARIFKRLIQQCGMPVISSLQSTLEEFLISKERPRQCVAAEAMAGMLHSDIIGNLECENNWLMAQLHKIMLAPSVESAPEWAACIRYAVTGKERAGTRAPVLRQKVLECLCTPLPHSMATSVLAKRYSFLSVALIEISPPKMSPAEKQYHVKILDELLDSMNHSSAQVREAIGIAMCVTTSNMRLSGLFGTGCSPQGLHGDVSMIEQTGNKYWSERLTDGANELAVSIQNSTQSKQLESTSDSAEDSMDDREQADAKRMETIFHFMIASLKSGRSSVLLDTIIRLVYPILSLQETSNKDLSLLAKSAFELLKWRILHRPFLETAITSILPLVSDPNWRTRSALLSYLRTFTYSAGVYKP

SEQ ID NO: 187170 - protein, 81 aa, Zea Mays
MQQNLTPIWLNTCQWVKTSRYAYPATPAAGRQWKGAPRLQKIPVIFPMILTHHSINIMHLGLVKQGIIHQSLVNQASWDQY

SEQ ID NO: 187171 - protein, 578 aa, Zea Mays
MAGDITCGSLLQKLQFIWDEVGESEEDRDKVLYQLDQECLDVYKRKVDQATNSRDLLIQALDDSKIELARLLSALGEKAIARTPEKTTGTIKQQLAAIAPTLEQLTKQKNERKREFVNVQSQIDQICGEIAGTIEVGEQMTTPQVNEDDLTLERLEDFRSQLKDLEKEKVLDYVGIVHDLCTVLGMDFLSTVIEVHPSLDDSIGDNCKSISNDTLSKLDNTVATLNEDKKLRLSKLQELAGQLYDLWDLMDAPKEERRMFDHVTCNRSASVDEVTAPGSLALDLIEQAEVEVQRLDQLKYSKMKEIAFKKQTELEDIYAGAHIVIDTAAAHEKILALIEAGNIEPSELIADMDTQIAKAKEEALSRKDILDKVERWMSACEEESWLEDYNRDDNRYNSSRGAHLNLKRAEKARILVNKIPALVETLVSKTTAWEENRGLSFMYDGVPLLAMLDEYAMLRQEREEEKKRMREQKRYIEQQLNTDHEGPFGSRVSPNRPASSKKAVGVKVNGSVSNGTPPNRRLSISGQQNGGGHGVRSGGKDSKKDTAKTASPGNNAVAAAPVDAVSQISVTDPVPSTP

SEQ ID NO: 187172 - protein, 460 aa, Zea Mays
MSCRSTNPSWRTTVGDASLSSSGRLYAMEKGLRIPQKERTKTTNSILISLMNQLEKDKKSLTLGPDDNLHLEGFALNVFVKADKQDRAGRADINTAKTFYAASIFFEILNQFGELQPDIEQKQKYAIWKAAEIRKALKEGRKPEAGPPGGDKDEAPDMGQSPSFSSVHQGSEASPRPVNMDFSRRDSFSAVQPGNNVPHQSTEFNDHPSTQLPYSPPPPSQSQHPSPSQSYSSPSYQATTDYPSSDFHKPSPNYSTPGYTSTDFPTNEVHKPPSNYSPPPYTRTDRPSNDGYNPHSNGKPDVSAYPQAYQPSPYTFDPQHNSQNYYSTEAPAVPYNYPNFQSYPSFQDNTSASVLTHQSSFYPESDDPAATSHTPASNSSVPTHYHPTADCSPQVTPPAAPPASQYRYDSSYQPEVEKIAEAHKAARFAVGALAFDDVSVAVDHLKRALDLLTNPSAEPH

SEQ ID NO: 187173 - protein, 304 aa, Zea Mays
MKHLIWGKVLPSAVYTRAVKHHLDLSTWRDSFSAVQPGNNVPHQSTEFNDHPSTQLPYSPPPPSQSQHPSPSQSYSSPSYQATTDYPSSDFHKPSPNYSTPGYTSTDFPTNEVHKPPSNYSPPPYTRTDRPSNDGYNPHSNGKPDVSAYPQAYQPSPYTFDPQHNSQNYYSTEAPAVPYNYPNFQSYPSFQDNTSASVLTHQSSFYPESDDPAATSHTPASNSSVPTHYHPTADCSPQVTPPAAPPASQYRYDSSYQPEVEKIAEAHKAARFAVGALAFDDVSVAVDHLKRALDLLTNPSAEPH

SEQ ID NO: 187174 - protein, 312 aa, Zea Mays
MKHLSVPPPFLKIWGKVLPSAVYTRAVKHHLDLSTWRDSFSAVQPGNNVPHQSTEFNDHPSTQLPYSPPPPSQSQHPSPSQSYSSPSYQATTDYPSSDFHKPSPNYSTPGYTSTDFPTNEVHKPPSNYSPPPYTRTDRPSNDGYNPHSNGKPDVSAYPQAYQPSPYTFDPQHNSQNYYSTEAPAVPYNYPNFQSYPSFQDNTSASVLTHQSSFYPESDDPAATSHTPASNSSVPTHYHPTADCSPQVTPPAAPPASQYRYDSSYQPEVEKIAEAHKAARFAVGALAFDDVSVAVDHLKRALDLLTNPSAEPH

SEQ ID NO: 187175 - protein, 139 aa, Zea Mays
MYTKILGYGALARLVKTGYSISRDEAAKALYAISSLIRNNVNGQEAFNSENGSAMLQLNFRIAQLPLFSDGLFLKSIVDMLSSFVFNHVEKYPCSLRTTPARSLIHLKDVVIGSLMKTLCMPKTSRYVGNHRSTGFKKM

SEQ ID NO: 187176 - protein, 56 aa, Zea Mays
MLSNTSYGNFLHFLLNDMTTRQRTDSIMLNDLSDLIFKNRHPNSFVYKETNVRHVI

SEQ ID NO: 187177 - protein, 355 aa, Zea Mays
MSAMAAAGEAEYGECVQKGSLQQHQAPQPSPGALFYTHDGVAVYRNPVMPAFYQQPAGSNVVVPAAPGPAHSPASSEPFKRKRGRPRKYAPADGAVPLAIVPPSQPPTARAPATSEASPTVPPGFSPSPQSGGVVSRQASPAPAPASGAPDVKKRGRPSGPSSKKQQPQAAAPGWTGLKPHIFTVQAGEDVASRAMSFSGNGWAVCILTANGTVSNVTLRQGESSGGTVTYEGRFEILSLAGSYLLSESTGMSSRTGGLSVSLASPDGHVLGGAVAGPLTAASPVQVVIGSFLADTKMELDPGSAPEKHVFSRFQTTSSPSRGTESSGGHASPPNTTGSFSTSTQPGFPSFPTWK

SEQ ID NO: 187178 - protein, 224 aa, Zea Mays
MLIELMAGENNIISRVFGNTRRLQPGKPVTKAQAAAALTSGRMKEAVHEELNKLEAENQAHLSLIAEIMEELISRGDIQQQWEQKMKKEQERALEVDNNLQHVLHEHANERTDREEELADLLKERAALECQNQELINLRSEIDGMYDRLATENEEVMADQQTLENLMSDMTSKHQAVNEAKSYLEAEKEALTMLRTWVEDEAGRVHERAETLEKALRRWRIPED

SEQ ID NO: 187179 - protein, 288 aa, Zea Mays
MLTSGSPCSKGNTLFLPDSYLSRFDLVNWKVLVEHPRALRIDEKIPSQNVCILDLRACPDVSPSMLIELMAGENNIISRVFGNTRRLQPGKPVTKAQAAAALTSGRMKEAVHEELNKLEAENQAHLSLIAEIMEELISRGDIQQQWEQKMKKEQERALEVDNNLQHVLHEHANERTDREEELADLLKERAALECQNQELINLRSEIDGMYDRLATENEEVMADQQTLENLMSDMTSKHQAVNEAKSYLEAEKEALTMLRTWVEDEAGRVHERAETLEKALRRWRIPED

SEQ ID NO: 187180 - protein, 229 aa, Zea Mays
MITRGIQQLIVAPLHYVQDKLSTMESTEIIKEDASERESDEIEVSSATHDKKAEAITDDSRQNYRTAIASHFLFRVHTDPVHEEAFSILKKLQIIEKDVSSSDFCTRREFARWFVKLSSKFERKRMCRIVPNKLTSDTVQCAFDDVNIDDPDFLYIQSLGESGIVSSKLSNSLEMLTSGSPCSKGNTLFLPDSYLSRFDLVNWKVLVEHPRALRIDEKEILDAFNRANL

SEQ ID NO: 187181 - protein, 265 aa, Zea Mays
MGVGPYALRLSPPPRLDAMLFPQLRPHLRRRVSARVAASGTTWSPAANDSEDSFGGWWFPEYEKHMKQGRRRIGFQSAVVVGLGASAAIALAGLAWRFPSSRKRIQQLIVAPLHYVQDKLSTMESTEIIKEDASERESDEIEVSSATHDKKAEAITDDSRQNYRTAIASHFLFRVHTDPVHEEAFSILKKLQIIEKDVSSSDFCTRREFARWFVKLSSKFERKRMCRIVPNKLTSDTVQCAFDDVNIDDPDFLYIQYLLFEKLTL

SEQ ID NO: 187182 - protein, 267 aa, Zea Mays
MGVGPYALRLSPPPRLDAMLFPQLRPHLRRRVSARVAASGTTWSPAANDSEDSFGGWWFPEYEKHMKQGRRRIGFQSAVVVGLGASAAIALAGLAWRFPSSRKRIQQLIVAPLHYVQDKLSTMESTEIIKEDASERESDEIEVSSATHDKKAEAITDDSRQNYRTAIASHFLFRVHTDPVHEEAFSILKKLQIIEKDVSSSDFCTRREFARWFVKLSSKFERKRMCRIVPNKLTSDTVQCAFDDVNIDDPDFLYIQFPDLLFEKLTL

SEQ ID NO: 187183 - protein, 311 aa, Zea Mays
MGVGPYALRLSPPPRLDAMLFPQLRPHLRRRVSARVAASGTTWSPAANDSEDSFGGWWFPEYEKHMKQGRRRIGIQQLIVAPLHYVQDKLSTMESTEIIKEDASERESDEIEVSSATHDKKAEAITDDSRQNYRTAIASHFLFRVHTDPVHEEAFSILKKLQIIEKDVSSSDFCTRREFARWFVKLSSKFERKRMCRIVPNKLTSDTVQCAFDDVNIDDPDFLYIQSLGESGIVSSKLSNSLEMLTSGSPCSKGNTLFLPDSYLSRFDLVNWKVLVEHPRALRIDEKSRYRVKMFAFWICELAQMCLHPCS

SEQ ID NO: 187184 - protein, 166 aa, Zea Mays
MFASKKSYVRTFGEGVAGDADHDNTATCRRSYTRHSATALCVGYDATTQVAANSAAQGVAMQGGGTTNRRGRERHESQIRDDVRHDDAEARGPKPRQRESSFSLFYGNGDSGPCVFIEGWFYLCSSFFFRSGLLVLFYVCNPWIFFIVCQQLSTASRPCRSPSICL

SEQ ID NO: 187185 - protein, 93 aa, Zea Mays
MTSAPCQNLLVPKQGNIKTSLCCMKILPRRELRHARPLDQHPNHSCIVRLLSHIHFLFEHITVSRHRLNPSSHHWILIPFEHWGCQHQGFIPI

SEQ ID NO: 187186 - protein, 139 aa, Zea Mays
MLLKILLVIMALNCTMSVLFSARQSMFYLQQASRHQAVRMEMFFGSFLSESVSPQNLFGHPDVERCPFLRNINGATTFSLSSALPVAAQGGKGPIFEEGSGFESAFKLFHGRDGIVPLSERSYVSDENHNESIDVKLYT

SEQ ID NO: 187187 - protein, 101 aa, Zea Mays
MPLKTDFEELFSRELLEMLLFLLYPDCGARRGGASFERADEASEKKQSNPMREMKVQKLVLNIFVGESGDRLTRAAKVLEQLSGQSPVFSKARYTVRSHAM

SEQ ID NO: 187188 - protein, 90 aa, Zea Mays
MEQQQPWNPFVSRPRCARRKKIGQALLPLPGDAKSQPALATATQFAATNICTSRGRYRRSHHGIRSCNVHSSFTLYKLPRLWCPTRWGVV

SEQ ID NO: 187189 - protein, 95 aa, Zea Mays
MALARVSPSSLANLIPPLLQSFFRPFSSDFPIRNSRRRSSPVAAAFSLTSQSAHAAREGLVMEAPRPSSRYPWKPTCLYYTQGKCTMVCASNCNE

SEQ ID NO: 187190 - protein, 64 aa, Zea Mays
MCVSLLYSVSYIEYLLDVYVCVLVVFGLMYRVLVAISGFVYIFRPSALILNTMQFRTCSRLYVA

SEQ ID NO: 187191 - protein, 76 aa, Zea Mays
MAQPTSIATRPHHSIAAPAPPSSALPRVSASPLPRVLHRRSLELVTPPSSAPPIPLPKVSARLLPPPLLPLLLTLG

SEQ ID NO: 187192 - protein, 626 aa, Zea Mays
MAPTKRLEKLKLSTLLTFMRCHGGSSDDHLRIGTVGFSRVVYVNEPDRLEEEGFSYLLNEVSTTKYNLATFLPKSLFEQFRRVANFYFLVSGILALTPLAPYTAVSALAPLCVVIVATMAKEGVEDWRRKQQDHELNNRIVKVHRGNGHFEESKWKNIKVGDVIKVEKDNFFPADMILLSSNYPDGICYVETMNLDGETNLKIKQALKVTLDLHEDIKFREVRQTIKCEDPNANLYSFVGSMEWRGQQYPLSSLQLLLRDSKLRNTDYIYGAVIFTGHDTKVMQNATDPPSKRSKVEKKMDQIIYLLMSSLLMIALLGSVFFGIWTKEDLRDGELKRWYLRPDATTIFYDPKRAALASFFHLLTSLMLYSYFIPISLYISIEMVKILQALFINQDIRMYHEESDKPTHARTSNLNEELGMVDTILSDKTGTLTCNMMEFIKCSIAGTAYGQGVTEVERAMAMRKGARLDDDIENGDHKDKKNDNSPHVKGFNFKDQRIMDGKWVHEPNRVMIRDFFRLLAICHTCIAEIDENEKVSYEAESPDEAAFVIAARELGFEFYKRSLATIIVRERNPSQNVVEKRKYELLNMLEFSSSRSRMSVIVKEPEGRILLLSKGADRLLIALNGT

SEQ ID NO: 187193 - protein, 614 aa, Zea Mays
MLEFSSSRSRMSVIVKEPEGRILLLSKGADSVMFKRLAPIGRKFEEETRSHINQYSDSGLRTFVLAYRVLDEKEYKEFNEKLNAAKASVSADKDEKIEQVADSIERDLILLGATAVEDKLQQGVPECIDKLAQAGIKMWVLTGDKLETAINIGFACSLLRQGMTQIIVTLEQPDIIALEKNGDKPKIAKASKQRVMGQIEDGIKQIPPSTQISTASFALIIDGKSLTYALEDDVKFKFLDLALKCASVICCRSSPKQKALVTRLVKEVTHKVTLAIGDGANDVGMLQEADIGVGISGAEGMQAVMASDVAVAQFRFLERLLLVHGHWCYRRISLMICYFFYKNVTFGVTIFLYEAFASFSGKPAYNDWFLSLYNVFFTSLPVIALGVFDQDVSARLCIQYPQLYQEGVQNILFSWRRILGWMFNGVMNAVLIFFFCITAFEDQAFRRDGQVAGLDALGVVMYTCIVWVVNCQMALSVNYFTIIQHIFIWGSIAVWYLFLLVYGAINPRFSTTAYMVFIEQLAPALSFWLVTLFVVVATLVPYFSYAAIQIRFFPMFHNKIQWKRYLGKAEDPEVARQLSSKHRTSLQHRMVGISARRDGKAVQITKETELQVQE

SEQ ID NO: 187194 - protein, 994 aa, Zea Mays
MAPTKRLEKLKLSTLLTFMRCHGGSSDDHLRIGTVGFSRVVYVNEPDRLEEEGFSYLLNEVSTTKYNLATFLPKSLFEQFRRVANFYFLVSGILALTPLAPYTAVSALAPLCVVIVATMAKEGVEDWRRKQQDHELNNRIVKVHRGNGHFEESKWKNIKVGDVIKVEKDNFFPADMILLSSNYPDGICYVETMNLDGETNLKIKQALKVTLDLHEDIKFREVRQTIKCEDPNANLYSFVGSMEWRGQQYPLSSLQLLLRDSKLRNTDYIYGAVIFTGHDTKVMQNATDPPSKRSKVEKKMDQIIYLLMSSLLMIALLGSVFFGIWTKEDLRDGELKRWYLRPDATTIFYDPKRAALASFFHLLTSLMLYSYFIPISLYISIEMVKILQALFINQDIRMYHEESDKPTHARTSNLNEELGMVDTILSDKTGTLTCNMMEFIKCSIAGTAYGQGVTEVERAMAMRKGARLDDDIENGDHKDKKNDNSPHVKGFNFKDQRIMDGKWVHEPNRVMIRDFFRLLAICHTCIAEIDENEKVSYEAESPDEAAFVIAARELGFEFYKRSLATIIVRERNPSQNVVEKRKYELLNMLEFSSSRSRMSVIVKEPEGRILLLSKGADSVMFKRLAPIGRKFEEETRSHINQYSDSGLRTFVLAYRVLDEKEYKEFNEKLNAAKASVSADKDEKIEQVADSIERDLILLGATAVEDKLQQGVPECIDKLAQAGIKMWVLTGDKLETAINIGFACSLLRQGMTQIIVTLEQPDIIALEKNGDKPKIAKASKQRVMGQIEDGIKQIPPSTQISTASFALIIDGKSLTYALEDDVKFKFLDLALKCASVICCRSSPKQKALVTRLVKEVTHKVTLAIGDGANDVGMLQEADIGVGISGAEGMQAVMASDVAVAQFRFLERLLLVHGHWCYRRISLMICYFFYKNVTFGVTIFLYEAFASFSGKPAYNDWFLSLYNVFFTSLPVIALGVFDQDVSARLCIQKLHNCVFS

SEQ ID NO: 187195 - protein, 443 aa, Zea Mays
MQLHGCLLKMGTEVDTALGTALMTMYGRCGGVDEIPRLACRIRHDALSRTALLGAYARTGYNAEAIGVFKEMIMKNMAIDQSAMTGMLQVCSSFGQLRMVRQVHCYALKTFFKLDTLLLNATITVYGRCGDINSAETVFYLMEENDIISWTALLTCYTQNGLDEEVLLFFRKMLRKGLGSPVFCITSVLRASSSISNLAVGLQIHSRTLKLGIDDDNSVQNALVTLYANCGSVQVALKIFNSMSNRDIVTWNALLTSFSQHGSEVAAIQLFDLMQEEGICPDAYTFVGLLSSCSRMGLVKEGCEYFNEMKEKYNLEPKMVHYTCMVDLLARAGRFCDAMDFIDAMPYEPDQILWEALLASCKVHGNLGLGRIAAKKILEITPHDYSAYIILSSIHASVDMWDEKYWNRTVFDTQRARKDTGRSWIDAQELSENIFDALQIGVT

SEQ ID NO: 187196 - protein, 232 aa, Zea Mays
MAILYALVARGTVVLAEHSAAATNAGAIARQVLERLPDGGADSHVSYTQDRYVFHAKRTDGITALCMADDAAGRRIPFAFLEDIHGRFVKTYGRAALTALAYAMNDEFSRVLSQQMDYYSNDPSADRINRMRGEINQVRSVMIDNIDKVLERGDRLELLVDKTANMQGNTVRFKRQARRFRNTVWWRNVKLTAALILLLLVIIYVVLVFVCHGFTLPTCISSHDAKRIGLRL

SEQ ID NO: 187197 - protein, 406 aa, Zea Mays
MLCQKCNPCFFPRKLCDLLLYFISLRTKDLDTVALLDHLPSLQQLLFRLLACQPQGASSYNVIIQHALSMVALESIKIYTAISDGTINLVDKFFEMQRNDAVRALDVYKRATNQAERLSEFYEVCKTIHIGRGEKFLKIEQPPASFLNTMEEYVRDAPTGQKEKAILAIEYKKEPEEEEKPSSPPAAPEPEPEQVPEPEPEPVKEEAPEAEPDLLGLNEPNPAATAIEEQNALALAIVPIDDAPKAAPTFGNGVTGWELALVTAPSSNETAVAPSKKLAGGLDLLTLDSLYDEANRRASQPASYNPWEATPAAPAPMMTMAPVMHDPFYASNGYAAPHGVQMAAMAQQQQAFMLQQQQMMTMAPAQPVVHHPMQMQQNPANPFGNPFAAAGMPLHAGPGNVYTGLI

SEQ ID NO: 187198 - protein, 429 aa, Zea Mays
MLNMAYFKDDSSAEAWDYSAWVRIYALYLEERLECFRVLKYDVETDPPRTKDLDTVALLDHLPSLQQLLFRLLACQPQGASSYNVIIQHALSMVALESIKIYTAISDGTINLVDKFFEMQRNDAVRALDVYKRATNQAERLSEFYEVCKTIHIGRGEKFLKIEQPPASFLNTMEEYVRDAPTGQKEKAILAIEYKKEPEEEEKPSSPPAAPEPEPEQVPEPEPEPVKEEAPEAEPDLLGLNEPNPAATAIEEQNALALAIVPIDDAPKAAPTFGNGVTGWELALVTAPSSNETAVAPSKKLAGGLDLLTLDSLYDEANRRASQPASYNPWEATPAAPAPMMTMAPVMHDPFYASNGYAAPHGVQMAAMAQQQQAFMLQQQQMMTMAPAQPVVHHPMQMQQNPANPFGNPFAAAGMPLHAGPGNVYTGLI

SEQ ID NO: 187199 - protein, 59 aa, Zea Mays
MLQMCESSWSSSCLPQTSQPWPPSRPGPWHHPSWQERLIKQQNSQVMHTYSKPIKSNSS

SEQ ID NO: 187200 - protein, 477 aa, Zea Mays
MGGAPSQRLGRTSCARHWTGGRRTSATMAPAPGAAPACSTWISPTRSSSTPSEDKVVYGTADLGRPCAPFAKNASEMHGFTQGCLTLRRWDELNAFFQKSGARIVFGINALNGRVPLPDGSMGGPWDYTNAASLIRYTANKGYRIHGWELGNELSGTGVGARVGAEQYGADVIALKTLVDDIYASHPSKPLVLAPGGFFDQAWFAQLIVRTRPNLLDVITHHIYNLGPGRDTHLIDKILNPSVLDGMRSTFSSLQGLLKSAGTSTVAWVGEAGGAYNSGRHLVTDAFVFSFWFLDQLGMSAKYDTKSYCRQSLIGGNYGLLNTTTFQPNPDYYSALLWHRLMGTKVLATTFSGTNKIRAYAHCARDSVSVSVTTQGAVAAHKHGARKHVGGRKFRHVHVPSFDEAAGGVRDEYHLTPKDGNLRSQIMLLNGRALATDTAGNIPALEAVKMDAAQPIAVAPYSIVFARISHFNAPACS

SEQ ID NO: 187201 - protein, 494 aa, Zea Mays
MGGAPSQRLGRTSCARHWTGGRRTSATMAPAPGAAPACSTWISPTRSSSTPSEDKVVYGTADLGRPCAPFAKNASEMHGFTQGCLTLRRWDELNAFFQKSGARIVFGINALNGRVPLPDGSMGGPWDYTNAASLIRYTANKGYRIHGWELGNELSGTGVGARVGAEQYGADVIALKTLVDDIYASHPSKPLVLAPGGFFDQAWFAQLIVRTRPNLLDVITHHIYNLGPGRDTHLIDKILNPSVLDGMRSTFSSLQGLLKSAGTSTVAWVGEAGGAYNSGRHLVTDAFVFSFWFLDQLGMSAKYDTKSYCRQSLIGGNYGLLNTTTFQPNPDYYSALLWHRLMGTKVLATTFSGTNKIRAYAHCARDSPGITLLLINLSGNTTTQVSVSVTTQGAVAAHKHGARKHVGGRKFRHVHVPSFDEAAGGVRDEYHLTPKDGNLRSQIMLLNGRALATDTAGNIPALEAVKMDAAQPIAVAPYSIVFARISHFNAPACS

SEQ ID NO: 187202 - protein, 416 aa, Zea Mays
MAGRESGGMAAALRCAGRIGILATVAVNLAWIATYIRRRYFGGGNRSDNNGGGGEVEPSRGKPPVTSDSIVNLDHGDPTMYEEFWRGTGDSASIFIPGWQTMSYFSDLGGICWFLEPGFEREVRRLHRTGSTQLFQAVLYALSPASDGTPMNVVSPAPYYSSYPSVTNYLNSALYRWAGDANTFDGDTCIELVCSPNNPDGGLRKPVIKSKSSKPVYDFAYYWPQYTPITEAAAHDIMLFTVSKCTGHAGTRLGWALVKDTKVAQKMIKFIELNTIGVSKDSQLRAAKIIGAICNGYEPVPSSGKTSQLFHFAKEKMAARWARLRAAVAASDIFTLPYELSGYCSFSNETVTANPPFAWLRYNKDDIEDLEAFLLEKKIITRGGTRFGVDARAVRVSMVDTDQAFNVFINRLATMK

SEQ ID NO: 187203 - protein, 79 aa, Zea Mays
MELHLEKTLCCRYSLHSLDRNLKTRVLAARCAQKPKTRVLVARCSQKPETRGSMGGGTPFLNLDRNLRESKEEDLPGRT

SEQ ID NO: 187204 - protein, 95 aa, Zea Mays
MLVPPFPRRRIPPRRHRPDAPLGPVPRRNLININHYPRQQVWSYFGSFMSDLCVFLGGFAVEVGVVRRGGAPLPGLRGQPGGADADPKAYGVHWC

SEQ ID NO: 187205 - protein, 161 aa, Zea Mays
MDWERWIHWSRHRWTGRYEAHLWDNSCRKDGQTRKGKQGFAMTECDWLHAPHSISRWLRHRRQDNEGLRSGCSKILGPATHVNFPVENYRDELEEMKGMTRQEFVAHLRRRSSGFSRGASIYRGVTRHHQQGRWQSRIGRVAGNKDLYLDTFSKKDRSIWL

SEQ ID NO: 187206 - protein, 675 aa, Zea Mays
MLQKTAIRDRKLHGIFEAASPGEMYIDSYAWSNDGCLRSAFPAQVRICTKTRYPPLLESQFKTLLGDNYYNHHHFYFELDHAQTRALISLFKSLAPSNFIQVPAVSSKRNLAVPDPKKITANSKEINPFSVLSNTAAPVNWADDVENASNSDEKKSGGSVSDYDNLDDNFLQNQFGPHSNPDEVSQTSSGKIDGQGLELIECNHPLVNTVNGKRIITDESMLLNSHNEHNGAVEVDEVEIEVHNNPGGGVGLQPERQTVLEKLKGLSFLRQQDAITSKDCTHSGSDQRVPDETQINPNLSCGPFDATMEDKTSFDECSHGNAEVLQIITDLQKRTEALEKKLIGSDKEILSLREIFKDSGRKVQQLEYIVDELQFKLDSSLAHLGNMCNTLATPSIFLIGGYNGVTWLSSLDSFSPEKDAVLGLTPMSSPRSYASAAVLDGHIFAFGGGDGMSWYNTVECYSSRNNEWTECPSMNQKKGSLAGICLNEKIYAIGGGDGNEFYSEVEIFDPYLGKWICSPSMLTSRFALAASGLNGVIYTSGGYDGNMYLKSAERYDPREGFWVRLPSMSTRRGSHTLTVLGDTLYAMGGYDGDKMVSSVEIYDPSLNAWRIGDPMNTPRGYAAAVYLDDSLFLIGGMQSSVQMLDTVEVYNASSGWSVLGSSSIGMRSFASAVVL

SEQ ID NO: 187207 - protein, 590 aa, Zea Mays
MQTNNSNYGELTRNIRENQLGGVIFGCKHDTIEECFRKQLFGDRKLHGIFEAASPGEMYIDSYAWSNDGCLRSAFPAQVRICTKTRYPPLLESQFKTLLGDNYYNHHHFYFELDHAQTRALISLFKSLAPSNFIQVPAVSSKRNLAVPDPKKITANSKEINPFSVLSNTAAPVNWADDVENASNSDEKKSGGSVSDYDNLDDNFLQNQFGPHSNPDEVSQTSSGKIDGQGLELIECNHPLVNTVNGKRIITDESMLLNSHNEHNGAVEVDEVEIEVHNNPGGGVGLQPERQTVLEKLKGLSFLRQQDAITSKDCTHSGSDQRVPDETQINPNLSCGPFDATMEDKTSFDECSHGNAEVLQIITDLQKRTEALEKKLIGSDKEILSLREIFKDSGRKVQQLEYIVDELQFKLDSSLAHLGNMCNTLATPSIFLIGGYNGVTWLSSLDSFSPEKDAVLGLTPMSSPRSYASAAVLDGHIFAFGGGDGMSWYNTVECYSSRNNEWTECPSMNQKKGSLAGICLNEKIYAIGGGDGNEFYSEVEIFDPYLGKWICSPSMLTSVCSQPQLHAYTQFAVCSCCVRTKWSHLYIWWL

SEQ ID NO: 187208 - protein, 455 aa, Zea Mays
MLLNSHNEHNGAVEVDEVEIEVHNNPGGGVGLQPERQTVLEKLKGLSFLRQQDAITSKDCTHSGSDQRVPDETQINPNLSCGPFDATMEDKTSFDECSHGNAEVLQIITDLQKRTEALEKKLIGSDKEILSLREIFKDSGRKVQQLEYIVDELQFKLDSSLAHLGNMCNTLATPSIFLIGGYNGVTWLSSLDSFSPEKDAVLGLTPMSSPRSYASAAVLDGHIFAFGGGDGMSWYNTVECYSSRNNEWTECPSMNQKKGSLAGICLNEKIYAIGGGDGNEFYSEVEIFDPYLGKWICSPSMLTSRFALAASGLNGVIYTSGGYDGNMYLKSAERYDPREGFWVRLPSMSTRRGSHTLTVLGDTLYAMGGYDGDKMVSSVEIYDPSLNAWRIGDPMNTPRGYAAAVYLDDSLFLIGGMQSSVQMLDTVEVYNASSGWSVLGSSSIGMRSFASAVVL

SEQ ID NO: 187209 - protein, 699 aa, Zea Mays
MQTNNSNYGELTRNIRENQLGGVIFGCKHDTIEECFRKQLFAASPGEMYIDSYAWSNDGCLRSAFPAQVRICTKTRYPPLLESQFKTLLGDNYYNHHHFYFELDHAQTRALISLFKSLAPSNFIQVPAVSSKRNLAVPDPKKITANSKEINPFSVLSNTAAPVNWADDVENASNSDEKKSGGSVSDYDNLDDNFLQNQFGPHSNPDEVSQTSSGKIDGQGLELIECNHPLVNTVNGKRIITDESMLLNSHNEHNGAVEVDEVEIEVHNNPGGGVGLQPERQTVLEKLKGLSFLRQQDAITSKDCTHSGSDQRVPDETQINPNLSCGPFDATMEDKTSFDECSHGNAEVLQIITDLQKRTEALEKKLIGSDKEILSLREIFKDSGRKVQQLEYIVDELQFKLDSSLAHLGNMCNTLATPSIFLIGGYNGVTWLSSLDSFSPEKDAVLGLTPMSSPRSYASAAVLDGHIFAFGGGDGMSWYNTVECYSSRNNEWTECPSMNQKKGSLAGICLNEKIYAIGGGDGNEFYSEVEIFDPYLGKWICSPSMLTSRFALAASGLNGVIYTSGGYDGNMYLKSAERYDPREGFWVRLPSMSTRRGSHTLTVLGDTLYAMGGYDGDKMVSSVEIYDPSLNAWRIGDPMNTPRGYAAAVYLDDSLFLIGGMQSSVQMLDTVEVYNASSGWSVLGSSSIGMRSFASAVVL

SEQ ID NO: 187210 - protein, 595 aa, Zea Mays
MPLFLFNYSDRKLHGIFEAASPGEMYIDSYAWSNDGCLRSAFPAQVRICTKTRYPPLLESQFKTLLGDNYYNHHHFYFELDHAQTRALISLFKSLAPSNFIQVPAVSSKRNLAVPDPKKITANSKEINPFSVLSNTAAPVNWADDVENASNSDEKKSGGSVSDYDNLDDNFLQNQFGPHSNPDEVSQTSSGKIDGQGLELIECNHPLVNTVNGKRIITDESMLLNSHNEHNGAVEVDEVEIEVHNNPGGGVGLQPERQTVLEKLKGLSFLRQQDAITSKDCTHSGSDQRVPDETQINPNLSCGPFDATMEDKTSFDECSHGNAEVLQIITDLQKRTEALEKKLIGSDKEILSLREIFKDSGRKVQQLEYIVDELQFKLDSSLAHLGNMCNTLATPSIFLIGGYNGVTWLSSLDSFSPEKDAVLGLTPMSSPRSYASAAVLDGHIFAFGGGDGMSWYNTVECYSSRNNEWTECPSMNQKKGSLAGICLNEKIYAIGGGDGNEFYSEVEIFDPYLGKWICSPSMLTSRFALAASGLNGVIYTSGGYDGNMYLKSAERYDPREGFWVRLPSMSTRRGSHTLTVLGDTLQPAGFVDSTR

SEQ ID NO: 187211 - protein, 187 aa, Zea Mays
MVQNGDIILNKVFVPEEDRLTGINSFQDINKVLAMSRIMVAWQPIGISMGVYDICHRYLKERKQFGAPLAAFQLNQEKLVRMLGNIQAMLLVGWRLCKLYESGKMTPGRSSLGKAWTSKKAREVVSLGRELLGGNGILVDFLVAKAFCDVEPIFSYEGTYDINSLVAGREITGIASFKPAVSAKSRL

SEQ ID NO: 187212 - protein, 419 aa, Zea Mays
MGSLGGSAGAGDGGKVGLPALDVTLAFPQATPASLFPPAEKALRKKVRGIMEKEIAPIMTEYWEKAEFPFHAIPSLASLGLAGGTIKGYGCPGLSLTASAISIAEVARVDASCSTFILVHSSLAMSTIALCGSEAQKQKYLPSLTQFKTIGCWALTEPDYGSDASSLRTAATKVPGGWHLDGQKRWIGNSTFADVLIILARNADTNQLNGFIVKKGAPGLKATKIENKIGLRMVQNGDIILNKVFVPEEDRLTGINSFQDINKVLAMSRIMVAWQPIGISMGVYDICHRYLKERKQFGAPLAAFQLNQEKLVRMLGNIQAMLLVGWRLCKLYESGKMTPGRSSLGKAWTSKKAREVVSLGRELLGGNGILVDFLVAKAFCDVEPIFSYEGTYDINSLVAGREITGIASFKPAVSAKSRL

SEQ ID NO: 187213 - protein, 440 aa, Zea Mays
MGSLGGSAGAGDGGKVGLPALDVTLAFPQATPASLFPPAVSDYYQFDDLLTDEEKALRKKVRGIMEKEIAPIMTEYWEKAEFPFHAIPSLASLGLAGGTIKGYGCPGLSLTASAISIAEVARVDASCSTFILVHSSLAMSTIALCGSEAQKQKYLPSLTQFKTIGCWALTEPDYGSDASSLRTAATKVPGGWHLDGQKRWIGNSTFADVLIILARNADTNQLNGFIVKKGAPGLKATKIENKIGLRMVQNGDIILNKVFVPEEDRLTGINSFQDINKVLAMSRIMVAWQPIGISMGVYDICHRWESHCYMYLKERKQFGAPLAAFQLNQEKLVRMLGNIQAMLLVGWRLCKLYESGKMTPGRSSLGKAWTSKKAREVVSLGRELLGGNGILVDFLVAKAFCDVEPIFSYEGTYDINSLVAGREITGIASFKPAVSAKSRL

SEQ ID NO: 187214 - protein, 285 aa, Zea Mays
MFVLCQMTLSRDQELSEKCPSQECATGSKDSEVSANTNKSNEDEEDDWEAIADSGALDDTLVRSLEQGARVSSCSSPEKSSTPSSGPKRRGRGSFLYNKSVLYSDQCGSERELDNKQSKPQVGSKDHVNEPENNAVTAATQFGTRHVLVFYDFPPSTRTTDLERIFEKFGDHGVAIRWINDTSALAVFRTPSAANEAQACIPPRYKVRSLKPDDDLLTKIDGRDLDPPKPRPKTSARTAQRLIAHGMGLKQFTNFGSDELKKQEGERKDRIAARQAMRDEAWGSD

SEQ ID NO: 187215 - protein, 76 aa, Zea Mays
MRRNEEPPPITATLSHAESMYRFTQIALIDEMKTTRREQRPPNPHYCDSAARTPTGRTDPATPPKFHEHPPTTHAG

SEQ ID NO: 187216 - protein, 628 aa, Zea Mays
MNKLLGHCRSSYSSRLLRFSCSATTMGDETSTSVAPQEQESTVAGSVKQQLSGLVLMSLRATVPEVEVEPMVEVSAKFADYQCNNAMGLWSKVKGSGTSFKNPNAIGQAIAKNLPSSDIIESTSVAGPGFVNIVLSNRWVAQRIQDMLVNGIKTWAPILPVKRAVIDFSSPNIAKEMHVGHLRSTIIGDTLARMFEFSNVDVLRRNHVGDWGTQFGMLIEYLFEKFPNWQEIGSQAIGDLQIFYKASKHRFDNDPEFKARAQQGVVRLQGGEERYREAWKKICDISRSEFDLVYKRLNVVLEEKGESFYNPYIPQVLEELSSKGLIKESEGARVIFIQGHQIPLIVVKSDGGFNYASTDLAALWYRLNVEQAEWIIYVTDVGQQQHFDMFFSAAKMAGWLPGPNEKKFPKTSHVGFGLVLGSDGKRFRTRSTEVVRLVELLDEAKSRSKSELLQRLTENGKIVDWTDEELEQTSEAVGYGAVKYADLKNNRLTNYTFSFEQMLSDKGNTAVYLQYAHARICSIIRKSNKDVEDLKMTGAISLDHPDERVLGLYLIRFAEVVEEACTNLLPNVVCEYLYNLSEMFTKFYTNCQVVGSPEETSRLLLCQATAVVMRQCFNLLGITPVYKL

SEQ ID NO: 187217 - protein, 603 aa, Zea Mays
MGDETSTSVAPQEQESTVAGSVKQQLSGLVLMSLRATVPEVEVEPMVEVSAKFADYQCNNAMGLWSKVKGSGTSFKNPNAIGQAIAKNLPSSDIIESTSVAGPGFVNIVLSNRWVAQRIQDMLVNGIKTWAPILPVKRAVIDFSSPNIAKEMHVGHLRSTIIGDTLARMFEFSNVDVLRRNHVGDWGTQFGMLIEYLFEKFPNWQEIGSQAIGDLQIFYKASKHRFDNDPEFKARAQQGVVRLQGGEERYREAWKKICDISRSEFDLVYKRLNVVLEEKGESFYNPYIPQVLEELSSKGLIKESEGARVIFIQGHQIPLIVVKSDGGFNYASTDLAALWYRLNVEQAEWIIYVTDVGQQQHFDMFFSAAKMAGWLPGPNEKKFPKTSHVGFGLVLGSDGKRFRTRSTEVVRLVELLDEAKSRSKSELLQRLTENGKIVDWTDEELEQTSEAVGYGAVKYADLKNNRLTNYTFSFEQMLSDKGNTAVYLQYAHARICSIIRKSNKDVEDLKMTGAISLDHPDERVLGLYLIRFAEVVEEACTNLLPNVVCEYLYNLSEMFTKFYTNCQVVGSPEETSRLLLCQATAVVMRQCFNLLGITPVYKL

SEQ ID NO: 187218 - protein, 92 aa, Zea Mays
MREPGCWSVRAKEGYGRSVRTEKMPTGNFHPEHCDICTCVPPCHCDNVLRRICREPDTGTERKSMPSGRAPLLVQDSFLWPSPICQEDSCYF

SEQ ID NO: 187219 - protein, 529 aa, Zea Mays
MATATAAPVPAGGHPYRRARTRCGPPRLHRLRFPAAAAAASSSLPAPSSMLPPLPDGGGRLVAELVCAFNELTERMGEDLATSSSSSLLFRVLKLALPALRDVEGGRALARALAVAATLADLQMDAEVISAGILREALDAGAVRMRDVKTQIGISTAHLLHDSLRIKHAPSKLDVLDDEGASTLRRFILSYYDIRAVILELGMKLDMMRHLDYLPKYLQQIKSLEVMKIYAPLAHAVGAGNLSLELEDLSFRYLFPHSYDHVDQWLRSQEGDCKAIINLYKEQLLQALQADNELRRIAQDISIQGRYKSRFSTMKKLVKDGRKPEEVKDILGLRVILEPRCGGNSSDWGPRACHRTHEIIQAMWKEIPGRTKDYITHPKRNGYQSLHVAIDVSEPGKVRPLMEVQIRTKEMHRFAVGGEASHSLYKGGLTDPGEAKRLKTIMLAAAELAALRLRDLPGSDHVVGNCKNPAFCQLDKNGDGRISIEELTEVMEDLGAGGEDATELMHLLDANSDGSLSSDEFESFQRQSK

SEQ ID NO: 187220 - protein, 64 aa, Zea Mays
MVHISFVSTILTFLPQLVYCGIRRGSTKRCSIWCGNIGGAPATATGNLGAPRLLGLRERSLPEG

SEQ ID NO: 187221 - protein, 258 aa, Zea Mays
MYEGILVDLPFATFFLSKLKQKYNFLNDLPSLDPELYRHLLFLKHYNGDISELELYFVIVNNEYGEQCEEELLPGGRHMRVTNDNVITFIHLVANHRLNYQIRAQSTHFLRGFQQLIPKDWIDMFNEHEIQVLISGSLESLDIDDLRSNTNYSAGYHPDHELIEMFWEVLKSLSSDNQKKFLKFVTGCSRGPLLGFQYLEPKFCIQRAGVPGLEEHADRLPTSATCMNLLKLPPYKSKEQMQTKLLYAINSEAGFDLS

SEQ ID NO: 187222 - protein, 377 aa, Zea Mays
MPLGMLVCSNVAIVTVALTAQWPWAADIIAVCTSLLDTLPAVTTPTERADDDDEMPMDVNIKINLDVDLERQITAAIDSKLLQHLVNALFRGTLSTNDSDLSGPSDAEVDAVGSICAFLHVTFNTFPLERIMTVLAYRTEIVPALWKFIKRCHASRRWPFFLKFASSLPADSPGWLLPMSVFCPIYKHMLKIIDTGEFYEQEKPLSLKDLKSLVLILKQTPGEALILGGWALWQLLWVIPSSSTQKVSPNPSGLKKLSVENVKTRARVGLSELLTQLQDWNSRLPFTAASDFYSQEATSENFVSQAILGNTRASEIIKLAPFLAPFTSRVKIFTSQLTCSRQSTSHSALTRQRFKIRRSRLLEDAFDQLSLLSEEDL

SEQ ID NO: 187223 - protein, 337 aa, Zea Mays
MPLGMLVCSNVAIVTVALTAQWPWAADIIAVCTSLLDTLPAVTTPTERADDDDEMPMDVNIKINLDVDLERQITAAIDSKLLQHLVNALFRGTLSTNDSDLSGPSDAEVDAVGSICAFLHVTFNTFPLERIMTVLAYRTEIVPALWKFIKRCHASRRWPFFLKFASSLPADSPGWLLPMSVFCPIYKHMLKIIDTGEFYEQEKPLSLKDLKSLVLILKQALWQLLWVIPSSSTQKVSPNPSGLKKLSVENVKTRARVGLSELLTQLQDWNSRLPFTAASDFYSQEATSENFVSQSQLTCSRQSTSHSALTRQRFKIRRSRLLEDAFDQLSLLSEEDL

SEQ ID NO: 187224 - protein, 330 aa, Zea Mays
MPLGMLVCSNVAIVTVALTAQWPWAADIIAVCTSLLDTLPAVTTPTERADDDDEMPMDVNIKINLDVDLERQITAAIDSKLLQHLVNALFRGTLSTNDSDLSGPSDAEVDAFIKRCHASRRWPFFLKFASSLPADSPGWLLPMSVFCPIYKHMLKIIDTGEFYEQEKPLSLKDLKSLVLILKQALWQLLWVIPSSSTQKVSPNPSGLKKLSVENVKTRARVGLSELLTQLQDWNSRLPFTAASDFYSQEATSENFVSQAILGNTRASEIIKLAPFLAPFTSRVKIFTSQLTCSRQSTSHSALTRQRFKIRRSRLLEDAFDQLSLLSEEDL

SEQ ID NO: 187225 - protein, 312 aa, Zea Mays
MPMDVNIKINLDVDLERQITAAIDSKLLQHLVNALFRGTLSTNDSDLSGPSDAEVDAVGSICAFLHVTFNTFPLERIMTVLAYRTEIVPALWKFIKRCHASRRWPFFLKFASSLPADSPGWLLPMSVFCPIYKHMLKIIDTGEFYEQEKPLSLKDLKSLVLILKQALWQLLWVIPSSSTQKVSPNPSGLKKLSVENVKTRARVGLSELLTQLQDWNSRLPFTAASDFYSQEATSENFVSQAILGNTRASEIIKLAPFLAPFTSRVKIFTSQLTCSRQSTSHSALTRQRFKIRRSRLLEDAFDQLSLLSEEDL

SEQ ID NO: 187226 - protein, 445 aa, Zea Mays
MLVASHVGHHPCCCLKVDPRWSFSSQLLSIPFLWHRLPQLKKVFSVNGLNKYYIHQIACLLPSLVDVLPNDISANHPGYACVLANVLEAATWILSDAKLASDSAADIIAVCTSLLDTLPAVTTPTERADDDDEMPMDVNIKINLDVDLERQITAAIDSKLLQHLVNALFRGTLSTNDSDLSGPSDAEVDAVGSICAFLHVTFNTFPLERIMTVLAYRTEIVPALWKFIKRCHASRRWPFFLKFASSLPADSPGWLLPMSVFCPIYKHMLKIIDTGEFYEQEKPLSLKDLKSLVLILKQALWQLLWVIPSSSTQKVSPNPSGLKKLSVENVKTRARVGLSELLTQLQDWNSRLPFTAASDFYSQEATSENFVSQAILGNTRASEIIKLAPFLAPFTSRVKIFTSQLTCSRQSTSHSALTRQRFKIRRSRLLEDAFDQLSLLSEEDL

SEQ ID NO: 187227 - protein, 690 aa, Zea Mays
MFFSGDPSARRRVDLGGRSSKERDRKVLLEQTREERRRRQGLRLQNTSATKIQKFFRGKKALELARSEVRKNFCSTFGEHCERIEWNIFGTNSDFLRQLLFFFNANEDNDIAILCHVCNLLLQYVKQGGDVVTLFTGVNGSSLQPLVAHRVKKFALICVQAVYQKRHDWGSQLLTTPGTTSVPSVSLLETVGCLINPKFLWNCKVVGYLQQRKIYCLFRGIIVSVPQNVRNSGHFDSASVLEQVLMLVASHVGHHPCCCLKVDPRWSFSSQLLSIPFLWHRLPQLKKVFSVNGLNKYYIHQIACLLPSLVDVLPNDISANHPGYACVLANVLEAATWILSDAKLASDSAADIIAVCTSLLDTLPAVTTPTERADDDDEMPMDVNIKINLDVDLERQITAAIDSKLLQHLVNALFRGTLSTNDSDLSGPSDAEVDAVGSICAFLHVTFNTFPLERIMTVLAYRTEIVPALWKFIKRCHASRRWPFFLKFASSLPADSPGWLLPMSVFCPIYKHMLKIIDTGEFYEQEKPLSLKDLKSLVLILKQALWQLLWVIPSSSTQKVSPNPSGLKKLSVENVKTRARVGLSELLTQLQDWNSRLPFTAASDFYSQEATSENFVSQAILGNTRASEIIKLAPFLAPFTSRVKIFTSQLTCSRQSTSHSALTRQRFKIRRSRLLEDAFDQLSLLSEEDL

SEQ ID NO: 187228 - protein, 661 aa, Zea Mays
MFFSGDPSARRRVDLGGRSSKERDRKVLLEQTREERRRRQGLRLQNTSATKIQKFFRGKKALELARSEVRKNFCSTFGEHCERIEWNIFGTNSDFLRQLLFFFNANEDNDIAILCHVCNLLLQYVKQGGDVVTLFTGVNGSSLQPLVAHRVKKFALICVQAVYQKRHDWGSQLLTTPGTTSVPSVSLLETVGCLINPKFLWNCKVVGYLQQRKIYCLFRGIIVSVPQNVRNSGHFDSASVLEQVLMLVASHVGHHPCCCLKVDPRWSFSSQLLSIPFLWHRLPQLKKVFSVNGLNKYYIHQIACLLPSLVDVLPNDISANHPGYACVLANVLEAATWILSDAKLASDSAADIIAVCTSLLDTLPAVTTPTERADDDDEMPMDVNIKINLDVDLERQITAAIDSKLLQHLVNALFRGTLSTNDSDLSGPSDAEVDAVGSICAFLHVTFNTFPLERIMTVLAYRTEIVPALWKFIKRCHASRRWPFFLKFASSLPADSPGWLLPMSVFCPIYKHMLKIIDTGEFYEQEKPLSLKDLKSLVLILKQALWQLLWVIPSSSTQKVSPNPSGLKKLSVENVKTRARVGLSELLTQLQDWNSRLPFTAASDFYSQEATSENFVSQSQLTCSRQSTSHSALTRQRFKIRRSRLLEDAFDQLSLLSEEDL

SEQ ID NO: 187229 - protein, 600 aa, Zea Mays
MFFSGDPSARRRVDLGGRSSKERDRKVLLEQTREERRRRQGLRLQNTSATKIQKFFRGKKALELARSEVRKNFCSTFGEHCERIEWNIFGTNSDFLRQLLFFFNANEDNDIAILCHVCNLLLQYVKQGGDVVTLFTGVNGSSLQPLVAHRVKKFALICVQAVYQKRHDWGSQLLTTPGTTSVPSVSLLETVGCLINPKFLWNCKVVGYLQQRKIYCLFRGIIVSVPVFSVNGLNKYYIHQIACLLPSLVDVLPNDISANHPGYACVLANVLEAATWILSDAKLASDSAADIIAVCTSLLDTLPAVTTPTERADDDDEMPMDVNIKINLDVDLERQITAAIDSKLLQHLVNALFRGTLSTNDSDLSGPSDAEVDAVGSICAFLHVTFNTFPLERIMTVLAYRTEIVPALWKFIKRCHASRRWPFFLKFASSLPADSPGWLLPMSVFCPIYKHMLKIIDTGEFYEQEKPLSLKDLKSLVLILKQALWQLLWVIPSSSTQKVSPNPSGLKKLSVENVKTRARVGLSELLTQLQDWNSRLPFTAASDFYSQEATSENFVSQSQLTCSRQSTSHSALTRQRFKIRRSRLLEDAFDQLSLLSEEDL

SEQ ID NO: 187230 - protein, 390 aa, Zea Mays
MLVASHVGHHPCCCLKVDPRWSFSSQLLSIPFLWHRLPQLKKVFSVNGLNKYYIHQIACLLPSLVDVLPNDISANHPGYACVLANVLEAATWILSDAKLASDSAADIIAVCTSLLDTLPAVTTPTERADDDDEMPMDVNIKINLDVDLERQITAAIDSKLLQHLVNALFRGTLSTNDSDLSGPSDAEVDAVGSICAFLHVTFNTFPLERIMTVLAYRTEIVPALWKFIKRCHASRRWPFFLKFASSLPADSPGWLLPMSVFCPIYKHMLKIIDTGEFYEQEKPLSLKDLKSLVLILKQALWQLLWVIPSSSTQKVSPNPSGLKKLSVENVKTRARVGLSELLTQLQDWNSRLPFTAASDFYSQEATSENFVSQVWMPMLFWINRNVFHLL

SEQ ID NO: 187231 - protein, 414 aa, Zea Mays
MLVASHVGHHPCCCLKVDPRWSFSSQLLSIPFLWHRLPQLKKVFSVNGLNKYYIHQIACLLPSLVDVLPNDISANHPGYACVLANVLEAATWILSDAKLASDSAADIIAVCTSLLDTLPAVTTPTERADDDDEMPMDVNIKINLDVDLERQITAAIDSKLLQHLVNALFRGTLSTNDSDLSGPSDAEVDAVGSICAFLHVTFNTFPLERIMTVLAYRTEIVPALWKFIKRCHASRRWPFFLKFASSLPADSPGWLLPMSVFCPIYKHMLKIIDTGEFYEQEKPLSLKDLKSLVLILKQTPGEALILGGWALWQLLWVIPSSSTQKVSPNPSGLKKLSVENVKTRARVGLSELLTQLQDWNSRLPFTAASDFYSQEATSENFVSQAILGNTRASEIIKLAPFLAPFTSRVKIFTC

SEQ ID NO: 187232 - protein, 648 aa, Zea Mays
MFFSGDPSARRRVDLGGRSSKERDRKVLLEQTREERRRRQGLRLQNTSATKIQKFFRGKKALELARSEVRKNFCSTFGEHCERIEWNIFGTNSDFLRQLLFFFNANEDNDIAILCHVCNLLLQYVKQGGDVVTLFTGVNGSSLQPLVAHRVKKFALICVQAVYQKRHDWGSQLLTTPGTTSVPSVSLLETVGCLINPKFLWNCKVVGYLQQRKIYCLFRGIIVSVPQNVRNSGHFDSASVLEQVLMLVASHVGHHPCCCLKVDPRWSFSSQLLSIPFLWHRLPQLKKVFSVNGLNKYYIHQIACLLPSLVDVLPNDISANHPGYACVLANVLEAATWILSDAKLASDSAADIIAVCTSLLDTLPAVTTPTERADDDDEMPMDVNIKINLDVDLERQITAAIDSKLLQHLVNALFRGTLSTNDSDLSGPSDAEVDAVGSICAFLHVTFNTFPLERIMTVLAYRTEIVPALWKFIKRCHASRRWPFFLKFASSLPADSPGWLLPMSVFCPIYKHMLKIIDTGEFYEQEKPLSLKDLKSLVLILKQALWQLLWVIPSSSTQKVSPNPSGLKKLSVENVKTRARVGLSELLTQLQDWNSRLPFTAASDFYSQEATSENFVSQAILGNTRASEIIKLAPFLAPFTSRVKIFTC

SEQ ID NO: 187233 - protein, 281 aa, Zea Mays
MPMDVNIKINLDVDLERQITAAIDSKLLQHLVNALFRGTLSTNDSDLSGPSDAEVDAVGSICAFLHVTFNTFPLERIMTVLAYRTEIVPALWKFIKRCHASRRWPFFLKFASSLPADSPGWLLPMSVFCPIYKHMLKIIDTGEFYEQEKPLSLKDLKSLVLILKQTPGEALILGGWALWQLLWVIPSSSTQKVSPNPSGLKKLSVENVKTRARVGLSELLTQLQDWNSRLPFTAASDFYSQEATSENFVSQAILGNTRASEIIKLAPFLAPFTSRVKIFTC

SEQ ID NO: 187234 - protein, 192 aa, Zea Mays
MHQAATVFSMLQLLSYAAYSYIRQSVKTFSSFFCLLFFSVMGSWHTSNCNVVNEYVGAMRQLACEILDLLGEGLGLKDPRSFSRLIADTDSDSLLRINHYPPPCAIHKLDHDSQCRMKNSFRIVAGNGANQSAGARIGFGEHSDPQILSLLRSNDVDGLQVLLNSDGREVWVQVPADPSAFFVNVGDLLQVK

SEQ ID NO: 187235 - protein, 733 aa, Zea Mays
MSKDGAALGLVMMAGGDASGSDPEVHANMQRVKVYRLTNDGQWDDQGTGHITIDYIEGSREIALAVVDEVDNDTLLLHHLTSDNIYKRQEQTLISLKDPEKALDLLLSFQEAKGCLHIWQSLTSLQQKLQSGDPGYELKDLPSLELSTLPSLLKTILECGKKDGTRVAKLISRNQHEFFPKLVDLFRMCENSRNMDHLHMIFRLVKGIILLNDAGIFDKIFSDDFILDIIGALEYDPEVPSVQSHREFVKNQTLNEAIHIGNVSVVSKIRQTYIVGYIKDVILLNALDGPTLSSLNSIIERNKPFVVSVLKDDASFIHDLIARITSSNTSAESKSKLVLFLRELCIISKSLEPKVRSHMSRYLIDVGALNIISDVLQSQDKELFSAGANILGYFVDLHPDLVRTFIANHEENLEGSSLLEFLVQGMVVDSANEMLYQSCLKELLGSSDTTVNHHDVVLRLFFDKHLQKLIDAIASSCAPKGIARSTSGLAGVRTTVEQHSAKPETLLKICELLSFCALHHTNRMKIFFSTNAMEKILTLTHRREKVLVLAGVQFVRIIIGRKDDFLVDRVIKFNLLKPVIKAFDENEGRDNMLQSVVLELLEYIRKENIKPLIEYVAESCWGQLVKFERLQSIMAFKLKIEESAETKQSTSVVDMRMKKADERGADKRQEGYFEDSDRVDSSTPTMHSQEQSIPARKPENADGCSKDKEGPPSPSRSTKNSDGSGEGDGSRGS

SEQ ID NO: 187236 - protein, 684 aa, Zea Mays
MFQNNVQRVKVYRLTNDGQWDDQGTGHITIDYIEGSREIALAVVDEVDNDTLLLHHLTSDNIYKRQEQTLISLKDPEKALDLLLSFQEAKGCLHIWQSLTSLQQKLQSGDPGYELKDLPSLELSTLPSLLKTILECGKKDGTRVAKLISRNQHEFFPKLVDLFRMCENSRNMDHLHMIFRLVKGIILLNDAGIFDKIFSDDFILDIIGALEYDPEVPSVQSHREFVKNQTLNEAIHIGNVSVVSKIRQTYIVGYIKVVSVLKDDASFIHDLIARITSSNTSAESKSKLVLFLRELCIISKSLEPKVRSHMSRYLIDVGALNIISDVLQSQDKELFSAGANILGYFVDLHPDLVRTFIANHEENLEGSSLLEFLVQGMVVDSANEMLYQSCLKELLGSSDTTVNHHDVVLRLFFDKHLQKLIDAIASSCAPKGIARSTSGLAGVRTTVEQHSAKPETLLKICELLSFCALHHTNRMKIFFSTNAMEKILTLTHRREKVLVLAGVQFVRIIIGRKDDFLVDRVIKFNLLKPVIKAFDENEGRDNMLQSVVLELLEYIRKENIKPLIEYVAESCWGQLVKFERLQSIMAFKLKIEESAETKQSTSVVDMRMKKADERGADKRQEGYFEDSDRVDSSTPTMHSQEQSIPARKPENADGCSKDKEGPPSPSRSTKNSDGSGEGDGSRGS

SEQ ID NO: 187237 - protein, 520 aa, Zea Mays
MCENSRNMDHLHMIFRLVKGIILLNDAGIFDKIFSDDFILDIIGALEYDPEVPSVQSHREFVKNQTLNEAIHIGNVSVVSKIRQTYIVGYIKVVSVLKDDASFIHDLIARITSSNTSAESKSKLVLFLRELCIISKSLEPKVRSHMSRYLIDVGALNIISDVLQSQDKELFSAGANILGYFVDLHPDLVRTFIANHEENLEGSSLLEFLVQGMVVDSANEMLYQSCLKELLGSSDTTVNHHDVVLRLFFDKHLQKLIDAIASSCAPKGIARSTSGLAGVRTTVEQHSAKPETLLKICELLSFCALHHTNRMKIFFSTNAMEKILTLTHRREKVLVLAGVQFVRIIIGRKDDFLVDRVIKFNLLKPVIKAFDENEGRDNMLQSVVLELLEYIRKENIKPLIEYVAESCWGQLVKFERLQSIMAFKLKIEESAETKQSTSVVDMRMKKADERGADKRQEGYFEDSDRVDSSTPTMHSQEQSIPARKPENADGCSKDKEGPPSPSRSTKNSDGSGEGDGSRGS

SEQ ID NO: 187238 - protein, 505 aa, Zea Mays
MCENSRNMDHLHMIFRLVKGIILLNDAGIFDKIFSDDFILDIIGALEYDPEVPSVQSHREFVKNQTLNEAIHIGNVSVVSKIRQTYIVGYIKVVSVLKDDASFIHDLIARITSSNTSAESKSKLVLFLRELCIISKSLEPKVRSHMSRYLIDVGALNIISDVLQSQDKELFSAGANILGYFVDLHPDLVRTFIANHEENLEGSSLLEFLVQGMVVDSANEMLYQSCLKELLGSSDTTVNHHDVVLRLFFDKHLQKLIDAIASSCAPKGIARSTSGLAGVRTTVEQHSAKPETLLKICELLSFCALHHTNRMKIFFSTNAMEKILTLTHRREKVLVLAGVQFVRIIIGRKDDFLVDRVIKFNLLKPVIKAFDENEGRDNMLQSVVLELLEYIRKENIKPLIEYVAESCWGQLIEESAETKQSTSVVDMRMKKADERGADKRQEGYFEDSDRVDSSTPTMHSQEQSIPARKPENADGCSKDKEGPPSPSRSTKNSDGSGEGDGSRGS

SEQ ID NO: 187239 - protein, 718 aa, Zea Mays
MSKDGAALGLVMMAGGDASGSDPEVHANMQRVKVYRLTNDGQWDDQGTGHITIDYIEGSREIALAVVDEVDNDTLLLHHLTSDNIYKRQEQTLISLKDPEKALDLLLSFQEAKGCLHIWQSLTSLQQKLQSGDPGYELKDLPSLELSTLPSLLKTILECGKKDGTRVAKLISRNQHEFFPKLVDLFRMCENSRNMDHLHMIFRLVKGIILLNDAGIFDKIFSDDFILDIIGALEYDPEVPSVQSHREFVKNQTLNEAIHIGNVSVVSKIRQTYIVGYIKDVILLNALDGPTLSSLNSIIERNKPFVVSVLKDDASFIHDLIARITSSNTSAESKSKLVLFLRELCIISKSLEPKVRSHMSRYLIDVGALNIISDVLQSQDKELFSAGANILGYFVDLHPDLVRTFIANHEENLEGSSLLEFLVQGMVVDSANEMLYQSCLKELLGSSDTTVNHHDVVLRLFFDKHLQKLIDAIASSCAPKGIARSTSGLAGVRTTVEQHSAKPETLLKICELLSFCALHHTNRMKIFFSTNAMEKILTLTHRREKVLVLAGVQFVRIIIGRKDDFLVDRVIKFNLLKPVIKAFDENEGRDNMLQSVVLELLEYIRKENIKPLIEYVAESCWGQLIEESAETKQSTSVVDMRMKKADERGADKRQEGYFEDSDRVDSSTPTMHSQEQSIPARKPENADGCSKDKEGPPSPSRSTKNSDGSGEGDGSRGS

SEQ ID NO: 187240 - protein, 468 aa, Zea Mays
MCENSRNMDHLHMIFRLVKGIILLNDAGIFDKIFSDDFILDIIGALEYDPEVPSVQSHREFVKNQTLNEAIHIGNVSVVSKIRQTYIVGYIKVVSVLKDDASFIHDLIARITSSNTSAESKSKLVLFLRELCIISKSLEPKVRSHMSRYLIDVGALNIISDVLQSQDKELFSAGANILGYFVDLHPDLVRTFIANHEENLEGSSLLEFLVQGMVVDSANEMLYQSCLKELLGSSDTTVNHHDVVLRLFFDKHLQKLIDAIASSCAPKGIARSTSGLAGVRTTVEQHSAKPETLLKICELLSFCALHHTNRMKIFFSTNAMEKILTLTHRREKVLVLAGVQFVRIIIGRKDDFLVDRVIKFNLLKPVIKAFDENEGRDNMLQSVVLELLEYIRKENIKPLIEYVAESCWGQLIEESAETKQSTSVVDMRMKKADERGADKRQEGYFEDSDRVDSSTPTMHSQEQSIPAR

SEQ ID NO: 187241 - protein, 239 aa, Zea Mays
MNIQDIFRNFFGGGGGGMEEEEEQILKGDEVIVELDASLEDLYMGGSVKVWREKNVIKPAPGKRRCNCRNEVYHRQIGPGMYQQMTEQVCDQCPNVKFVREGEFLTVDIEKGMKDAQEVLFFEEGEPKIDGEPGDLKFRIRTAPHDRFRRDGNDLHATVTITLLQALVGFEKTINHLDNHLVEIGTKGITKPKEIRKFKGEGMPLYQSNKKGDLYVTFEVLFPKTLTDEQKGKLKDVLV

SEQ ID NO: 187242 - protein, 344 aa, Zea Mays
MTALGKGGVARFAAALFVLLNLSAAIAGKSYYDVLQVPKGASEDQIKRSYRKLALKYHPDKNPDNEEANKRFAEINNAYEVLTDQEKRKIYDQYGEEGLKQFQGGGGGGGGMNIQDIFRNFFGGGGGGMEEEEEQILKGDEVIVELDASLEDLYMGGSVKVWREKNVIKPAPGKRRCNCRNEVYHRQIGPGMYQQMTEQVCDQCPNVKFVREGEFLTVDIEKGMKDAQEVLFFEEGEPKIDGEPGDLKFRIRTAPHDRFRRDGNDLHATVTITLLQALVGFEKTINHLDNHLVEIGTKEIRKFKGEGMPLYQSNKKGDLYVTFEVLFPKTLTDEQKGKLKDVLV

SEQ ID NO: 187243 - protein, 392 aa, Zea Mays
MLHELLLALLGFTGDFVLDVSLPRRRAASQDAGEDGNGDGEVGPSFRLAPDLTFLQPSERTAIERLISLGFYYRELNRFATESRDLSWIQSSIDVSSPHSDNTQKGKVRKGSVYRRAIANGITEILSVYRSAVLQVEQNLLSDPLPILATVTHGLNKFEVLLPPLYELVMEIQHKDIKGGQLLNLLHKRCHCGVPELQSCIQRLLWHGHQVMFNQLTSWMVYGILQDQYSEFFIRRQDDRDVENESSQRDVSDKLKQKLAKDTSLASWHTGFHVSLDMLPEYIHMRIAESILFAGKAIRVLRNPSPSATLQDPVIRTVGSHGMQSSVGGSGVPKELANFSNIRAEELLPQAEADKIDSMLKELKHSSEFHKRPFESAVGSIRTIAANHLWLH

SEQ ID NO: 187244 - protein, 368 aa, Zea Mays
MLHELLLALLGFTGDFVLDVSLPRRRAASQDAGEDGNGDGEVGPSFRLAPDLTFLQPSERTAIERLISLGFYYRELNRFATESRDLSWIQSSIDVSSPHSDNTQKGKVRKGSVYRRAIANGITEILSVYRSAVLQVEQNLLSDPLPILATVTHGLNKFEVLLPPLYELVMEIQHKDIKGGQLLNLLHKRCHCGVPELQSCIQRQDDRDVENESSQRDVSDKLKQKLAKDTSLASWHTGFHVSLDMLPEYIHMRIAESILFAGKAIRVLRNPSPSATLQDPVIRTVGSHGMQSSVGGSGVPKELANFSNIRAEELLPQAEADKIDSMLKELKHSSEFHKRPFESAVGSIRTIAANHLWQWWYVLISTVI

SEQ ID NO: 187245 - protein, 536 aa, Zea Mays
MFNQLTSWMVYGILQDQYSEFFIRRQDDRDVENESSQRDVSDKLKQKLAKDTSLASWHTGFHVSLDMLPEYIHMRIAESILFAGKAIRVLRNPSPSATLQDPVIRTVGSHGMQSSVGGSGVPKELANFSNIRAEELLPQAEADKIDSMLKELKHSSEFHKRPFESAVGSIRTIAANHLWQLVVVRADLNGHLKALKDYFLLAKGDFFQCFLEESRQLMRLPPRQSTAEADLMIPFQLAALKTIGEEDKYFTRVSLRMLSYGMKSSTSQKDLQKPNASELPSQGKAASELTLDGWDSIALEYSIDWPLQLFFTPDVLSKYRKVFQYLIRLKRTQMELEKSWAAVMHKDHADFSDYCKDRKNNSATQLRRQRSKPLWRVREHMAFLIRNLQFYIQVDVIESQWNVLQSHVQDSHDFTELVSFHQEYLSALVSQSFLDIGSVSRILDSIMKLCLQFCWSIEQYETRPNISEIDHITEEFNKKSNSLYTILRSSRLAGSQRAPFLRQFLMRLNFNSFFETTARGVMNSGRLRPITAGAQL

SEQ ID NO: 187246 - protein, 733 aa, Zea Mays
MLHELLLALLGFTGDFVLDVSLPRRRAASQDAGEDGNGDGEVGPSFRLAPDLTFLQPSERELNRFATESRDLSWIQSSIDVSSPHSDNTQKGKVRKGSVYRRAIANGITEILSVYRSAVLQVEQNLLSDPLPILATVTHGLNKFEVLLPPLYELVMEIQHKDIKGGQLLNLLHKRCHCGVPELQSCIQRLLWHGHQVMFNQLTSWMVYGILQDQYSEFFIRRQDDRDVENESSQRDVSDKLKQKLAKDTSLASWHTGFHVSLDMLPEYIHMRIAESILFAGKAIRVLRNPSPSATLQDPVIRTVGSHGMQSSVGGSGVPKELANFSNIRAEELLPQAEADKIDSMLKELKHSSEFHKRPFESAVGSIRTIAANHLWQLVVVRADLNGHLKALKDYFLLAKGDFFQCFLEESRQLMRLPPRQSTAEADLMIPFQLAALKTIGEEDKYFTRVSLRMLSYGMKSSTSQKDLQKPNASELPSQGKAASELTLDGWDSIALEYSIDWPLQLFFTPDVLSKYRKVFQYLIRLKRTQMELEKSWAAVMHKDHADFSDYCKDRKNNSATQLRRQRSKPLWRVREHMAFLIRNLQFYIQVDVIESQWNVLQSHVQDSHDFTELVSFHQEYLSALVSQSFLDIGSVSRILDSIMKLCLQFCWSIEQYETRPNISEIDHITEEFNKKSNSLYTILRSSRLAGSQRAPFLRQFLMRLNFNSFFETTARGVMNSGRLRPITAGAQL

SEQ ID NO: 187247 - protein, 319 aa, Zea Mays
MRLPPRQSTAEADLMIPFQLAALKTIGEEDKYFTRVSLRMLSYGMKSSTSQKDLQKPNASELPSQGKAASELTLDGWDSIALEYSIDWPLQLFFTPDVLSKYRKVFQYLIRLKRTQMELEKSWAAVMHKDHADFSDYCKDRKNNSATQLRRQRSKPLWRVREHMAFLIRNLQFYIQVDVIESQWNVLQSHVQDSHDFTELVSFHQEYLSALVSQSFLDIGSVSRILDSIMKLCLQFCWSIEQYETRPNISEIDHITEEFNKKSNSLYTILRSSRLAGSQRAPFLRQFLMRLNFNSFFETTARGVMNSGRLRPITAGAQL

SEQ ID NO: 187248 - protein, 425 aa, Zea Mays
MQSSVGGSGVPKELANFSNIRAEELLPQAEADKIDSMLKELKHSSEFHKRPFESAVGSIRTIAANHLWQLVVVRADLNGHLKALKDYFLLAKGDFFQCFLEESRQLMRLPPRQSTAEADLMIPFQLAALKTIGEEDKYFTRVSLRMLSYGMKSSTSQKDLQKPNASELPSQGKAASELTLDGWDSIALEYSIDWPLQLFFTPDVLSKYRKVFQYLIRLKRTQMELEKSWAAVMHKDHADFSDYCKDRKNNSATQLRRQRSKPLWRVREHMAFLIRNLQFYIQVDVIESQWNVLQSHVQDSHDFTELVSFHQEYLSALVSQSFLDIGSVSRILDSIMKLCLQFCWSIEQYETRPNISEIDHITEEFNKKSNSLYTILRSSRLAGSQRAPFLRQFLMRLNFNSFFETTARGVMNSGRLRPITAGAQL

SEQ ID NO: 187249 - protein, 285 aa, Zea Mays
MLHELLLALLGFTGDFVLDVSLPRRRAASQDAGEDGNGDGEVGPSFRLAPDLTFLQPSERTAIERLISLGFYYRELNRFATESRDLSWIQSSIDVSSPHSDNTQKGKVRKGSVYRRAIANGITEILSVYRSAVLQVEQNLLSDPLPILATVTHGLNKFEVLLPPLYELVMEIQHKDIKGGQLLNLLHKRCHCGVPELQSCIQRLLWHGHQVMFNQLTSWMVYGILQDQYSEFFIRRQDDRDVENESSQRDVSDKLKQKLAKDTSLASWHTGFHVSLSPFSSLAKQ

SEQ ID NO: 187250 - protein, 734 aa, Zea Mays
MLHELLLALLGFTGDFVLDVSLPRRRAASQDAGEDGNGDGEVGPSFRLAPDLTFLQPSERTAIERLISLGFYYRELNRFATESRDLSWIQSSIDVSSPHSDNTQKGKVRKGSVYRRAIANGITEILSVYRSAVLQVEQNLLSDPLPILATVTHGLNKFEVLLPPLYELVMEIQHKDIKGGQLLNLLHKRCHCGVPELQSCIQRLLWHGHQVMFNQLTSWMVYGILQDQYSEFFIRRQDDRDVENESSQRDVSDKLKQKLAKDTSLASWHTGFHVSLDMLPEYIHMRIAESILFAGKAIRVLRNPSPSATLQDPVIRTVGSHGMQSSVGGSGVPKELANFSNIRAEELLPQAEADKIDSMLKELKHSSEFHKRPFESAVGSIRTIAANHLWQALKDYFLLAKGDFFQCFLEESRQLMRLPPRQSTAEADLMIPFQLAALKTIGEEDKYFTRVSLRMLSYGMKSSTSQKDLQKPNASELPSQGKAASELTLDGWDSIALEYSIDWPLQLFFTPDVLSKYRKVFQYLIRLKRTQMELEKSWAAVMHKDHADFSDYCKDRKNNSATQLRRQRSKPLWRVREHMAFLIRNLQFYIQVDVIESQWNVLQSHVQDSHDFTELVSFHQEYLSALVSQSFLDIGSVSRILDSIMKLCLQFCWSIEQYETRPNISEIDHITEEFNKKSNSLYTILRSSRLAGSQRAPFLRQFLMRLNFNSFFETTARGVMNSGRLRPITAGAQL

SEQ ID NO: 187251 - protein, 714 aa, Zea Mays
MLHELLLALLGFTGDFVLDVSLPRRRAASQDAGEDGNGDGEVGPSFRLAPDLTFLQPSERTAIERLISLGFYYRELNRFATESRDLSWIQSSIDVSSPHSDNTQKGKVRKGSVYRRAIANGITEILSVYRSAVLQVEQNLLSDPLPILATVTHGLNKFEVLLPPLYELVMEIQHKDIKGGQLLNLLHKRCHCGVPELQSCIQRQDDRDVENESSQRDVSDKLKQKLAKDTSLASWHTGFHVSLDMLPEYIHMRIAESILFAGKAIRVLRNPSPSATLQDPVIRTVGSHGMQSSVGGSGVPKELANFSNIRAEELLPQAEADKIDSMLKELKHSSEFHKRPFESAVGSIRTIAANHLWQLVVVRADLNGHLKALKDYFLLAKGDFFQCFLEESRQLMRLPPRQSTAEADLMIPFQLAALKTIGEEDKYFTRVSLRMLSYGMKSSTSQKDLQKPNASELPSQGKAASELTLDGWDSIALEYSIDWPLQLFFTPDVLSKYRKVFQYLIRLKRTQMELEKSWAAVMHKDHADFSDYCKDRKNNSATQLRRQRSKPLWRVREHMAFLIRNLQFYIQVDVIESQWNVLQSHVQDSHDFTELVSFHQEYLSALVSQSFLDIGSVSRILDSIMKLCLQFCWSIEQYETRPNISEIDHITEEFNKKSNSLYTILRSSRLAGSQRAPFLRQFLMRLNFNSFFETTARGVMNSGRLRPITAGAQL

SEQ ID NO: 187252 - protein, 401 aa, Zea Mays
MLHELLLALLGFTGDFVLDVSLPRRRAASQDAGEDGNGDGEVGPSFRLAPDLTFLQPSERTAIERLISLGFYYRELNRFATESRDLSWIQSSIDVSSPHSDNTQKGKVRKGSVYRRAIANGITEILSVYRSAVLQVEQNLLSDPLPILATVTHGLNKFEVLLPPLYELVMEIQHKDIKGGQLLNLLHKRCHCGVPELQSCIQRLLWHGHQVMFNQLTSWMVYGILQDQYSEFFIRRQDDRDVENESSQRDVSDKLKQKLAKDTSLASWHTGFHVSLDMLPEYIHMRIAESILFAGKAIRVLRNPSPSATLQDPVIRTVGSHGMQSSVGGSGVPKELANFSNIRAEELLPQAEADKIDSMLKELKHSSEFHKRPFESAVGSIRTIAANHLWQWWYVLISTVI

SEQ ID NO: 187253 - protein, 358 aa, Zea Mays
MQCPNCRKIEKGNWLYANGSRSAHDVSMDEWAHDEDLYDVSYSDMPFRFHWCPFGRLTQLPSLFEEGESSPPVTFHDFMGQHVFTEQVAVSAAAGTTNPCPYVAYLHPLTPLTSLSSSHVPDRTMDRPAYHDHWNPMAGPSDVRSMQTMQPADFHHSHWAHVPHSYGQPNSNNEQPGIPFGARAVRVDGDSQRRASVVSPSYFSNGSGSRSRPPNVPPLMPQFMRAHGSISEQYQQNSSSSLFAGAHRSGGMRPAPTPLPENPTFTLFPPGSSGHSSMETDDAGGSRFYAWEGDRFAPYPLMPVDCETSWRTSQQQSHQSTSEPTSAPRRLFGQWLAVGRPSPSPEGSSYRQLHSPRM

SEQ ID NO: 187254 - protein, 76 aa, Zea Mays
MGQGKLEPGYSIHEKTIAHWAWRDGESGTYPPGNGSPKRGGVLSGGADLFMQWRIRGNSRHQGLRETYVVWLEILS

SEQ ID NO: 187255 - protein, 88 aa, Zea Mays
MSLSDPENIHHSKRSPKILKLILFCLICLHLYQTQILEHQIFLYSFVSEQRKVFYNLILAIAWDFFSANNASAHILILSHCHHSYPLV

SEQ ID NO: 187256 - protein, 112 aa, Zea Mays
MARAPAASSGSTLELKCIEVPQAWLAHSSHETFGRGARQLLTWHDRGRLRANRPQRLEVPRTSIHRFGRIGRLVLRIATSRDDIEVVAVNDPFIDAKYMVKTITYPLQSNYM

SEQ ID NO: 187257 - protein, 128 aa, Zea Mays
MARAPAASSGSTLELKCIEVPQAWLAHSSHETFGRGARQLLTWHDRGRLRANRPQRLEVPRTSIHRFGRIGRLVLRIATSRDDIEVVAVNDPFIDAKYMAYMFKYDSTHGPFKGSIRVVDDSTLEING

SEQ ID NO: 187258 - protein, 74 aa, Zea Mays
MYLCQFMEQNGGKLPDRLEGSKMTTKRFGGQKFLQGLQLAIESGNCGKDTIDMLLKDADSSDKINRTSSIKSAS

SEQ ID NO: 187259 - protein, 226 aa, Zea Mays
MEIRQLANSQPITVLNGGSGQSGVSGLIVPAATVGALGYGYMWWKGISFSDLMYVTKRNMANAVSSMTKHLEQVQSSLAAAKRHLTQRIEKLDDKLDQQKALSGQIRDDVTDARLKLENIGSEIKNIKELVWGLDGKIDSMEAKQDFSCAGVMYLCQFMEQNGGKLPDRLEGSKMTTKRFGGQKFLQGLQLAIESGNCGKDTIDMLLKDADSSDKINRTSSIKSAS

SEQ ID NO: 187260 - protein, 446 aa, Zea Mays
MDLSFHVPTSNTQFIGDEHRTSAQAISVEIDGGGSSEMAVVTFDGIAILTPRGRYSVELHQSFLRLQGQANDFKIQYSSILRLFVLPKFETEAVVERELTLSGEILAEKYKDRLESSYRGLIHEVFSKVLRGLSSAKVTRPSTFRSCLDGYAVKSSLKAEDGLLYPLEKGFFFLPKPPTLIPHEEIEYVEFERHGAGGASISSHYFDLLVKLTNDQELLFRNIQRNEYHNLFNFISGKHLKILNLGDGQGRTSGVTAVLQSTDDDSVDPHLERIKNQAGNEESDEEDEDFVADKDDSGSPTDDSDAEGSDASMSGGEKEVTNFFQKPSKKEASSSKPPVKKKQKSGPDEGSQKKKPKKKKDPNAPKRAIAPFMYFSKAERANIKSSNPELATTEIAKKLGERWQKMTAEERQPYVEQSQVDKQRYAEESAAYRGAAAQQGSGAGSE

SEQ ID NO: 187261 - protein, 444 aa, Zea Mays
MDLSFHVPTSNTQFIGDEHRTSAQMLWQAISVEIDGGGSSEMAVVTFDGIAILTPRGRYSVELHQSFLRLQGQANDFKIQYSSILRLFVLPKFETEAVVERELTLSGEILAEKYKDRLESSYRGLIHEVFSKVLRGLSSAKVTRPSTFRSCLDGYAVKSSLKAEDGLLYPLEKGFFFLPKPPTLIPHEEIEYVEFERHGAGGASISSHYFDLLVKLTNDQELLFRNIQRNEYHNLFNFISGKHLKILNLGDGQGRTSGVTAVLQSTDDDSVDPHLERIKNQAGNEESDEEDEDFVADKDDSGSPTDDSDAEGSDASMSGGEKEKPSKKEASSSKPPVKKKQKSGPDEGSQKKKPKKKKDPNAPKRAIAPFMYFSKAERANIKSSNPELATTEIAKKLGERWQKMTAEERQPYVEQSQVDKQRYAEESAAYRGAAAQQGSGAGSE

SEQ ID NO: 187262 - protein, 128 aa, Zea Mays
MSGGEKEKPSKKEASSSKPPVKKKQKSGPDEGSQKKKPKKKKDPNAPKRAIAPFMYFSKAERANIKSSNPELATTEIAKKLGERWQKMTAEERQPYVEQSQVDKQRYAEESAAYRGAAAQQGSGAGSE

SEQ ID NO: 187263 - protein, 511 aa, Zea Mays
MQPALQDLRPAPSGHYSGWLPPRLGPSRPSSARHPDSLMDLSFHVPTSNTQFIGDEHRTSAQMLWQAISVEIDGGGSSEMAVVTFDGIAILTPRGRYSVELHQSFLRLQGQANDFKIQYSSILRLFVLPKSHNPHTFVVITLDPPIRKGQTLYPHIVIQFETEAVVERELTLSGEILAEKYKDRLESSYRGLIHEVFSKVLRGLSSAKVTRPSTFRSCLDGYAVKSSLKAEDGLLYPLEKGFFFLPKPPTLIPHEEIEYVEFERHGAGGASISSHYFDLLVKLTNDQELLFRNIQRNEYHNLFNFISGKHLKILNLGDGQGRTSGVTAVLQSTDDDSVDPHLERIKNQAGNEESDEEDEDFVADKDDSGSPTDDSDAEGSDASMSGGEKEKPSKKEASSSKPPVKKKQKSGPDEGSQKKKPKKKKDPNAPKRAIAPFMYFSKAERANIKSSNPELATTEIAKKLGERWQKMTAEERQPYVEQSQVDKQRYAEESAAYRGAAAQQGSGAGSE

SEQ ID NO: 187264 - protein, 369 aa, Zea Mays
MAMSFFSPTTTPSSSASLLPIRRQCATGPSVSFPLKPHRFRVHLKPPRSSRTRIHTLSTSSLKIPTESILSSVVSTSTTLLFVLVAGLLSLSGVRSLPALACAPAPTQQPQETEEQESKEKKQQEEAGERKEDVLPQLDEEDAEDDEVRMYSAILSRNSGDVDALKCALYAKMRRADWGGALRFARLLRDAEPSELEWRLMVAQLHELKGDLAEAERHFRELLAEEPLLVRALHGLALCMQKKPEGPAVFEMLENALQLATSERRVPEERNIKLLIAQMHVVMLDVASEKLQNLINEDPRDFRSHLCQGIVYALLDRKEDADMQFDVYRSLVPDEFPDKSFISDVILAARTESHDRLQKEFDSEFQAKK

SEQ ID NO: 187265 - protein, 210 aa, Zea Mays
MDNTNMVVVTTRDSGILARFLIKPAAFHPWRDRATTQPTHQRRPNKSPALRARRLATLTFLPCSAAATVASTAMVSAEVGIDYVLWTEDEVSTRVGEVAAELAADLRALPEPAVIVGVATGAFLFLADLVRRVDVRLVVDLVRVESYGAGTESSGKPRITADLKVDVAGKHVVVGILCPISLLIWRRKVHHPYRFALFLTNQQEGKSMFI

SEQ ID NO: 187266 - protein, 237 aa, Zea Mays
MDNTNMVVVTTRDSGILARFLIKPAAFHPWRDRATTQPTHQRRPNKSPALRARRLATLTFLPCSAAATVASTAMVSAEVGIDYVLWTEDEVSTRVGEVAAELAADLRALPEPAVIVGVATGAFLFLADLVRRVDVRLVVDLVRVESYGAGTESSGKPRITADLKVDVAGKHVVVVEDIVDTGNTLSYLIAHLEKKGASSISVCTFLDKPARRKVNVHLVGDGKFYRGFETTLLLAMV

SEQ ID NO: 187267 - protein, 268 aa, Zea Mays
MDVLPVGSERESQTDSHPLLMEHAIGIPRHDVASTSTPHRDNNDGMDQLPRDSESSSGTTDASYSPNAPLARRDDNRLRRQQSLNSGFWISIELAVNLSQIIAAICVLSVSKNEHPHAPLFEWVIGYTIGCIATLPHLYWRYLQRNQLATVQGSNQNYVPDNSFESSSFTGISPPPVSEAGVVTVSNGVLRNNVVITNPRAQAFADHFKMALDCFFAVWFVVGNVWVFGGHSSAHDAPNLYRSGRKQRCYFGCDQRPGHIQVQVKEAS

SEQ ID NO: 187268 - protein, 368 aa, Zea Mays
MDVLPVGSERESQTDSHPLLMEHAIGIPRHDVASTSTPHRDNNDGMDQLPRDSESSSGTTDASYSPNAPLARRDDNRLRRQQSLNSGFWISIELAVNLSQIIAAICVLSVSKNEHPHAPLFEWVIGYTIGCIATLPHLYWRYLQRNQLATVQGSNQNYVPDNSFESSSFTGISPPPVSEAGVVTVSNGVLRNNVVITNPRAQAFADHFKMALDCFFAVWFVVGNVWVFGGHSSAHDAPNLYRGATSDAINALGTYRFRSKKPRNGEANEGGGGVFAPGTDKERAVSAEDAVCCICLARYVDNDDLRLLPCGHFFHKDCVDKWLKINALCPLCKAEIDVVPRTAPPAIGFGRRDSHRRVGNDIESQRLP

SEQ ID NO: 187269 - protein, 319 aa, Zea Mays
MWYEPYLRDDEEFSPGSNGRKTTMGVYVRDLILGQYYFDSLLPRIPLPVTRQITANLEKMKLPTKLSGATGDSSRQGSEDTARRPPSVKASLSVSFGQRAPHRASTRDSSPVRRTVTRDGHRSSYSPSRRSGSREGPDHDRSDRELDHSSRDRERARDRSNRDRYHSSRDLDRDKDARDYHRHERDSRDREYYRSRHSEERRDDRRDHESSRHRRSSSRHRSRSRSRSRSRSRSRRSRSRSTSRRSLNEQRSSPFRDANKEKAATVSSNLAKLKDLYGDITAKKEDSDAEKLHRDSCAEEVIRLGGPRWRVIHHFLSTH

SEQ ID NO: 187270 - protein, 453 aa, Zea Mays
MEIQTSGKPIDVLMEKVLSMNILSSDYFKELYRLKTYHEVIDEIYNTVKHVEPWMTGNCRGPSTAFCLLYKFFTMKLTVKQMHGLLKHPDSPHIRAIGFLYLRYVADPKVLWMWYEPYLRDDEEFSPGSNGRKTTMGVYVRDLILGQYYFDSLLPRIPLPVTRQITANLEKMKLPTKLSGATGDSSRQGSEDTARRPPSVKASLSVSFGQRAPHRASTRDSSPVRRTVTRDGHRSSYSPSRRSGSREGPDHDRSDRELDHSSRDRERARDRSNRDRYHSSRDLDRDKDARDYHRHERDSRDREYYRSRHSEERRDDRRDHESSRHRRSSSRHRSRSRSRSRSRSRSRRSRSRSTSRRSLNEQRSSPFRDANKEKAATVSSNLAKLKDLYGDITAKKEDSDAEKLHRDSCAEEVIRLGGPRWSRPHDSRHFWTSLSLQSARELNRHAVMARLHC

SEQ ID NO: 187271 - protein, 146 aa, Zea Mays
MTELFDTAVTSLLHLPEVLDRLATADGDRRSTGHHAAHDHGHGHVHGLGGGGGAPVDIVESPREYAFVLDVPGLSKSDIQVTLEEDRVLVMKGGSGKRKRDEEEDMNGEGCRYIRLERGAAPRSFVRKFRLPEDFVGSELYDVESK

SEQ ID NO: 187272 - protein, 280 aa, Zea Mays
MPNQRESGRSHKFVDLKSYFSRASSSTNPNPSTHGSGVGQEVNNEEVQYEQDVSGTGSTVNEFHMDHIISDPGIRIPIDQFAPNIRSEVRRAFIEKGPTQPIGHNFPKAHDKRSFQEHWFKQHNWLEYSLVKDSAYCYYCYLFRDDCKDEKFCHDTFTKTGFKQWKNALLIFRKHVGGPSSLHNRARSTFEDFDNQRSSLKHKVITHSKDALVKYETRLETSLGIVSLLALQGEPFRGHDETVTSLNKGNFLETLEWYKIRNEEVRKAFDELCPKNAKMI

SEQ ID NO: 187273 - protein, 123 aa, Zea Mays
MLVKKNNSTAMAAGVLPLASLNHISVDQIFFHDPDAFMIEVCNCDNLPVVPLAAAADQRAPAVLGACKRAAAAVGVKQQQQQSSGGAVPSSAAPAAAAQRVPSAAQAPIVRVAEESTSHISCA

SEQ ID NO: 187274 - protein, 253 aa, Zea Mays
MVGSNGNSSTEVFQSIMKHEGWTGLFRGNFVNVIRVAPSKAIELFAFDTANKFLTPKSGEERKIPVPPSLVAGAFAGVSSTLCTYPLELIKTRLTIQRGVYDNFLDAFVKIVRDEGPTELYRGLTPSLIGVVPYAATNYFAYDTLKKVYKKMFKTNEIGNVPTLLIGSAAGAISSSATFPLEVARKHMQVGAVGGRKVYKNMLHALLSILEDEGVGGLYKGLGPSCMKLMPAAGISFMCYEACKKILIEEEDE

SEQ ID NO: 187275 - protein, 393 aa, Zea Mays
MGSKSGVRLQCAEAKSATDWSCCFLALPPAAPSGVDGDGGFNLSWNLRKSFHPPAGLFASMGQQVGVGFPGTSSRSPSPETPRDPYMKYVSPEVVETPPSGEGVALRDKGKKKAVKLRIKVVNHHLKRLISGALAGTVSRTAVAPLETIRTHLMVGSNGNSSTEVFQSIMKHEGWTGLFRGNFVNVIRVAPSKAIELFAFDTANKFLTPKSGEERKIPVPPSLVAGAFAGVSSTLCTYPLELIKTRLTIQIVRDEGPTELYRGLTPSLIGVVPYAATNYFAYDTLKKVYKKMFKTNEIGNVPTLLIGSAAGAISSSATFPLEVARKHMQVGAVGGRKVYKNMLHALLSILEDEGVGGLYKGLGPSCMKLMPAAGISFMCYEACKKILIEEEDE

SEQ ID NO: 187276 - protein, 1268 aa, Zea Mays
MELRWLEFSRLPLWINPGQLPNLYHLWLMVSDAEERDLEILGGFPVLHSLHLLIVNTEREHVMTCGCGGFKNLKCCSITKPLKFVHGAMPRLEVLDFHFSVQLLTDSNQEFDFDFGLGNLHWLQQAIVQITALGEEVESVGRAQVALRDAIRTHLNRPTLEINLFGQTIPPELPKQDDDGAKIVEISPAESSRQAQEREKRSIDVATKKATRVPSFYTKSSIDEPMDQLINMLSVVDDEAYTKNIKILSIVRSEGLGKTTLAQKAFEELHSQFDRGAFVLLGQNPDLRRVFADILRGLDKQRYIDFPVAILDLVDLIWLVRKSLINKRFFIVFDDICDVKAWEIIKCALIENNNHSVVLTTSRNTGITEIIGGSKQLQPLSATISKNLLCKRLFGSAGKCPSELVNICDNLVEECGGILSVIDETVTLLASIPPTVENWEAVYARRMLDRSYPGLTDSLKNCLLYFTMFRRGHEISGEHLICAWIAEGFVHGQEVAETYLSDLVKKKLIDAVEVDAGGKVLTCRMYDLVHDFIVSKSIEERFVYILNDSEGRDLSEAVHVHQRLYIQGHNNKELDLQIPWLPQVKSLVSCGTAPSILKFKGLHVMDLGACESLQASHLKGINNVSSLRYLVIGGKCISGIPKEIAKLEHLRTLDLSASGLNELPEYVFMIRKLERLIVNSQMKISYGIAKMSALQELGDINVTDPELLKSLCKLTKLRVLRISIWSWDDSLKNYFKQLCDNLRSLVQCTENIQSLSIMTCCSLVFMDDLGENWTPQCLQKLEVGCSAFDILPSWFGSLSSISTLTIEVYKLSQDIIDTLGRLAGLGSLSLTSKQVPKGYFVIGSDRFNKLQSLKFVSNAMVEMFPRQQSNGTEQLKRLMIVFHASRTQDVNKDFCFGLENLSSLEHVRVEIICFDASHNMVKNAEAAVQKAISGTSIANLEIRRLQENSMTQDEADLCDAVQEQNNQKHQKMKSSMESQDGYLTSLPNQESADVVGSDSIVEPLVNEMNSQTIKRDQSTNFSEDEDLMLVSSYLNVSKDSITGRDKKEGTFWERVWEYYNKNRTFESDHSWSSLKHRWLAIQKEVNIFQGYYDAIERKNQSGQTSDDKHAEAEVEFREKQGKAFSVFHVWMILRHEPKWAFRESKIKDQHEANNANTDAPANIYRPQGRKAEKEKARARKHGGSDVDGDPFIEEVKNMREAREETERDRKTHDDKFYELEKSKLELERDRHDKEIMQTDTSTMDEESKQYFKLMKQEILARRFGSSQP

SEQ ID NO: 187277 - protein, 1444 aa, Zea Mays
MEFATGALGALLPKLSMLLHGEYNLEKGVRGDIQRVMSKLERVHAALRHVGEVPVPLEQIIRPGIVNMWARDVGELSYDMEDFVDTFLVRVQGPERTSKRRLFIKMIDMVMNNRHDEIAPDIKHFEKRVQEMDDRRQRYGVGTIVPTVKTLFYPRIIALNYTKATDLVGIDEAREELITRLTKEYDTSTEQRQVSIVGFGGLGKTALAKAVYNKLKAKGEFHCAAFVSMSRYPKLVEIFKELLYELDKTEYKDVISTPMEIDELINLVHEFLNKKSVQLLTDSNQEFDFDFGLGNLHWLQQAIVQITALGEEVESVGRAQVALRDAIRTHLNRPTLEINLFGQTIPPELPKQDDDGAKIVEISPAESSRQAQEREKRSIDVATKKATRVPSFYTKSSIDEPMDQLINMLSVVDDEAYTKNIKILSIVRSEGLGKTTLAQKAFEELHSQFDRGAFVLLGQNPDLRRVFADILRGLDKQRYIDFPVAILDLVDLIWLVRKSLINKRFFIVFDDICDVKAWEIIKCALIENNNHSVVLTTSRNTGITEIIGGSKQLQPLSATISKNLLCKRLFGSAGKCPSELVNICDNLVEECGGILSVIDETVTLLASIPPTVENWEAVYARRMLDRSYPGLTDSLKNCLLYFTMFRRGHEISGEHLICAWIAEGFVHGQEVAETYLSDLVKKKLIDAVEVDAGGKVLTCRMYDLVHDFIVSKSIEERFVYILNDSEGRDLSEAVHVHQRLYIQGHNNKELDLQIPWLPQVKSLVSCGTAPSILKFKGLHVMDLGACESLQASHLKGINNVSSLRYLVIGGKCISGIPKEIAKLEHLRTLDLSASGLNELPEYVFMIRKLERLIVNSQMKISYGIAKMSALQELGDINVTDPELLKSLCKLTKLRVLRISIWSWDDSLKNYFKQLCDNLRSLVQCTENIQSLSIMTCCSLVFMDDLGENWTPQCLQKLEVGCSAFDILPSWFGSLSSISTLTIEVYKLSQDIIDTLGRLAGLGSLSLTSKQVPKGYFVIGSDRFNKLQSLKFVSNAMVEMFPRQQSNGTEQLKRLMIVFHASRTQDVNKDFCFGLENLSSLEHVRVEIICFDASHNMVKNAEAAVQKAISGTSIANLEIRRLQENSMTQDEADLCDAVQEQNNQKHQKMKSSMESQDGYLTSLPNQESADVVGSDSIVEPLVNEMNSQTIKRDQSTNFSEDEDLMLVSSYLNVSKDSITGRDKKEGTFWERVWEYYNKNRTFESDHSWSSLKHRWLAIQKEVNIFQGYYDAIERKNQSGQTSDDKHAEAEVEFREKQGKAFSVFHVWMILRHEPKWAFRESKIKDQHEANNANTDAPANIYRPQGRKAEKEKARARKHGGSDVDGDPFIEEVKNMREAREETERDRKTHDDKFYELEKSKLELERDRHDKEIMQTDTSTMDEESKQYFKLMKQEILARRFGSSQP

SEQ ID NO: 187278 - protein, 1043 aa, Zea Mays
MDQLINMLSVVDDEAYTKNIKILSIVRSEGLGKTTLAQKAFEELHSQFDRGAFVLLGQNPDLRRVFADILRGLDKQRYIDFPVAILDLVDLIWLVRKSLINKRFFIVFDDICDVKAWEIIKCALIENNNHSVVLTTSRNTGITEIIGGSKQLQPLSATISKNLLCKRLFGSAGKCPSELVNICDNLVEECGGILSVIDETVTLLASIPPTVENWEAVYARRMLDRSYPGLTDSLKNCLLYFTMFRRGHEISGEHLICAWIAEGFVHGQEVAETYLSDLVKKKLIDAVEVDAGGKVLTCRMYDLVHDFIVSKSIEERFVYILNDSEGRDLSEAVHVHQRLYIQGHNNKELDLQIPWLPQVKSLVSCGTAPSILKFKGLHVMDLGACESLQASHLKGINNVSSLRYLVIGGKCISGIPKEIAKLEHLRTLDLSASGLNELPEYVFMIRKLERLIVNSQMKISYGIAKMSALQELGDINVTDPELLKSLCKLTKLRVLRISIWSWDDSLKNYFKQLCDNLRSLVQCTENIQSLSIMTCCSLVFMDDLGENWTPQCLQKLEVGCSAFDILPSWFGSLSSISTLTIEVYKLSQDIIDTLGRLAGLGSLSLTSKQVPKGYFVIGSDRFNKLQSLKFVSNAMVEMFPRQQSNGTEQLKRLMIVFHASRTQDVNKDFCFGLENLSSLEHVRVEIICFDASHNMVKNAEAAVQKAISGTSIANLEIRRLQENSMTQDEADLCDAVQEQNNQKHQKMKSSMESQDGYLTSLPNQESADVVGSDSIVEPLVNEMNSQTIKRDQSTNFSEDEDLMLVSSYLNVSKDSITGRDKKEGTFWERVWEYYNKNRTFESDHSWSSLKHRWLAIQKEVNIFQGYYDAIERKNQSGQTSDDKHAEAEVEFREKQGKAFSVFHVWMILRHEPKWAFRESKIKDQHEANNANTDAPANIYRPQGRKAEKEKARARKHGGSDVDGDPFIEEVKNMREAREETERDRKTHDDKFYELEKSKLELERDRHDKEIMQTDTSTMDEESKQYFKLMKQEILARRFGSSQP

SEQ ID NO: 187279 - protein, 1458 aa, Zea Mays
MEFATGALGALLPKLSMLLHGEYNLEKGVRGDIQRVMSKLERVHAALRHVGEVPVPLEQIIRPGIVNMWARDVGELSYDMEDFVDTFLVRVQGPERTSKRRLFIKMIDMVMNNRHDEIAPDIKHFEKRVQEMDDRRQRYGVGTIVPTVKTLFYPRIIALNYTKATDLVGIDEAREELITRLTKEYDTSTEQRQVSIVGFGGLGKTALAKAVYNKLKAKGEFHCAAFVSMSRYPKLVEIFKELLYELDKTEYKDVISTPMEIDELINLVHEFLNKKSVQLLTDSNQEFDFDFGLGNLHWLQQAIVQITALGEEVESVGRAQVALRDAIRTHLNRPTLEINLFGQTIPPELPKQDDDGAKIVEISPAESSRQAQEREKRSIDVATKKATRVPSFYTKSSIDEPMDQLINMLSVVDDEAYTKNIKILSIVRSEGLGKTTLAQKAFEELHSQFDRGAFVLLGQNPDLRRVFADILRGLDKQRYIDFPVAILDLVDLIWLVRKSLINKRFFIVFDDICDVKAWEIIKCALIENNNHSVVLTTSRNTGITEIIGGSKQLQPLSATISKNLLCKRLFGSAGKCPSELVNICDNLVEECGGILSVIDETVTLLASIPPTVENWEAVYARRMLDRSYPGLTDSLKNCLLYFTMFRRGHEISGEHLICAWIAEGFVHGQEVAETYLSDLVKKKLIDAVEVDAGGKVLTCRMYDLVHDFIVSKSIEERFVYILNDSEGRDLSEAVHVHQRLYIQGHNNKELDLQIPWLPQVKSLVSCGTAPSILKFKGLHVMDLGACESLQASHLKGINNVSSLRYLVIGGKCISGIPKEIAKLEHLRTLDLSASGLNELPEYVFMIRKLERLIVNSQMKISYGIAKMSALQELGDINVTDPELLKSLCKLTKLRVLRISIWSWDDSLKNYFKQLCDNLRSLVQCTENIQSLSIMTCCSLVFMDDLGENWTPQCLQKLEVGCSAFDILPSWFGSLSSISTLTIEVYKLSQDIIDTLGRLAGLGSLSLTSKQVPKGYFVIGSDRFNKLQSLKFVSNAMVEMFPRQQSNGTEQLKRLMIVFHASRTQDVNKDFCFGLENLSSLEHVRVEIICFDASHNMVKNAEAAVQKAISGTSIANLEIRRLQENSMTQDEADLCDAVQEQNNQKHQKMKRIYATGDWQLEIAHSSMESQDGYLTSLPNQESADVVGSDSIVEPLVNEMNSQTIKRDQSTNFSEDEDLMLVSSYLNVSKDSITGRDKKEGTFWERVWEYYNKNRTFESDHSWSSLKHRWLAIQKEVNIFQGYYDAIERKNQSGQTSDDKHAEAEVEFREKQGKAFSVFHVWMILRHEPKWAFRESKIKDQHEANNANTDAPANIYRPQGRKAEKEKARARKHGGSDVDGDPFIEEVKNMREAREETERDRKTHDDKFYELEKSKLELERDRHDKEIMQTDTSTMDEESKQYFKLMKQEILARRFGSSQP

SEQ ID NO: 187280 - protein, 1224 aa, Zea Mays
MVGNPGDVRAVVLDPAAGALAGLRRGGVLVDCTSSSPSLAREVAAAAAAAGCHAVDAPVSGGVLRTARAPPRPSPLQSSLQAIVQITALGEEVESVGRAQVALRDAIRTHLNRPTLEINLFGQTIPPELPKQDDDGAKIVEISPAESSRQAQEREKRSIDVATKKATRVPSFYTKSSIDEPMDQLINMLSVVDDEAYTKNIKILSIVRSEGLGKTTLAQKAFEELHSQFDRGAFVLLGQNPDLRRVFADILRGLDKQRYIDFPVAILDLVDLIWLVRKSLINKRFFIVFDDICDVKAWEIIKCALIENNNHSVVLTTSRNTGITEIIGGSKQLQPLSATISKNLLCKRLFGSAGKCPSELVNICDNLVEECGGILSVIDETVTLLASIPPTVENWEAVYARRMLDRSYPGLTDSLKNCLLYFTMFRRGHEISGEHLICAWIAEGFVHGQEVAETYLSDLVKKKLIDAVEVDAGGKVLTCRMYDLVHDFIVSKSIEERFVYILNDSEGRDLSEAVHVHQRLYIQGHNNKELDLQIPWLPQVKSLVSCGTAPSILKFKGLHVMDLGACESLQASHLKGINNVSSLRYLVIGGKCISGIPKEIAKLEHLRTLDLSASGLNELPEYVFMIRKLERLIVNSQMKISYGIAKMSALQELGDINVTDPELLKSLCKLTKLRVLRISIWSWDDSLKNYFKQLCDNLRSLVQCTENIQSLSIMTCCSLVFMDDLGENWTPQCLQKLEVGCSAFDILPSWFGSLSSISTLTIEVYKLSQDIIDTLGRLAGLGSLSLTSKQVPKGYFVIGSDRFNKLQSLKFVSNAMVEMFPRQQSNGTEQLKRLMIVFHASRTQDVNKDFCFGLENLSSLEHVRVEIICFDASHNMVKNAEAAVQKAISGTSIANLEIRRLQENSMTQDEADLCDAVQEQNNQKHQKMKSSMESQDGYLTSLPNQESADVVGSDSIVEPLVNEMNSQTIKRDQSTNFSEDEDLMLVSSYLNVSKDSITGRDKKEGTFWERVWEYYNKNRTFESDHSWSSLKHRWLAIQKEVNIFQGYYDAIERKNQSGQTSDDKHAEAEVEFREKQGKAFSVFHVWMILRHEPKWAFRESKIKDQHEANNANTDAPANIYRPQGRKAEKEKARARKHGGSDVDGDPFIEEVKNMREAREETERDRKTHDDKFYELEKSKLELERDRHDKEIMQTDTSTMDEESKQYFKLMKQEILARRFGSSQP

SEQ ID NO: 187281 - protein, 423 aa, Zea Mays
MQSMSASCSSAVSVSTSRVWAAARRSPSPRSLPSLRHVAFWPSPSSSYPSSSHGCRWPIAGAGAPALPLGIRGGLRRLPSPLLAPDAPSAGAAARTRAAAAAASPAAAGKQEGAAGISQTLQLGTMILVWYLLNIYFNIYNKLVLKAIPFPYTITTFHFASGTFFITLMWLLNLHPKPRLSLKQYAKLLPLALIHMLGNVFTNMSLGKVSVSFTHTIKAMEPFFSVLLSILFLGETPSLPVLGSLVPIVGGVVLASMTEVSFNWIGFWSAMTSNLMNQSRNVYSKKILADKEDSLDDINLFSIITVMAFLLSAPLMLCVEGIKFSPSYLQNAGVNVKELFIRAALAGTSFYFYQQVSYSLLARVSPVTHSVANSLKRVVVIVSSVLFFRTLISPINALGTGVALAGVFLYSQFKKSKPKATAA

SEQ ID NO: 187282 - protein, 294 aa, Zea Mays
MQSMSASCSSAVSVSTSRVWAAARRSPSPRSLPSLRHVAFWPSPSSSYPSSSHGCRWPIAGAGAPALPLGIRGGLRRLPSPLLAPDAPSAGAAARTRAAAAAASPAAAGKQEGAAGISQTLQLGTMILVWYLLNIYFNIYNKLVLKAIPFPYTITTFHFASGTFFITLMWLLNLHPKPRLSLKQYAKLLPLALIHMLGNVFTNMSLGKVSVSFTHTIKAMEPFFSVLLSILFLGETPSLPVLGSLVPIVGGVVLASMTEVSFNWIGFWSAMTSNLMNQSRNVYSKKILADKEFG

SEQ ID NO: 187283 - protein, 67 aa, Zea Mays
MLVCDLCLLNLAILAVSRLSGVLGALGQILLSYLVHMHSRLRSLERGQVHVGLITWEVLRQLVSELN

SEQ ID NO: 187284 - protein, 65 aa, Zea Mays
MSIPFGALGVRRNGRTMKLSSFLIRDPASLVCSPHIVFLIAFWGEEPQDLGDEEKVCAHHLQEVR

SEQ ID NO: 187285 - protein, 60 aa, Zea Mays
MSIPFGALGVRRNGRTMKLSSFLIRDPASLVCSPHIVFLIGTLIDHVIWRTRDGLITRRC

SEQ ID NO: 187286 - protein, 54 aa, Zea Mays
MGLFYENGLVMVSASSVVMNSSFKYSTSVRYMVWVLNNKMRPDVEQERSPVCVA

SEQ ID NO: 187287 - protein, 76 aa, Zea Mays
MTVWQQKMYTKLAGLQYKIVYKKGIENGAADALSRQPRDTIQCTAISQITPEWLQEVVAAYANDPYSQELLTKLSL

SEQ ID NO: 187288 - protein, 75 aa, Zea Mays
MGTANLKNKTQMHIIKADYVTNKVGKDGYSCIIWVLLVQLLLRAERDQRTPVHYPQNPGTALEMFSKGQLSCLIK

SEQ ID NO: 187289 - protein, 56 aa, Zea Mays
MILVSRNVGQQRTKTVRNEIASWPRRQHRHIGSWSLRFLDSWSWSLDNHTALGVLV

SEQ ID NO: 187290 - protein, 243 aa, Zea Mays
MRRDRQILKDVIEDFAGGVGASSEFVMHTLNVNCAKFGRRASRILITGGEDLKVNLWAIGKPGALLSLSGFISPVESVSFDSSEVTIGAGAASGTIKIWNIEEAKVVRTFTGHRSSCASLDFHPFGEFLATGSSNTNMKIWNTRQKRCIHTYKGHTQRINVLKFTHDGRWIVSGGADNSVKVWDLTAGKLMHDFCLHEGPVNCLDVHPYEFLLATGSVDKTVKFWDLGTFELISSSGPEVFFS

SEQ ID NO: 187291 - protein, 366 aa, Zea Mays
MGKAARWFRSFLGKKDQATTKGQRRQQDQALPPPASAKRWSFGKSSRDSAEAAAAATAAAAVVSPDAGNAAIARAAEAAWLRSAACAETDRDREQSKHAIAVAAATAAAADAAVAAAQAAVAVVRLTSKGRPPSPVVLAAVRIQTVFRGFLAKKALRALKALVKLQALVRGYLVRRQAAATLQSMQALVRAQAAVRERRAALHHQPVRPRYSLQERYADDTRSEHGVAAYSSRRLSASVESPSYGYDRSPKIVEVDPGRPKSRSSSRRASAPLLDARSSGSGGGEEWCANNPASSPLPCYLPSGPRRIAVPTSRQFPDYDWCVLEKARPATAQSTPRYLQAHAPATPTKSVAGYSPSLNACPNYMS

SEQ ID NO: 187292 - protein, 298 aa, Zea Mays
MKARTGLKELRILKNVKALEEADRLKQETDRLAKEVEQLQSGRFADVEELVYLKWINACLRYELRNKDAPSGKTVARDLSKTLSPKSELKAKQLIMEYANVGAEDSHLGHVEFGSECSSSRASSGEPDDVSIDIASMTKHTNKNPKKKKFFSKLRKLVLGKGKENREISTLERRVSISSCSFDDFTGRDSHDSYSSFMAEPNMPDSRRHGDHGFGTHSSLDSAKSSPLGTEIVGERSDHSVVKSVSSREEKVNAFGPSIGLDSSKAIPEDVEIHKFADALITSRSGSMSSRRSASFRH

SEQ ID NO: 187293 - protein, 367 aa, Zea Mays
MPKPGDCSSSGVGGPSAGDAKDLPQLFLRVGAAVTLSVAGLLFSRRQRPPRQLLPPPPRPPSESDDACSMKARTGLKELRILKNVKALEEADRLKQETDRLAKEVEQLQSGRFADVEELVYLKWINACLRYELRNKDAPSGKTVARDLSKTLSPKSELKAKQLIMEYANVGAEDSHLGHVEFGSECSSSRASSGEPDDVSIDIASMTKHTNKNPKKKKFFSKLRKLVLGKGKENREISTLERRVSISSCSFDDFTGRDSHDSYSSFMAEPNMPDSRRHGDHGFGTHSSLDSAKSSPLGTEIVGERSDHSVVKSVSSREEKVNAFGPSIGLDSSKAIPEDVEIHKFADALITSRSGSMSSRRSASFRH

SEQ ID NO: 187294 - protein, 307 aa, Zea Mays
MCSPCPPNELPRRAVYISVRGGVAEPPCPYKCVSDRYSMPHCFTALEELIYTFGGPWLFGLLLSGLLVLLALVLSIARMKFVGTDELPGPAPTQQSSQIDHSFPFLESLNEVLETNRAEESHCHVHRMYFMGPNTFSEPWHLPHTPPEQISEIVYEDAFNKFVDEINALAAYQWWEGSVFSILCILSFPLAWSWQQWRRRKKLQKLREFVRSEYDHSCLRSCRSRALYEGLKVVAFVCGFLHYKSSSKKHPSMQPWSFGGEETSWSLFPIGLVLCKCIQARLVDWHVSILEIQDRAVYSNDPTIFWQ

SEQ ID NO: 187295 - protein, 390 aa, Zea Mays
MCSPCPPNELPRRAVYISVRGGVAEPPCPYKCVSDRYSMPHCFTALEELIYTFGGPWLFGLLLSGLLVLLALVLSIARMKFVGTDELPGPAPTQQSSQIDHSFPFLESLNEVLETNRAEESHCHVHRMYFMGPNTFSEPWHLPHTPPEQISEIVYEDAFNKFVDEINALAAYQWWEGSVFSILCILSFPLAWSWQQWRRRKKLQKLREFVRSEYDHSCLRSCRSRALYEGLKVAATPDLMLGYLDFFLGGDEKRTDLPPRLHQRFPMSLIFGGDGSYMAPFSLHSDRVVTTLISQAVPSSIWHRLVAGLNAQLRLVRRGNLNTSLLPVLKWLESHANPELNTYRVRVDLAWFQTTALGYLQFGLVLHAVGGVVAAELQDGCTSKTDQHSV

SEQ ID NO: 187296 - protein, 621 aa, Zea Mays
MLSSGFSGGGGHGGKGGDGIYNGGHVEGGSAYGHADLPCELGSGSGNVSGSSTAGGGIIVMGSLEQSLPNLSLSGSIEANGGNFTGLMSHATIGGPGGGSGGTILLFVRTLLLKKDSVLSSVGGVGGNGSGGGGGGRIHFHWFDIPTGDDYIPFATIKGTILARGGVSEGQGFSGENGTITGKDCPKGLYGTFCKECPSGTYKNITGSSKSMCSPCPPNELPRRAVYISVRGGVAEPPCPYKCVSDRYSMPHCFTALEELIYTFGGPWLFGLLLSGLLVLLALVLSIARMKFVGTDELPGPAPTQQSSQIDHSFPFLESLNEVLETNRAEESHCHVHRMYFMGPNTFSEPWHLPHTPPEQISEIVYEDAFNKFVDEINALAAYQWWEGSVFSILCILSFPLAWSWQQWRRRKKLQKLREFVRSEYDHSCLRSCRSRALYEGLKVAATPDLMLGYLDFFLGGDEKRTDLPPRLHQRFPMSLIFGGDGSYMAPFSLHSDRVVTTLISQAVPSSIWHRLVAGLNAQLRLVRRGNLNTSLLPVLKWLESHANPELNTYRVRVDLAWFQTTALGYLQFGLVLHAVGGVVAAELQDGCTSKTDQHSVIHALTLKWATQGPMMFCVKG

SEQ ID NO: 187297 - protein, 606 aa, Zea Mays
MLSSGFSGGGGHGGKGGDGIYNGGHVEGGSAYGHADLPCELGSGSGNVSGSSTAGGGIIVMGSLEQSLPNLSLSGSIEANGGNFTGLMSHATIGGPGGGSGGTILLFVRTLLLKKDSVLSSVGGVGGNGSGGGGGGRIHFHWFDIPTGDDYIPFATIKGTILARGGVSEGQGFSGENGTITGKDCPKGLYGTFCKECPSGTYKNITGSSKSMCSPCPPNELPRRAVYISVRGGVAEPPCPYKCVSDRYSMPHCFTALEELIYTFGGPWLFGLLLSGLLVLLALVLSIARMKFVGTDELPGPAPTQQSSQIDHSFPFLESLNEVLETNRAEESHCHVHRMYFMGPNTFSEPWHLPHTPPEQISEIVYEDAFNKFVDEINALAAYQWWEGSVFSILCILSFPLAWSWQQWRRRKKLQKLREFVRSEYDHSCLRSCRSRALYEGLKVAATPDLMLGYLDFFLGGDEKRTDLPPRLHQRFPMSLIFGGDGSYMAPFSLHSDRVVTTLISQAVPSSIWHRLVAGLNAQLRLVRRGNLNTSLLPVLKWLESHANPELNTYRVRVDLAWFQTTALGYLQFGLVLHAVGGVVAAELQDGCTSKTDQHSKPEYMH

SEQ ID NO: 187298 - protein, 886 aa, Zea Mays
MEIFHPPEDCNLNSSLPFTLQICRVEDIDVSGLVQGTVVNFNRARSVTVQTSGTISATGLGCRGGIGRGKMLSSGFSGGGGHGGKGGDGIYNGGHVEGGSAYGHADLPCELGSGSGNVSGSSTAGGGIIVMGSLEQSLPNLSLSGSIEANGGNFTGLMSHATIGGPGGGSGGTILLFVRTLLLKKDSVLSSVGGVGGNGSGGGGGGRIHFHWFDIPTGDDYIPFATIKGTILARGGVSEGQGFSGENGTITGKDCPKGLYGTFCKECPSGTYKNITGSSKSMCSPCPPNELPRRAVYISVRGGVAEPPCPYKCVSDRYSMPHCFTALEELIYTFGGPWLFGLLLSGLLVLLALVLSIARMKFVGTDELPGPAPTQQSSQIDHSFPFLESLNEVLETNRAEESHCHVHRMYFMGPNTFSEPWHLPHTPPEQISEIVYEDAFNKFVDEINALAAYQWWEGSVFSILCILSFPLAWSWQQWRRRKKLQKLREFVRSEYDHSCLRSCRSRALYEGLKVAATPDLMLGYLDFFLGGDEKRTDLPPRLHQRFPMSLIFGGDGSYMAPFSLHSDRVVTTLISQAVPSSIWHRLVAGLNAQLRLVRRGNLNTSLLPVLKWLESHANPELNTYRVRVDLAWFQTTALGYLQFGLVLHAVGGVVAAELQDGCTSKTDQHSVNQNTCTDSQMGHSRTNDVLRKRITGTILNVDNLRMLGGRRGFFYLLSLILHNTKPVGHQDLVGLVISILLLADFSLVLLTFLQLYSYSMVDVLLVLFILPLGILAPFPAGINALFSHEQRRSAGLARVYALWNITSLVNVVVAFVCGFLHYKSSSKKHPSMQPWSFGGEETSWSLFPIGLVLCKCIQARLVDWHVSILEIQDRAVYSNDPTIFWQ

SEQ ID NO: 187299 - protein, 1286 aa, Zea Mays
MLPTPWSSTFPSPATGFLLLLALLPVASGTSVPTLGGFDRGEAAGADAYSILTFHDYTPPPPPVLPPPPAAPAATCAGDLHGVGDLDTQCVVHESVRLGGGVFISGNGSLLILDGVAVTCERPGCVVSANLSGDLLLGNRSRVVAGWVSLAAANITLGEDAVIDTTALGGDPPDQTSGVPTGTYGDGGGHGGRGASCFVKKGQAQEDSWGGDSYAWSALKTPNNYGSKGGSTTVEKDYGGGGGGVVWLFAEEIVMNGTVLADGGDGGTKGGGGSGGSIYLKASTMQGGGKISACGGNGLAGGGGGRVSIDVFSRHDDTQIFVHGGKSSGCLDNAGAAGTLYEAVPKSITVSNNNLSTQTDTVFLDPPYEPLWTNVFVRNCAKVSLPLRWSRIQAQGQILLSGATLTFGLTHYPYSEFELLAEELLMSDSTIKVFGALRMSVKMLLMWNSRMTIDGGRELGVGTSLLEGSNLIVLKEASVIHSNANLGIHGQGVLNLSGQGDTIEAQRLILSLFYNILVGPGAVLRGPLINGSRDEMAPKLNCEDESCPMEIFHPPEDCNLNSSLPFTLQICRVEDIDVSGLVQGTVVNFNRARSVTVQTSGTISATGLGCRGGIGRGKMLSSGFSGGGGHGGKGGDGIYNGGHVEGGSAYGHADLPCELGSGSGNVSGSSTAGGGIIVMGSLEQSLPNLSLSGSIEANGGNFTGLMSHATIGGPGGGSGGTILLFVRTLLLKKDSVLSSVGGVGGNGSGGGGGGRIHFHWFDIPTGDDYIPFATIKGTILARGGVSEGQGFSGENGTITGKDCPKGLYGTFCKECPSGTYKNITGSSKSMCSPCPPNELPRRAVYISVRGGVAEPPCPYKCVSDRYSMPHCFTALEELIYTFGGPWLFGLLLSGLLVLLALVLSIARMKFVGTDELPGPAPTQQSSQIDHSFPFLESLNEVLETNRAEESHCHVHRMYFMGPNTFSEPWHLPHTPPEQISEIVYEDAFNKFVDEINALAAYQWWEGSVFSILCILSFPLAWSWQQWRRRKKLQKLREFVRSEYDHSCLRSCRSRALYEGLKVAATPDLMLGYLDFFLGGDEKRTDLPPRLHQRFPMSLIFGGDGSYMAPFSLHSDRVVTTLISQAVPSSIWHRLVAGLNAQLRLVRRGNLNTSLLPVLKWLESHANPELNTYRVRVDLAWFQTTALGYLQFGLVLHAVGGVVAAELQDGCTSKTDQHSVNQNTCTDSQMGHSRTNDVLRKRITGTILNVDNLRMLGGRRGFFYLLSLILHNTKPVGHQVTLPFSQL

SEQ ID NO: 187300 - protein, 1224 aa, Zea Mays
MLPTPWSSTFPSPATGFLLLLALLPVASGTSVPTLGGFDRGEAAGADAYSILTFHDYTPPPPPVLPPPPAAPAATCAGDLHGVGDLDTQCVVHESVRLGGGVFISGNGSLLILDGVAVTCERPGCVVSANLSGDLLLGNRSRVVAGWVSLAAANITLGEDAVIDTTALGGDPPDQTSGVPTGTYGDGGGHGGRGASCFVKKGQAQEDSWGGDSYAWSALKTPNNYGSKGGSTTVEKDYGGGGGGVVWLFAEEIVMNGTVLADGGDGGTKGGGGSGGSIYLKASTMQGGGKISACGGNGLAGGGGGRVSIDVFSRHDDTQIFVHGGKSSGCLDNAGAAGTLYEAVPKSITVSNNNLSTQTDTVFLDPPYEPLWTNVFVRNCAKVSLPLRWSRIQAQGQILLSGATLTFGLTHYPYSEFELLAEELLMSDSTIKVFGALRMSVKMLLMWNSRMTIDGGRELGVGTSLLEGSNLIVLKEASVIHSNANLGIHGQGVLNLSGQGDTIEAQRLILSLFYNILVGPGAVLRGPLINGSRDEMAPKLNCEDESCPMEIFHPPEDCNLNSSLPFTLQICRVEDIDVSGLVQGTVVNFNRARSVTVQTSGTISATGLGCRGGIGRGKMLSSGFSGGGGHGGKGGDGIYNGGHVEGGSAYGHADLPCELGSGSGNVSGSSTAGGGIIVMGSLEQSLPNLSLSGSIEANGGNFTGLMSHATIGGPGGGSGGTILLFVRTLLLKKDSVLSSVGGVGGNGSGGGGGGRIHFHWFDIPTGDDYIPFATIKGTILARGGVSEGQGFSGENGTITGKDCPKGLYGTFCKECPSGTYKNITGSSKSMCSPCPPNELPRRAVYISVRGGVAEPPCPYKCVSDRYSMPHCFTALEELIYTFGGPWLFGLLLSGLLVLLALVLSIARMKFVGTDELPGPAPTQQSSQIDHSFPFLESLNEVLETNRAEESHCHVHRMYFMGPNTFSEPWHLPHTPPEQISEIVYEDAFNKFVDEINALAAYQWWEGSVFSILCILSFPLAWSWQQWRRRKKLQKLREFVRSEYDHSCLRSCRSRALYEGLKVAATPDLMLGYLDFFLGGDEKRTDLPPRLHQRFPMSLIFGGDGSYMAPFSLHSDRVVTTLISQAVPSSIWHRLVAGLNAQLRLVRRGNLNTSLLPVLKWLESHANPELNTYRVRVDLAWFQTTALGYLQFGLVLHAVGGVVAAELQDGCTSKTDQHSKPEYMH

SEQ ID NO: 187301 - protein, 1384 aa, Zea Mays
MLPTPWSSTFPSPATGFLLLLALLPVASGTSVPTLGGFDRGEAAGADAYSILTFHDYTPPPPPVLPPPPAAPAATCAGDLHGVGDLDTQCVVHESVRLGGGVFISGNGSLLILDGVAVTCERPGCVVSANLSGDLLLGNRSRVVAGWVSLAAANITLGEDAVIDTTALGGDPPDQTSGVPTGTYGDGGGHGGRGASCFVKKGQAQEDSWGGDSYAWSALKTPNNYGSKGGSTTVEKDYGGGGGGVVWLFAEEIVMNGTVLADGGDGGTKGGGGSGGSIYLKASTMQGGGKISACGGNGLAGGGGGRVSIDVFSRHDDTQIFVHGGKSSGCLDNAGAAGTLYEAVPKSITVSNNNLSTQTDTVFLDPPYEPLWTNVFVRNCAKVSLPLRWSRIQAQGQILLSGATLTFGLTHYPYSEFELLAEELLMSDSTIKVFGALRMSVKMLLMWNSRMTIDGGRELGVGTSLLEGSNLIVLKEASVIHSNANLGIHGQGVLNLSGQGDTIEAQRLILSLFYNILVGPGAVLRGPLINGSRDEMAPKLNCEDESCPMEIFHPPEDCNLNSSLPFTLQICRVEDIDVSGLVQGTVVNFNRARSVTVQTSGTISATGLGCRGGIGRGKMLSSGFSGGGGHGGKGGDGIYNGGHVEGGSAYGHADLPCELGSGSGNVSGSSTAGGGIIVMGSLEQSLPNLSLSGSIEANGGNFTGLMSHATIGGPGGGSGGTILLFVRTLLLKKDSVLSSVGGVGGNGSGGGGGGRIHFHWFDIPTGDDYIPFATIKGTILARGGVSEGQGFSGENGTITGKDCPKGLYGTFCKECPSGTYKNITGSSKSMCSPCPPNELPRRAVYISVRGGVAEPPCPYKCVSDRYSMPHCFTALEELIYTFGGPWLFGLLLSGLLVLLALVLSIARMKFVGTDELPGPAPTQQSSQIDHSFPFLESLNEVLETNRAEESHCHVHRMYFMGPNTFSEPWHLPHTPPEQISEIVYEDAFNKFVDEINALAAYQWWEGSVFSILCILSFPLAWSWQQWRRRKKLQKLREFVRSEYDHSCLRSCRSRALYEGLKVAATPDLMLGYLDFFLGGDEKRTDLPPRLHQRFPMSLIFGGDGSYMAPFSLHSDRVVTTLISQAVPSSIWHRLVAGLNAQLRLVRRGNLNTSLLPVLKWLESHANPELNTYRVRVDLAWFQTTALGYLQFGLVLHAVGGVVAAELQDGCTSKTDQHSVNQNTCTDSQMGHSRTNDVLRKRITGTILNVDNLRMLGGRRGFFYLLSLILHNTKPVGHQDLVGLVISILLLADFSLVLLTFLQLYSYSMVDVLLVLFILPLGILAPFPAGINALFSHEQRRSAGLARVYALWNITSLVNVVSTPPSLSVPGFCSNKFIRLPSSDS

SEQ ID NO: 187302 - protein, 123 aa, Zea Mays
MPAPLLDAPARFHGRRCPSHLLGGRPRPCNLASLDLLRAPGCCFLHVVRLPGACSRPWLWNSNSHRASSCRALDVLDVMSQQVTLDLCTPVTMSSNPKTPEAVGWRRIKKALAHHTPSARRND

SEQ ID NO: 187303 - protein, 118 aa, Zea Mays
MPAPLLDAPARFHGRRCPSHLLGGRPRPCNLASLDLLRAPGCCFLHVVRLPGACSRPWLWNSNSHRASSCRALDVLDVMSQQVTLDLCTPVTMSSNPIGWRRIKKALAHHTPSARRND

SEQ ID NO: 187304 - protein, 66 aa, Zea Mays
MNCSPEIAEHHRAFLLVDGARRITIVDVQVIEEPGTQQGENSEQKFVEGEEQVALEEDYYEEFDEV

SEQ ID NO: 187305 - protein, 352 aa, Zea Mays
MMLEEDVEVPVSSANEALKDTTKMDTDDAPSDHVSGTDANMHEHRSADTTEAPAENGAQDSEEKSVPMETDAKVEPSKRKIKKTSVPIHELVYGALSATDLQKAVEKEYEMALQDRVMEETKEKKNAVEAYVYDMRNKLYDKYNDFVTPEEKEGLIAKLQEVEDWLYEDGEDETKGVYISKLEELKKIGDPIEARHKEWTERGSSVDQLVYCINSFREAASSSDQKFDHIDISEKQKVINECSEAENWLRERKQQQDALPKHANPVLLVSDLKKKAETLDRFCKPIMTKPKPAPKPQTPPPQPETQASEPQTPEQQQSRSGGTGEPRSEGGVQQASGEQMDMDNPESADAAA

SEQ ID NO: 187306 - protein, 54 aa, Zea Mays
MCWSAPPACHVLASIGAPPILPGCPDAATPSAMPISSKPAVDHDPIPASGSRIT

SEQ ID NO: 187307 - protein, 476 aa, Zea Mays
MGPACKTAARPRVLLLCSPCMGHLIPFAELARRLVADHGLSTTLLFASATSPPSEQYLAVAAAVPDAVDLIALPAPPPDALPPATAARERAELAVASNVPRVREIARELGAAAPLVALVVDMVGAAAARDVAAELGVPFYAFFTSPWMTLSLLLRLPEIDAARAGEHRDAAEPIRLPGCVPIHAHELPTSMLADRSSSAYAGFLSMAKGVAGVDGVLVNTFRELEPAVGGDGRLQLPVYPVGPLVWTRPAGVDTDHECMSWLDGQPRGSVAYVSFGSGGTITWQQTAELALGLELSQCRFIWAIKRPHQSSTIAAFFGTQRGDEHSPLDFLPEGFMERTRGMGLVAQSWAPQTAILGHPSIGCFVTHCGWNSVLESVINGVPMVAWPLYAEQNMNAAMMEVQVGVALRAKVGADRFIRKDEVANAIRRAIVGEEAERLRKRSSELRRQSAQALSKDGCSTRALAQIANAWKCASRK

SEQ ID NO: 187308 - protein, 243 aa, Zea Mays
MLANEGVRSFYKGLSAGLLRQATYTTARLGSFRVLTNKAVEKNEGKPLPLFQKAFIGLTAGAIGACVGSPADLALIRMQADSTLPVAQRRNYKNAFHALYRISGDEGVLALWKGAGPTVVRAMALNMGMLASYDQSVELFRDKFGAGEISTVVGASAVSGFFASACSLPFDYVKTQIQKMQPDANGKYPYTGSLDCAVKTFKSGGPFKFYTGFPVYCVRIAPHVMMTWIFLNQIQKFEKKIGI

SEQ ID NO: 187309 - protein, 225 aa, Zea Mays
MANGGLHEHLYPTRGSCGGISKLDWDTRMRIALEAAKGLEYLHERVNPPVIHRDFKSSNILLDKDFHARVSDFGLAKLGSDRAGGHVSTRVLGTQGYVAPEYALTGHLTTKSDVYSYGVVLLELLTGRVPVDMKRPPGEGVLVNWALPMLTDREKVVRILDPALEGQYSLKDAVQVAAIAAMCVQPEADYRPLMADVVQSLVPLVKNRSNQKACNPNVQSSKPLD

SEQ ID NO: 187310 - protein, 118 aa, Zea Mays
MCELLWSDPQPQLGRGPSKRGVALSFGADVTKKFLQENNLDLIVRSHEVKDEGHEIEHDGKLITVFSAPNYCDQMGNKGAFIRFTAPEMKPDIVTFSAVPHPDVKPMAYANNFLRMFQ

SEQ ID NO: 187311 - protein, 468 aa, Zea Mays
MDATANSDVQRAEEFKLKANDAFKANKFSQAIELYSQAIELNSSNAVYWANRAFAHTKLEEYGSAVQDATKAIEIDSRYSKGYYRRGAAYLAMGKFKEALKDFQQVKKICPNDPDATRKLKECEKAVQKIRFEEAISAGDDERRSVADSIDYHIIEVEPHYAGPRIDGEEITIEFVKAMLDEFKKQKCIHKRYAYQIVLKTLDLLRSMPSLVDVDVPNGGHFTVCGDVHGQYFDLLNIFDLNGLPSEENPYLFNGDFVDRGSFSVEVILTLFAFKCLYPKAMYLARGNHESKSMNKIYGFEGEVRSKLGEKFVELFAEVFCWLPLAHVINNKVFVVHGGLFSVDGVKLSDIRSIDRFCEPPEEGLMCELLWSDPQPQLGRGPSKRGVALSFGADVTKKFLQENNLDLIVRSHEVKDEGHEIEHDGKLITVFSAPNYCDQMGNKGAFIRFTAPEMKPDIVTFSAVQLDI

SEQ ID NO: 187312 - protein, 371 aa, Zea Mays
MDATANSDVQRAEEFKLKANDAFKANKFSQAIELYSQAIELNSSNAVYWANRAFAHTKLEEYGSAVQDATKAIEIDSRYSKGYYRRGAAYLAMGKFKEALKDFQQVKKICPNDPDATRKLKECEKAVQKIRFEEAISAGDDERRSVADSIDYHIIEVEPHYAGPRIDGEEITIEFVKAMLDEFKKQKCIHKRYAYQIVLKTLDLLRSMPSLVDVDVPNGGHFTVCGDVHGQYFDLLNIFDLNGLPSEENPYLFNGDFVDRGSFSVEVILTLFAFKCLYPKAMYLARGNHESKSMNKIYGFEGEVRSKLGEKFVELFAEVFCWLPLAHVINNKVFVVHGGLFSVDGVKLSDIRSIDRFCEPPEEAPMPSRGH

SEQ ID NO: 187313 - protein, 189 aa, Zea Mays
MVVGATTTNHLRSKKCVKGTIERYKKATSDNSSAAGTIAEVTIQHYKQESARLRQQIVNLQNSNRALIGDSITTMSHKELKHLETRLDKALGKIRAKKNDVLCSEVEYMQRREMELQNDNLYLRSRVDENERAQQTANMMGAPSTSEYQQHGFTPYDPIRSFLQFNIVQQPQFYSQQEDRKDFNDQGGR

SEQ ID NO: 187314 - protein, 269 aa, Zea Mays
MCPIRGGGCSWPASVVGSATAALLLAAVIVRLFVPRACSSGIIKGRRQVGAGAAGGARLPAGSLGWPLLGETLAFIRAAYSPRPESFVEKRRVLYGKVFKSHLWGSPAVVSSDPEVSRAVLQADASAFVPWYPRSLMELMGQSSILVLGGGLQRRVHGLAGAFFKSPQLKAQVTLDMQRRVGRAMDMWGRRRHRSMGDDSGGMPVRVQNEAKSIVFEILVRALIGLEEGDKMQYLRQQFQEFIAGLISLPVKLPGTQLYRSLKSRLRRG

SEQ ID NO: 187315 - protein, 316 aa, Zea Mays
MVLAGLRRHVGQFLTSSNELMAASLSAVSCADEVQKAEGAGCRDDAAALRLKKVAMAAILVAGVLGVVLPLAGRKRRALRTDSAAFLAAKAFAAGVILATGFVHMLHDAEHALSSPCLPAAPWRRFPVPGFVAMAAALATLVLDFLATRFYEAKHRDEAARVKAAAAAALVATSSGSDEDITVVTVDEDERKAPLLQTHCHGHGHSHSHSHVHEPVQVEGSEAEVSAHVRSIVVSQILEMGIVSHSVIIGLSLGVSRSPCTIRPLVAALAFHQFFEGFALGTIQEPFSSSNGIFLRHHNTGRNSCWGRHDHILQSQ

SEQ ID NO: 187316 - protein, 505 aa, Zea Mays
MADSEDAPPAVHRRPPRPARGAAAAQGFAAALRRRLRSGAAVAARASFAADSGDESGPGEPSSSRRRDNSGGASSAAGGRAGAGDFSAFTFRAAAPVHRKAKESPLSSDAIFKQSHAGLFNLCIVVLVAVNSRLIIENLMKYGLLIRSGFWFNATSLRDWPLLMCCLSLPIFPLGAFAVEKLAFNNLISDPATTCFHILFTTFEIVYPVLVILKCDSAVLSGFVLMFIACIVWLKLVSFAHTNHDIRKLITSGKKVDNELTAAGIDNLQAPTLGSLTYFMMAPTLCYQPSYPRTPYVRKGWLVRQVILYLIFTGLQGFIIEQYINPIVVNSQHPLMGGLLNAVETVLKLSLPNVYLWLCMFYCLFHLWLNILAEILRFGDREFYKDWWNAKTIDEPVHKWIVRHIYFPCMRNGISKEVAVFISFFVSAVLHELCVAVPCHILKFWAFLGIMLQIPLIILTSYLKNKFSDTMVGNMIFWFFFCIYGQPMCVLLYYHDVMNRTEKAK

SEQ ID NO: 187317 - protein, 497 aa, Zea Mays
MADSEDAPPAVHRRPPRPARGAAAAQGFAAALRRRLRSGAAVAARASFAADSGDESGPGEPSSSRRRDNSGGASSAAGGRAGAGDFSAFTFRAAAPVHRKAKESPLSSDAIFKQSHAGLFNLCIVVLVAVNSRLIIENLMKYGLLIRSGFWFNATSLRDWPLLMCCLSLPIFPLGAFAVEKLAFNNLISDPATTCFHILFTTFEIVYPVLVILKCDSAVLSGFVLMFIACIVWLKLVSFAHTNHDIRKLITSGKKVDNELTAAGIDNLQAPTLGSLTYFMMAPTLCYQPSYPRTPYVRKGWLVRQVILYLIFTGLQGFIIEQYINPIVVNSQHPLMGGLLNAVETVLKLSLPNVYLWLCMFYCLFHLWLNILAEILRFGDREFYKDWWNAKTIDEYWRKWNMPVHKWIVRHIYFPCMRNGISKEVAVFISFFVSAVLHELCVAVPCHILKFWAFLGIMLQIPLIILTSYLKNKFSDTMPMCVLLYYHDVMNRTEKAK

SEQ ID NO: 187318 - protein, 412 aa, Zea Mays
MNRGEFQTSLVQQMIWSGGGGGNTTAAGSSNIMSSGFKQSCHEDQQEASRNLQLLPSLSSPSSLLFSNAQQFPHTTSSGQQLAHTNAGGAAAGSLPSLDDDGGSGQDSHMPESWSQMLLGEFAGERYAATACLLSKGVEDWGDHAAAAASACMVGGGGGVEEEGSAAMPLYSLYGGGSHSHSHLAAAGDHEMPPAPAAAAAGANKSQLSQMLLASSPRSCVTTSLGSNMLDFSNNGVPPAPDQLKSHHHHQSDNSSEVRKERLGDRITALHQIVSPFGKTDTASVLQETIGYIRFLLGQIEALSYPYMGHGNGTSIQNGPTTGERNHAGLLPDQYPGQLLNHNNNTGARQPAAVGQPDEQQQQQGGANNNDETKKDLRSRGLCLVPVSCTSHFGGDNAADYWAPAPLGGILR

SEQ ID NO: 187319 - protein, 267 aa, Zea Mays
MNRGEFQTSLVQQMIWSGGGGGNTTAAGSSNIMSSGFKQSCHEDQQEASRNLQLLPSLSSPSSLLFSNAQQFPHTTSSGQQLAHTNAGGAAAGSLPSLDDDGGSGQDSHMPESWSQMLLGEFAGERYAATACLLSKGVEDWGDHAAAAASACMVGGGGGVEEEGSAAMPLYSLYGGGSHSHSHLAAAGDHEMPPAPAAAAAGANKSQLSQMLLASSPRSCVTTSLGSNMLDFSNNGVPPAPDQLKSHHHHQSDNSSEHRNRFGHQEA

SEQ ID NO: 187320 - protein, 262 aa, Zea Mays
MNRGEFQTSLVQQMIWSGGGGGNTTAAGSSNIMSSGFKQSCHEDQQEASRNLQLLPSLSSPSSLLFSNAQQFPHTTSSGQQLAHTNAGGAAAGSLPSLDDDGGSGQDSHMPESWSQMLLGEFAGERYAATACLLSKGVEDWGDHAAAAASACMVGGGGGVEEEGSAAMPLYSLYGGGSHSHSHLAAAGDHEMPPAPAAAAAGANKSQLSQMLLASSPRSCVTTSLGSNMLDFSNNGVPPAPDQLKSHHHHQSDNSSESVTGS

SEQ ID NO: 187321 - protein, 104 aa, Zea Mays
MTWCLTRYTIAMMGYGPEDKNAVLELTYNYGVKEYDKGNAYAQIAISTDDVYKTAEAIRVNGGQITREPGPLPGITTKITACTDPDGWKTVFVDNIDFLKELEE

SEQ ID NO: 187322 - protein, 173 aa, Zea Mays
MAATSIKVAHLTTLALFSPTPNPFGPKSSKHRARAPPPISISMDPALVDPAHLQALMLACGHSCTLRLSPALSVSAVEPVDLSKLRTALAHSFVVVSVFCGARFFTHDREREGEGQRFLGLEIGLDLQGERRLVGFGRAVSDLGLTASVHDIVVHPLLQRRGIGQKIVNKITR

SEQ ID NO: 187323 - protein, 634 aa, Zea Mays
MLISQIAQMKPLDGSNYHSWREDIDMITTVGEIDYALRFDKPVEPTVGTPNYDHRWMQYSIDKVKWERSNDKCMIILKRSIKEPLKSSIPECETAKEYLERVASHHQGSSKAYACSLMTEFVNAKYDGNGVRPFIQKMISIVAKINKYLGSPLHEEFVVFMIMKSLPKEFETFHIQYNTSVTDKWNIDQLLAQCVQEEERLKQTGDSVNLIKGNIPRQNKNSKKKFKKQGKQNNQASSSNNNQPRQGGSFSVPPDTCLYCKKTGHYKRKCPEFLQYLLESGKDQVTFVNESLYLEYPSYSWWIDSGATVHVANSLQGLRTSQRLPKGRRTIRVANGVEAAVEAIGDIHLKLVNGFVLLLRDVLYVPSLRRNLISVSRLDDQHIHCHFGDRQCVIQFDNKDVGLAIRRDMLYLLSQSDVVNVLDIPENDPASSGRKRKRNDGETSSKLWHYRLGHISRGRIESLVKEQILHPLDFTDLEQCRDCIKGKFAKQIKKDAKHSTRVLEIIHTDICGPFPVRTVDGFNSFITFTDDYSRYGYIYPIKERSEALDKFKQFKAEVENQHDLKIKIVRSDRGGEYYGRHTEYGQVPGPFARFLRENGIVAQYSTPGEPQQNGVAERRKKNANGYGKEYAKFL

SEQ ID NO: 187324 - protein, 211 aa, Zea Mays
MAYLLKSRSKPVQQLLVPASSEEQQRRVNEVRELLGDLPTEMPNFLSDATIRRFLRARNWSTMKATKSLKEATSWRRQYKPEKIRWESIADSENEARRAYIPDYLDKKGRMVFVTLPTIKIMKHFLEPKMDEKVKFVYNDSSESQKILGDMFDLDELEHIFGGRNTADFDINVYAERMKRRDRIRGASTEDNGEATSSRCWTKTTRNSSSV

SEQ ID NO: 187325 - protein, 282 aa, Zea Mays
MANPYPGVILLSYKLTVNEVRELLGDLPTEMPNFLSDATIRRFLRARNWSTMKATKSLKEATSWRRQYKPEKIRWESIADSENEARRAYIPDYLDKKGRMVFVTLPTIKSKSSEKDHLKYLVYNLENLLIDCADAEEDNVVWISDFKGWSISSTPFSLTRQSLHIIQQYYPGLIAVGILTNAPKIFESFWKIMKHFLEPKMDEKVKFVYNDSSESQKILGDMFDLDELEHIFGGRNTADFDINVYAERMKRRDRIRGASTEDNGEATSSRCWTKTTRNSSSV

SEQ ID NO: 187326 - protein, 53 aa, Zea Mays
MYKLVETLKHWLQKMAYHKCKSILVLTTMFNLHRYPICGKRKKVQKELVKQLY

SEQ ID NO: 187327 - protein, 126 aa, Zea Mays
MSLVTHDKCWIADHLARRELDHQAEESNDHLLILCVFGRQVWYILLQKVCLQDLTHQPDDWHSDDWWAKSNERVDGQVQKGLNSIIILAAWAIWNLRNRCVIDGILPSLNGVLEVIREQLYFWYQK

SEQ ID NO: 187328 - protein, 173 aa, Zea Mays
MLATSHYLSFRSSLIIEENANQHWSSIINKLETPTKTVTPVIPQCDGIQDDYNDQFFFPGVPTEDYNTPGESAEYRAPTPAVGTPKPRNDAGDDNDDDDDDEEPPLNEDDDDDDDLDDLEEGEDEPNTQHLVLAQFDKVTRTKNRWKCTLKDGIMHLNGRDVLFNKATGEFDF

SEQ ID NO: 187329 - protein, 194 aa, Zea Mays
MSSGKRKRDEYPGQLPSGSFVPQQDGSADQIVEFVVSKENANQHWSSIINKLETPTKTVTPVIPQCDGIQDDYNDQFFFPGVPTEDYNTPGESAEYRAPTPAVGTPKPRNDAGDDNDDDDDDEEPPLNEDDDDDDDLDDLEEGEDEPNTQHLVLAQFDKVTRTKNRWKCTLKDGIMHLNGRDVLFNKATGEFDF

SEQ ID NO: 187330 - protein, 152 aa, Zea Mays
MNQMIRELPITNPIYLMLGTSFGSSAKGTGLKALEFALSICDSFDMYGFTVDPGYKEWTRYFSEVRKGHTPLHGRAYYQMMECLGLVKIHSPMRGDPGRTVRWLPTKATIEAARVASEKLLKRPGAGSDDPLGTCTMIKKRRKGKAPNRSGL

SEQ ID NO: 187331 - protein, 120 aa, Zea Mays
MKMLSVGECVKNTVKFMKELWSLLLSAQQNASGVPQQFLDEKEAEIHQKKDDRIAQEIQKKPEKEGMDSELEKNKTMDGDVGNSRSYGDPVASALNSTNFNIEEEKDNDFKRTSRPKNRL

SEQ ID NO: 187332 - protein, 127 aa, Zea Mays
MKMLSVGECVKLTGFMEKNTVKFMKELWSLLLSAQQNASGVPQQFLDEKEAEIHQKKDDRIAQEIQKKPEKEGMDSELEKNKTMDGDVGNSRSYGDPVASALNSTNFNIEEEKDNDFKRTSRPKNRL

SEQ ID NO: 187333 - protein, 129 aa, Zea Mays
MKMLSVGECVKIQLTGFMEKNTVKFMKELWSLLLSAQQNASGVPQQFLDEKEAEIHQKKDDRIAQEIQKKPEKEGMDSELEKNKTMDGDVGNSRSYGDPVASALNSTNFNIEEEKDNDFKRTSRPKNRL

SEQ ID NO: 187334 - protein, 327 aa, Zea Mays
MKMLSVGECVKIQLTGFMEKNTVKFMKELWSLLLSAQQNASGVPQQFLDEKEAEIHQKKDDRIAQEIQKKPEKEGMDSELEKNKTMDGDVGNSRSYGDPVASALNSTNFNIEEEKDNDFKRTSRPKNRFVITFLHNLVGFYYNLDACFALDVLTRCPYLGCKDATKMMLVVKEIFTCQIQVELPITNPIYLMLGTSFGSSAKGTGLKALEFALSICDSFDMYGFTVDPGYKEWTRYFSEVRKGHTPLHGRAYYQMMECLGLVKIHSPMRGDPGRTVRWLPTKATIEAARVASEKLLKRPGAGSDDPLGTCTMIKKRRKGKAPNRSGL

SEQ ID NO: 187335 - protein, 67 aa, Zea Mays
MPVVCLNSFWMKRRLRYIRKRHRMTGLRRRSKRSQKRREWTQNWKRTKRWMGMLVTQDPMVIQLPLL

SEQ ID NO: 187336 - protein, 117 aa, Zea Mays
MCKGFMEKNTVKFMKELWSLLLSAQQNASGVPQQFLDEKEAEIHQKKDDRIAQEIQKKPEKEGMDSELEKNKTMDGDVGNSRSYGDPVASALNSTNFNIEEEKDNDFKRTSRPKNRL

SEQ ID NO: 187337 - protein, 427 aa, Zea Mays
MLNSSGGSGSNYSGGEILPPPSPGAALGFSKSTFTYEELMRATDGFSDANLLGQGGFGYVHRGLLPNGKEIAVKQLKLGSGQGEREFQAEVEIISRVHHKHLVSLVGYCISGGKRLLVYEFVPNNTLEFHLHGNDRPTMEWPTRLKIALGAAKGLAYLHEDCHPKIIHRDIKASNILLDFKFEVGLAKFTTDNNTHVSTRVMGTFGYLAPEYAASGKLTEKSDVFSFGVMLLELITGRRPIDTTQTYMDDSLVDWARPLLMRALEDGEYDALVDPRLGKDFNPNEMARMIACAAACVRHSARRRPRMSQVVRALEGDVSLEDLNEGVRPGHSRFFGSYSSSDYDSGQYNEDMQKFRKTAFNNNTYTSSQYSAPTSEYGQVPSGSSSEGRQTQEMEESGAVKKGGYSGYSSGYSGASLDWTVEENGSN

SEQ ID NO: 187338 - protein, 289 aa, Zea Mays
MEWPTRLKIALGAAKGLAYLHEDCHPKIIHRDIKASNILLDFKFEVGLAKFTTDNNTHVSTRVMGTFGYLAPEYAASGKLTEKSDVFSFGVMLLELITGRRPIDTTQTYMDDSLVDWARPLLMRALEDGEYDALVDPRLGKDFNPNEMARMIACAAACVRHSARRRPRMSQVVRALEGDVSLEDLNEGVRPGHSRFFGSYSSSDYDSGQYNEDMQKFRKTAFNNNTYTSSQYSAPTSEYGQVPSGSSSEGRQTQEMEESGAVKKGGYSGYSSGYSGASLDWTVEENGSN

SEQ ID NO: 187339 - protein, 463 aa, Zea Mays
MFHSDAGVRPKRSVDGAAAASQSDCEEACRASCSCTAYSYNSSRCSVWHGELFSVNRNDGIDNNSEQVLYLRLASDDSPPGSAGNRRRKPSAGVVAAASIVGGGLLLVLILLLTIWRKRSWRCGTPLYGSQGGGGGVVAFRYTDLSHATKNFSEKLGAGGFGCVFKGVLTGGSTAIAVKRLDGAARQGEKQFRAEVSSLGLIQHINLVKLIGFCCKGHKIRLLVYEHMSNGSLDSHLFQSDGAAAAAALGWNTRYQIAIGVARGLSYLHQSCRECIIHCDIKPENILLDASFAPKIADFGMAAFVGRDFSRVLTTFRGTAGYLAPEWLGGVAITSKVDVYSFGLVLLEIVSGRRNSPEAYSSDDNYHIEYFPVRAIGKLHGGDVRSLVDPQLHGDFDLEEVERVCKVACWCIQDNELHRPTMGEVVRVLEGQQEIDMPPMPRLLAAITQGTGTVTEGSSASSM

SEQ ID NO: 187340 - protein, 278 aa, Zea Mays
MEWPTRLKIALGAAKGLAYLHEDCHPKIIHRDIKASNILLDFKFEVGLAKFTTDNNTHVSTRVMGTFGYLAPEYAASGKLTEKSDVFSFGVMLLELITGRRPIDTTQTYMDDSLVDWARPLLMRALEDGEYDALVDPRLGKDFNPNEMARMIACAAACVRHSARRRPRMSQVVRALEGDVSLEDLNEGVRPGHSRFFGSYSSSDYDSGQYNEDMQKFRKTAFNNNTYTSSQYSAPTSEYGQVPSGSSSEGRQTQEMEESGAVKKGGYSGYSSGYSGAS

SEQ ID NO: 187341 - protein, 510 aa, Zea Mays
MLRSRSLLKEFSSEVSNQGALDIEDLAQIGKKIGTCPYYGSRDMVRSADLVVLPYQSLLLKSARESLGLNLKNSVVIIDEAHNLADSLSNMYNSKITSSQVCGYANKLSSIQNQFDLQLHDEGSSIACFQALVDFLRSLLNSNDDGRIIVAKQKLGGQPDEAYLKFVMLCAEKIFSEVTQDAYAVILAGGTLQPIEETRLRLCPSLPPTDIKFFTCNHIVPPESILPIAVTRGPSGKAFDFSYNSRSSPSMIEELGRFICNIITVVPEGVVMFFSSYDYERRVYDAWMTTGTISRISKKKHVFREPRNSADVEAVLNKYKEAIESCSNFSQDTGVNGALLLAVVGGKISEGINFSNGMGRCVIMVGLPYPSPSDVELIETIKHIESISSSFSVGDDKALSRKYDDECELQPGYDILRKCTRGGREYYENLCMKAVNQSIGRAIRHINDYAAMLLVDSRYAQTSSTKSFSCPADKLPQWIKARLSCAQNYGEVHRSLHQFFKFNKKNVEIL

SEQ ID NO: 187342 - protein, 472 aa, Zea Mays
MPMPPPPRKDFPAFPFAPYPIQSEFMSFLYAALSSGPGALALLESPTGTGKTLSIICSALQWLLDHREAAVVAATALAHPSGASGSGGDDDEPDWLRDFKPAAAVKESTKKKAKPPAMRKTLVSRKPDGFGEEDGGDDEGEFLLEEYESDSEDVARRGVGKRAHCGSSSSSSSEDDDEMTPKVFFTSRTHSQLSQFVGELKRTEFAGRIRTVCLGSRKNLCINKDVLKMGSGNRINERCLELQKNKKSTKIKLEDDKRKVRPAKRSCGCPMLRSRSLLKEFSSEVSNQGALDIEDLAQIGKKIGTCPYYGSRDMVRSADLVVLPYQSLLLKSARESLGLNLKNSVVIIDEAHNLADSLSNMYNSKITSSQLKAVLSCLDEYLDRFYNVLGAGNRRYIQTLTVLTKSFIRVLINNQDGASTMSSMTINQFLFSLDIDNINIVKLCQFVKESNIIHKVFFPQNVLIQLPNAHVI

SEQ ID NO: 187343 - protein, 172 aa, Zea Mays
MRGAWSGTQKSKKKKKAVQFIRVTEKQAVCAFGIVGGRLDGRGRPARHSFSRGVRQSRRRPCLASVHPSLEWSSMNDELISNPRPGRGVSGGAVRRCWCSSRLPAGGRVATPCTTVYTLLHGPGGAPSCYCGRWWPPSTATAPIPELYLSPTARPITITIPDGTISRSLQHA

SEQ ID NO: 187344 - protein, 177 aa, Zea Mays
MRKQRKMGHITIVGPSKISVKSRLDNLLQRNSSDPKEVSPRVAIIMGSQSDLPVMKDAERVLKEFDIPCAGGAAHLPGMVASLTPLPVIGVPIKTSTLSGFDSLLSIVQMPKGIPVATVAIGIAENAGLLAARILAARDPELQDRVTKYQDDLRDMVLETAERLEDQGPEEFLKGMD

SEQ ID NO: 187345 - protein, 185 aa, Zea Mays
MLCHAASQMGIRIVILDPLPGCPASSVCDEHVIGSFNDEDTVREFAKRCGVLTVEIEHVDVTTLEKLEKQGVDCEPNASTIMIIQDKYRQKKHFSRCEIPLPDFMEVDTLRSIEEAGEKFGYPLMVKSKRLAYDGRGNAVAKNKEELPSVVASLGGFERGLYVERWTPFVKELSVIVARSRDNST

SEQ ID NO: 187346 - protein, 277 aa, Zea Mays
MHARFLSAPSPASAAPSPYVRLAFTGARPRRACWKPRGPASASAPPPRPLHSLCARASMQPASPAHDGHGGPPVHGVSNTVIGVLGGGQLGKMLCHAASQMGIRIVILDPLPGCPASSVCDEHVIGSFNDEDTVREFAKRCGVLTVEIEHVDVTTLEKLEKQGVDCEPNASTIMIIQDKYRQKKHFSRCEIPLPDFMEVDTLRSIEEAGEKFGYPLMVKSKRLAYDGRGNAVAKNKEELPSVVASLGGFERGLYVERWTPFVKELSVIVARSRDNST

SEQ ID NO: 187347 - protein, 139 aa, Zea Mays
MLCHAASQMGIRIVILDPLPGCPASSVCDEHVIGSFNDEDTVREFAKRCGVLTVEIEHVDVTTLEKLEKQGVDCEPNASTIMIIQDKYRQKKHFSRCEIPLPDFMEVDTLRSIEEAGEKFGYPLMVKSKRLAYDGRGNA

SEQ ID NO: 187348 - protein, 109 aa, Zea Mays
MMVANRRSEQVVDPNLERRPSTKELKRALLTALRCIDLNAEKRPSMDQVVRMLDSNELIPQEERRHRQIRIPESSETEPLRGKNNSGRSDAPEHEARPPRPKSRTFSSK

SEQ ID NO: 187349 - protein, 298 aa, Zea Mays
MSSDSSLTESLHERTIVFGLKLWVVIGIAVGASLLGILLILLICLTIQSCIKRSRKPLNDRRLHQIPPAYKDIKEVGMVDQFPAKDFVVHDGLLLTIQNGPEPVEPVDRDAIQLAQEEKLKQREETNVSASFPIMDGCEGTQIVSVDEQSSTHATVDSAPLAGLPEFSYLGWGHWFTLRDLDLATDHFAKDNVIGEGGYGVVYRGRLSNGTPVAVKKILNNLGQAEREFRVEVEAIGHVRHKNLVRLLGYCVEGTQRMLVYEYVNNGNLESWLHGELSQYSSLTWLARMKILLGTAKA

SEQ ID NO: 187350 - protein, 299 aa, Zea Mays
MSSDSSLTESLHERTIVFGLKLWVVIGIAVGASLLGILLILLICLTIQSCIKRSRKPLNDRRLHQIPPAYKDIKEVGMVDQFPAKDFVVHDGLLLTIQNGPEPVEPVDRDAIQLAQEEKLKQREETNVSASFPIMDGCEGTQIVSVDEQSSTHATVDSAPLAGLPEFSYLGWGHWFTLRDLDLATDHFAKDNVIGEGGYGVVYRGRLSNGTPVAVKKILNNLGQAEREFRVEVEAIGHVRHKNLVRLLGYCVEGTQRMLVYEYVNNGNLESWLHGELSQYSSLTWLARMKILLGTAKPC

SEQ ID NO: 187351 - protein, 497 aa, Zea Mays
MLCRAHYTDDKKPDEMKYEWDDDMSLQRKDRHKLEFAFLRSLRMMLPVYSTLAVCFLACHIAREAILPSDIYRWAMEGNIPYVAAFTEVDRFLGSSFQDCPLDARQLFRPVRVIGAWQLEAAAGSIAQRVALRLPSVNFYAIAQRCLKDLLLPIDRILPHACQIYEWAMPAELWLSSNPARVPTRVCVMAILIVALRLLYNINGQGIWEKICEEGRNPSESHYDANSSTSRKLEASNSEEFGTRELLCAISVAYDKINTSHDYSSDLRSYLKYCKEVVFAGITSSDEQTHLIEIFWDMYKAREDDNIEDHVKSQSHSMADIPITNGVRKHYRDGAFVKASSFSASSGHDAMQMLKSEMQDHGFHYMPPRKPRKSDGYLRYRRRRLSGGFIFVAHADYYLLLRAFAKLAEIDIRIMHIRIPPPFLLEKNMWCHCVTVVLKNIRSLIPQELRASFCGLLALVSNLSTRTGQDVGLYLLKQYVPRIMPPFFRTDIIISGS

SEQ ID NO: 187352 - protein, 441 aa, Zea Mays
MKYEWDDDMSLQRKDRHKLEFAFLRSLRMMLPVYSTLAVCFLACHIAREAILPSDIYRWAMEGNIPYVAAFTEVDRFLGSSFQDCPLDARQLFRPVRVIGAWQLEAAAGSIAQRVALRLPSVNFYAIAQRCLKDLLLPIDRILPHACQIYEWAMPAELWLSSNPARVPTRVCVMAILIVALRLLYNINGQGIWEKICEEGRNPSESHYDANSSTSRKLEASNSEEFGTRELLCAISVAYDKINTSHDYSSDLRSYLKYCKEVVFAGITSSDEQTHLIEIFWDMYKAREDDNIEDHVKSQSHSMADIPITNGVRKHYRDGAFVKASSFSASSGHDAMQMLKSEMQDHGFHYMPPRKPRKSDGYLRYRRRRLSGGFIFVAHADYYLLLRAFAKLAEIDIRIMHISVLKLEKRLACIEERIERSLNTLHNFSTGTVDELRSVSD

SEQ ID NO: 187353 - protein, 458 aa, Zea Mays
MDSDINLSLVADDKKPDEMKYEWDDDMSLQRKDRHKLEFAFLRSLRMMLPVYSTLAVCFLACHIAREAILPSDIYRWAMEGNIPYVAAFTEVDRFLGSSFQDCPLDARQLFRPVRVIGAWQLEAAAGSIAQRVALRLPSVNFYAIAQRCLKDLLLPIDRILPHACQIYEWAMPAELWLSSNPARVPTRVCVMAILIVALRLLYNINGQGIWEICEEGRNPSESHYDANSSTSRKLEASNSEEFGTRELLCAISVAYDKINTSHDYSSDLRSYLKYCKEVVFAGITSSDEQTHLIEIFWDMYKAREDDNIEDHVKSQSHSMADIPITNGVRKHYRDGAFVKASSFSASSGHDAMQMLKSEMQDHGFHYMPPRKPRKSDGYLRYRRRRLSGGFIFVAHADYYLLLRAFAKLAEIDIRIMHISVLKLEKRLACIEERIERSLNTLHNFSTGTVDELRSVSD

SEQ ID NO: 187354 - protein, 189 aa, Zea Mays
MGLSLNIDMSSTAFIEPLPMIDFVAQLLNRDILVRPLSDSDRVKIKKTLRGVKVEVTHRGNMRRKYRISGLTSQATRELSFPVDDRGTVKTVVQYFMETYGFSIQHTTLPCLQVGNQQRPNYLPMEVCKIVEGQRYSKRLNEKQITSLLKVTCQRPQERELDILQDSGSHQVTPPHHDDFADKCLNSSG

SEQ ID NO: 187355 - protein, 221 aa, Zea Mays
MFLAGRQADAPQEALQVLDIVLRELPTARYSPVGRSFYSPNLGRRQKLDMSSTAFIEPLPMIDFVAQLLNRDILVRPLSDSDRVKIKKTLRGVKVEVTHRGNMRRKYRISGLTSQATRELSFPVDDRGTVKTVVQYFMETYGFSIQHTTLPCLQVGNQQRPNYLPMEVCKIVEGQRYSKRLNEKQITSLLKVTCQRPQERELDILQVLVALLTVATCLFLT

SEQ ID NO: 187356 - protein, 387 aa, Zea Mays
MSRQVQKAKNHHQLALAILVLLFVYWLSYCRWRLPFASADQDLEFELCHVKHFAFHDLQSATDNFNSKNILGQGGFGIVYKGCLRNGTLVVVKRLKDPDVIGEVQFQTEVELIGLAVHRNLLRLYGFCMTSKERLLVYPYMPNGSVADRLRDYRNGKPSLDWSKRMRIALGTARGLLYLHEQCNPKIIHRDVKAANILLDGNFEAIVGDFGLAKLLDRQESHVTTAIRGTIGHIAPEYLSTGQSSEKTDVYGIGILLLELITGPKTLSNGHGQSQKGMILDWVRELKEDKRLDKLVDRDLRDSFDILELECSVDVIIQCTQTNPMLWPKLSEILHALEANVTLAETSVELNREPLPYGVPCSSSMRHEDPHDSSSFIIEPIELSGPR

SEQ ID NO: 187357 - protein, 289 aa, Zea Mays
MAAAAISLPRSPSLLQPTRRRSAPPACTQSERGVSFDPGSAFYRSDSAAGRDLAVLAATLHRRRGRPDPSAPFLCLDAMCGCGVRALRYLAQAGADFVWANDASEALRPIILANLCRFERGSPEAVAGCRRWVVSHNDATRLLAERYLRREYFDVIDVDSFGGDAAYVRAALLALKIGGLLYLTSTDWRSARGYGSRSSLSSYGAYVRPMPYPNEVGLRMVIGGAAREASLLGFHITPLFSYFAYHGPIYRVMVQLCNGKDDGIRVVVSLKLLDLMSWGRFLVDVQTQQ

SEQ ID NO: 187358 - protein, 296 aa, Zea Mays
MAAAAISLPRSPSLLQPTRRRSAPPACTQSERGVSFDPGSAFYRSDSAAGRDLAVLAATLHRRRGRPDPSAPFLCLDAMCGCGVRALRYLAQAGADFVWANDASEALRPIILANLCRFERGSPEAVAGCRRWVVSHNDATRLLAERYLRREYFDVIDVDSFGGDAAYVRAALLALKIGGLLYLTSTDWRSARGYGSRSSLSSYGAYVRPMPYPNEVGLRMVIGGAAREASLLGFHITPLFSYFAYHGPIYRVMVQLCNGKDDGIRVVVSLKLLDLMSWGRFLVDVQTQQMPIQSLL

SEQ ID NO: 187359 - protein, 1426 aa, Zea Mays
MANPGLGLGLAPPGAEPSAGAPPSSRRAPRLAKRRHAPASSRSRMPQTSAGIWNPFGGGGGTDRQTGGFVFGAASAVSQQPLEPAVSVASPTEAPFVFGSVRESLPRFDEGSPASSKLPDKMEKLNLRTSSEVDDGLGQGRDRKDGSSVFGADISGLFSSNKESNVLQEKLTQLNLGHKEPLQSKKRDSANGVPQAFVFGGNGAGSFADCKNKAAPGAHSDDPSSVHGTDAKGMAGKSMQFNIGSQAPSRGGGIDRTNGAPEAFTFRSTTLSGHVDNINNVDSGANTSSSTVAKCVCDADFPLEKITRLCIGSDMPLHETKSGYQPKVFTFGSGGIPGAVFGKETGSTSDRSSEFLSANSNTSSSSSDFFSTANSNVSNSANGTYCLPPEKTPDLNAGDRVMSQSLEGDNSNCPTETFLFERNETRSSVSHSASIAMDDGGNFVNDENTDTCSSAHSTVECAGALPEKMTKLGIGCRIPHHSRKDETATDPPEVYVFGCNLSSFSSAQTSSKSNDRTTPEFCFQSKTGATSGYGAVPQTKVQDSYPFTILNNSCTFSTFENAVPAFSFGTLNAETETAPDDPFSFSVKHDLPGYSRETLFGLDSIKSAYKDKREACKGKMKNKRPTRLKQHAQLHQVISKEACTSGEASDLAGDCSPMDCSPYPAESEHVPTEAYVASDQPVHIGDTVISNGNTSCAEDDVVSAAEHLVTDADLLMFGDEGRGPKLDASESNFGSSVSSFEGDQSNASQHSFTNIGQNCNENTYRTPHDFVEAAAFQSNSSNFSGLNFRFGVSSSPQISAAAQRRSTRRKLRTKGSLASKPSTIDSLEQPKSSQDTKGMQFFCEASKNEDSVKAQQSRDSSTSVALETCETWRTSGNKAYANGHFTAAEDYYTRGINSVTHNGVSGQCSRALMLCYSNRAATRMSLGMMWEALQDCLTATSIDPTFLKAKVRAAKCQLALGDLEDASMSYMSCLNSNTESSDPKIFAEASDGLEGVKRVTDWVSQCKEFLERRTSPEATKALELISNALHICPHSDSVKEMKAEALLMLRRYEEVIQLCQESVNLTERNSVLFKDNGEPKNSRVSERMQFSGRYWRPYLICKSYFLSGKLDEALELLKKHEQVTPVKESEVNTYEEKFSSLSATIRELLSLKAAGNESFQAGRYSDAVKQYSAALAWNSESRPFSAVCFCNRAAAYQALGQVTDAISDCSLAMVLDTNYPKAISRRATLYKMIRDYDQAANDVRKLISLLEKKVNVSGVSPKAFNKHNDLKQAHVRLSSIEDEAKNDTPLNLYLILGVEPSCSSEDIKKAYRKAALRHHPDKATQLLIRNENAEDGFWRDVVKEVYADADHLFKTIGEAYNVLSDPAKREEYNFEEDLRNARRRVSSSRSMHRSPEQNYSNRGFNPRQRQSSRASRSRWYSNSDDY

SEQ ID NO: 187360 - protein, 66 aa, Zea Mays
MNIDQHIPLVCCYLQFFSYNLRSGMFTTRYHLHLFALHAHFHYPSFLFSVIIMELMALFLSLQFNS

SEQ ID NO: 187361 - protein, 173 aa, Zea Mays
MVPNSTAKAPGRAPPWRLPQPWSPRSWPRRIPRAPVSWRCPHVFSAPARHRLYLSSSLAVAHRSPPHGCCSSLPHLCNSAPPLLLHLQFAPCSGRQPSIPLPSSHGRPSSLLLLARDQLGALSSLEAGNNALVVVEQHVVGSVGFLGSPVAVSSNPACSSTVEFHRVPASLII

SEQ ID NO: 187362 - protein, 168 aa, Zea Mays
MVPNSTAKAPGRAPPWRLPQPWSPRSWPRRIPRAPVSWRCPHVFSAPARHRLYLSSSLAVAHRSPPHGCCSSLPHLCNSAPPLLLHLQFAPCSGRQPSIPLPSSHGRPSSLLLLARDQLGALSSLEAGNNALVVVEQHVVGSVGFLGSPVAVSSNPVQQLNFIESQPV

SEQ ID NO: 187363 - protein, 268 aa, Zea Mays
MAEDGGDRDHQQQPPAAAAAAASDSAGVEGRSRESVKLFVGQVPKQMSEAELAAMFRSVALVDEVTVIRDRVTRVSRGCCFVICPSREEADKAVTTYHNKRTLPGASSPLQVKYADGELERLEHKLFVGMLPKNVTHAEMTDLFSKYGNIKDLQILRGSQQTSKAGCAFLKYETKEQAVAAIEALNGTHKIEGSSVPLVVKWADTEKERQARKAQKAQFQSSNMLNANAMQQNSVFGGLQMGYVPQYNGFGYQVYYGIKNEVRLGVGP

SEQ ID NO: 187364 - protein, 497 aa, Zea Mays
MLVVYTNIKGKLEEIGRTEVILNSLEPSWITKVTMSYQFEIVQPLIFRIYDVDTKYHNTPVKTLNLTQQDFLGVACCNLSESDCGHGLHGTMTVHAEESDSSRMAVEMTLRCVNLENKDVFSKSDPFLRISKLVETAGPIPICKTEVVPDNLNPVWRPITLTSQQYGSKDNPLLVECFDFNSSGDHELIGAFQTTITQLENLYTSKSAAIFYNHKGQRKMKEQLFVDKFQETVQHTFLDYISSGFELNFMVAIDFTASNGDPRVPQSLHYIDPSGRPNSYQQAMLGVGEVLQFYDNDRRFPTWGFGARVHGYVSHCFNLNTATNDSEVVGVEGIMSAYTSSLYSVSLAGPTMFGPVINKAADIASQSLQYSNNKYFVLLIITDGVLTDIQETKDCIVRASDLPLSILIVGVGNADFKQMEILDADNGKRLESSTGRIATRDIVQFVPMREVQGGEISVVQSLLEELPGQFLQYMRTRGIKPQRAPGLASAPVYPPQQ

SEQ ID NO: 187365 - protein, 567 aa, Zea Mays
MGGCFSVHGDVRGGMEGVGGGARTQGGAASSSAQQGGPNDAVDYFFQTRGLRGLYTPIELSFSASKLRNTDSFSKSDPMLVVYTNIKGKLEEIGRTEVILNSLEPSWITKVTMSYQFEIVQPLIFRIYDVDTKYHNTPVKTLNLTQQDFLGSDCGHGLHGTMTVHAEESDSSRMAVEMTLRCVNLENKDVFSKSDPFLRISKLVETAGPIPICKTEVVPDNLNPVWRPITLTSQQYGSKDNPLLVECFDFNSSGDHELIGAFQTTITQLENLYTSKSAAIFYNHKGQRKMKEQLFVDKFQETVQHTFLDYISSGFELNFMVAIDFTASNGDPRVPQSLHYIDPSGRPNSYQQAMLGVGEVLQFYDNDRRFPTWGFGARVHGYVSHCFNLNTATNDSEVVGVEGIMSAYTSSLYSVSLAGPTMFGPVINKAADIASQSLQYSNNKYFVLLIITDGVLTDIQETKDCIVRASDLPLSILIVGVGNADFKQMEILDADNGKRLESSTGRIATRDIVQFVPMREVQGGEISVVQSLLEELPGQFLQYMRTRGIKPQRAPGLASAPVYPPQQ

SEQ ID NO: 187366 - protein, 518 aa, Zea Mays
MGKEKSHINIVVIGHVDSGKSTTTGHLIYKLGGIDKRVIERFEKEAAEMNKRSFKYAWVLDKLKAERERGITIDIALWKFETTKYYCTVIDAPGHRDFIKNMITGTSQADCAVLIIDSTTGGFEAGISKDGQTREHALLAFTLGVKQMICCCNKMDATTPKYSKARYEEIVKEVSSYLKKVGYNPDKIAFVPISGFEGDNMIERSTNLDWYKGPTLLEALDQITEPKRPSDKPLRLPLQDVYKIGGIGTVPVGRVETGVIKPGMVVTFGPTGLTTEVKSVEMHHEALQEALDQITEPKRPSDKPLRLPLQDVYKIGGIGTVPVGRVETGVIKPGMVVTFGPTGLTTEVKSVEMHHEALQEALPGDNVGFNVKNVAVKDLKRGFVASNSKDDPAKEAASFTSQVIIMNHPGQIGNGYAPVLDCHTSHIAVKFAELITKIDRRSGKELEKEPKFLKNGDAGMVKMIPTKPMVVETFSAYPPLGRFAVRDMRQTVAVGVIKSVEKKDPTGAKVTKAAAKKK

SEQ ID NO: 187367 - protein, 468 aa, Zea Mays
MGKEKSHINIVVIGHVDSGKSTTTGHLIYKLGGIDKRVIERFEKEAAEMNKRSFKYAWVLDKLKAERERGITIDIALWKFETTKYYCTVIDAPGHRDFIKNMITGTSQADCAVLIIDSTTGGFEAGISQADCAVLIIDSTTGGFEAGISKDGQTREHALLAFTLGVKQMICCCNKMDATTPKYSKARYDEIVKEVSSYLKKVGYNPDKIAFVPISGFEGDNMIERSTNLDWYKGPTLLEALDQITEPKRPSDKPLRLPLQDVYKIGGIGTVPVGRVETGVIKPGMVVTFGPTGLTTEVKSVEMHHEALQEALPGDNVGFNVKNVAVKDLKRGFVASNSKDDPAKEAASFTSQVIIMNHPGQIGNGYAPVLDCHTSHIAVKFAELITKIDRRSGKELEKEPKFLKNGDAGMVKMIPTKPMVVETFSAYPPLGRFAVRDMRQTVAVGVIKSVEKKDPTGAKVTKAAAKKK

SEQ ID NO: 187368 - protein, 546 aa, Zea Mays
MGKEKSHINIVVIGHVDSGKSTTTGHLIYKLGGIDKRVIERFEKEAAEMNKRSFKYAWVLDKLKAERERGITIDIALWKFETTKYYCTVIDAPGHRDFIKNMITGTSQADCAVLIIDSTTGGFEAGISKDGQTREHALLAFTLGVKQMICCCNKMDATTPKYSKARYEEIVKEVSSYLKKVGYNPDKIAFVPISGFEGDNMITGTSQADCAVLIIDSTTGGFEAGISKDGQTREHALLAFTLGVKQMICCCNKMDATTPKYSKARYDEIVKEVSSYLKKVGYNPDKIAFVPISGFEGDNMIERSTNLDWYKGPTLLEALDQITEPKRPSDKPLRLPLQDVYKIGGIGTVPVGRVETGVIKPGMVVTFGPTGLTTEVKSVEMHHEALQEALPGDNVGFNVKNVAVKDLKRGFVASNSKDDPAKEAASFTSQVIIMNHPGQIGNGYAPVLDCHTSHIAVKFAELITKIDRRSGKELEKEPKFLKNGDAGMVKMIPTKPMVVETFSAYPPLGRFAVRDMRQTVAVGVIKSVEKKDPTGAKVTKAAAKKK

SEQ ID NO: 187369 - protein, 443 aa, Zea Mays
MGKEKSHINIVVIGHVDSGKSTTTGHLIYKLGGIDKRVIERFEKEAAEMNKRSFKYAWVLDKLKAERERGITIDIALWKFETTKYYCTVIDAPGHRDFIKNMITGTSQADCAVLIIDSTTGGFEAGISKDGQTREHALLAFTLGVKQMICCCNKMDATTPKYSKARYEEIVKEVSSYLKKVGYNPDKIAFVPISGFEGDNMIERSTNLDWYKGPTLLEALDQITEPKRPSDKPLRLPLQDVYKIGGIGTVPVGRVETGVIKPGMVVTFGPTGLTTEVKSVEMHHEALQEALPGDNVGFNVKNVAVKDLKRGFVASNSKDDPAKEAASFTSQVIIMNHPGQIGNGYAPVLDCHTSHIAVKFAELITKIDRRSGKELEKEPKFLKNGDAGMVKMIPTKPMVVETFSAYPPLGRFAVRDMRQTVAVGVIKSVEKKDPTGAQVPEER

SEQ ID NO: 187370 - protein, 560 aa, Zea Mays
MGKEKSHINIVVIGHVDSGKSTTTGHLIYKLGGIDKRVIERFEKEAAEMNKRSFKYAWVLDKLKAERERGITIDIALWKFETTKYYCTVIDAPGHRDFIKNMITGTSQADCAVLIIDSTTGGFEAGISKDGQTREHALLAFTLGVKQMICCCNKMDATTPKYSKARYEEIVKEVSSYLKKVGYNPDKIAFVPISGFEGDNMIERSTNLDWYKGPTLLEALDQITEPKRPSDKPLRLPLQDVYKIGGIGTVPVGRVETGVIKPGMVVTFGPTGLTTEVKSVEMHHEALQEALPGDNVGFNVKNVAVKDLKRGFVASNSKDDPAKEAASFTSQVIIMNHPGQIGNGYAPVLDCHTSHIAVKFAELITKIDRRSGKELEKEPKFLKNGDAGMVKSVEMHHEALQEALPGDNVGFNVKNVAVKDLKRGFVASNSKDDPAKEAASFTSQVIIMNHPGQIGNGYAPVLDCHTSHIAVKFAELITKIDRRSGKELEKEPKFLKNGDAGMVKMIPTKPMVVETFSAYPPLGRFAVRDMRQTVAVGVIKSVEKKDPTGAKVTKAAAKKK

SEQ ID NO: 187371 - protein, 479 aa, Zea Mays
MGKEKSHINIVVIGHVDSGKSTTTGHLIYKLGGIDKRVIERFEKEAAEMNKRSFKYAWVLDKLKAERERGITIDIALWKFETTKYYCTVIDAPGHRDFIKNMITGTSQADCAVLIIDSTTGGFEAGISKDGQTREHALLAFTLGVKQMICCCNKMDATTPKYSKARYEEIVKEVSSYLKKVGYNPDKIAFVPISGFEGDNMIERSTNLDWYKGPTLLEALDQITEPKRPSDKPLRLPLQDVYKIGGIGTVPVGRVETGVIKPGMVVTFGPTGLTTEVKSVEMHHEALQEALPGDNVGFNVKNVAVKDLKRGFVASNSKDDPAKEAASFTSQVIIMNHPGQIGNGYAPVLDCHTSHIAASFTSQVIIMNHPGQIGNGYAPVLDCHTSHIAVKFAELITKIDRRSGKELEKEPKFLKNGDAGMVKMIPTKPMVVETFSAYPPLGRFAVRDMRQTVAVGVIKSVEKKDPTGAKVTKAAAKKK

SEQ ID NO: 187372 - protein, 240 aa, Zea Mays
MGKEKSHINIVVIGHVDSGKSTTTGHLIYKLGGIDKRVIERFEKEAAEMNKRSFKYAWVLDKLKAERERGITIDIALWKFETTKYYCTVIDAPGHRDFIKNMITGTSQADCAVLIIDSTTGGFEAGISKDGQTREHALLAFTLGVKQMICCCNKMDATTPKYSKARYEEIVKEVSSYLKKVGYNPDKIAFVPISGFEGDNMIERSTNLDWYKGPTLLEALDQITEPKRPSDKPLRLPNPA

SEQ ID NO: 187373 - protein, 565 aa, Zea Mays
MGKEKSHINIVVIGHVDSGKSTTTGHLIYKLGGIDKRVIERFEKEAAEMNKRSFKYAWVLDKLKAERERGITIDIALWKFETTKYYCTVIDAPGHRDFIKNMITGTSQADCAVLIIDSTTGGFEAGISKDGQTREHALLAFTLGVKQMICCCNKMDATTPKYSKARYEEIVKEVSSYLKKVGYNPDKIAFVPISGFEGDNMIERSTNLDWYKGPTLLEALDQITEPKRPSDKPLRLPLQDVYKIGGIGTVPVGRVETGVIKPGMVVTFGPTGLTTEVKSVEMHHEALQEALPGDNVGFNVKNVAVKDLKRGFVASNSKDDPAKEAASFTSQVIIMNHPGQIGNGYAPVLDCHTSHIAVKFAELITKIDRRSGKELEKEPKFLKNGDAGMVKMIPTKPMVVETFSAYPPLGRFAVRDMRQTVAVGVIKSVEKKDPTGAKVTKEAASFTSQVIIMNHPGQIGNGYAPVLDCHTSHIAVKFAELITKIDRRSGKELEKEPKFLKNGDAGMVKMIPTKPMVVETFSAYPPLGRFAVRDMRQTVAVGVIKSVEKKDPTGAKVTKAAAKKK

SEQ ID NO: 187374 - protein, 242 aa, Zea Mays
MGKEKSHINIVVIGHVDSGKSTTTGHLIYKLGGIDKRVIERFEKEAAEMNKRSFKYAWVLDKLKAERERGITIDIALWKFETTKYYCTVIDAPGHRDFIKNMITGTSQADCAVLIIDSTTGGFEAGISKDGQTREHALLAFTLGVKQMICCCNKMDATTPKYSKARYEEIVKEVSSYLKKVGYNPDKIAFVPISGFEGDNMIERSTNLDWYKGPTLLEALDQITEPKRPSDKPLRLPLQLQG

SEQ ID NO: 187375 - protein, 376 aa, Zea Mays
MGKEKSHINIVVIGHVDSGKSTTTGHLIYKLGGIDKRVIERFEKEAAEMNKRSFKYAWVLDKLKAERERGITIDIALWKFETTKYYCTVIDAPGHRDFIKNMITGTSQADCAVLIIDSTTGGFEAGISKDGQTREHALLAFTLGVKQMICCCNKMDATTPKYSKARYEEIVKEVSSYLKKVGYNPDKIAFVPISGFEGDNMIERSTNLDWYKGPTLLEALPGDNVGFNVKNVAVKDLKRGFVASNSKDDPAKEAASFTSQVIIMNHPGQIGNGYAPVLDCHTSHIAVKFAELITKIDRRSGKELEKEPKFLKNGDAGMVKMIPTKPMVVETFSAYPPLGRFAVRDMRQTVAVGVIKSVEKKDPTGAKVTKAAAKKK

SEQ ID NO: 187376 - protein, 399 aa, Zea Mays
MNKRSFKYAWVLDKLKAERERGITIDIALWKFETTKYYCTVIDAPGHRDFIKNMITGTSQADCAVLIIDSTTGGFEAGISKDGQTREHALLAFTLGVKQMICCCNKMDATTPKYSKARYEEIVKEVSSYLKKVGYNPDKIAFVPISGFEGDNMIERSTNLDWYKGPTLLEALDQITEPKRPSDKPLRLPLQDVYKIGGIGTVPVGRVETGVIKPGMVVTFGPTGLTTEVKSVEMHHEALQEALPGDNVGFNVKNVAVKDLKRGFVASNSKDDPAKEAASFTSQVIIMNHPGQIGNGYAPVLDCHTSHIAVKFAELITKIDRRSGKELEKEPKFLKNGDAGMVKMIPTKPMVVETFSAYPPLGRFAVRDMRQTVAVGVIKSVEKKDPTGAKVTKAAAKKK

SEQ ID NO: 187377 - protein, 368 aa, Zea Mays
MGKEKSHINIVVIGHVDSGKSTTTGHLIYKLGGIDKRVIERFEKEAAEMNKRSFKYAWVLDKLKAERERGITIDIALWKFETTKYYCTVIDAPGHRDFIKNMITGTSQADCAVLIIDSTTGGFEAGISKDGQTREHALLAFTLGVKQMICCCNKMDATTPKYSKARYEEIVKEVSSYLKKVGYNPDKIAFVPISGFEGDNMIERSTNLDWYKGPTLLEALDQITEPKRPSDKPLRLPLQDDPAKEAASFTSQVIIMNHPGQIGNGYAPVLDCHTSHIAVKFAELITKIDRRSGKELEKEPKFLKNGDAGMVKMIPTKPMVVETFSAYPPLGRFAVRDMRQTVAVGVIKSVEKKDPTGAKVTKAAAKKK

SEQ ID NO: 187378 - protein, 99 aa, Zea Mays
MSRTLEDSAFLSDSQPSSAADSASILLCFLQARPQTGSSLPRTMPLSRSTLATWMRMACMMVTSQRLLSLGLSVLRATQTAPWTGCGRRRLISSSRFYI

SEQ ID NO: 187379 - protein, 126 aa, Zea Mays
MSRTLEDSAFLSDSQPSSAADSASILLCFLQVALAVVPPTATMQNEEGKTVDLYVPRKSRPQTGSSLPRTMPLSRSTLATWMRMACMMVTSQRLLSLGLSVLRATQTAPWTGCGRRRLISSSRFYI

SEQ ID NO: 187380 - protein, 199 aa, Zea Mays
MAASTVTCFTTGEPHREHDRAHKHEDSFRRNHKPPSRASIMEYGQQGQRGHGATGHVDQYGNPVGGVEHGTGGMRHGTGTTGGMGQLGEHGGAGMGGGQFQPAREEHKTGGILHRSGSSSSSSDDGMGGRRKKGIKEKIKEKLPGGHKDDQHATATTGGAYGQQGHTGSAYGQQGHTGGAYATGTEGTGEKKAVLFSVP

SEQ ID NO: 187381 - protein, 153 aa, Zea Mays
MAASTVTCFTTGEPHREHDRAHKHEDSFRRNHKPPSRASIMEYGQQGQRGHGATGHVDQYGNPHGGAGMGGGQFQPAREEHKTGGILHRSGSSSSSSSEDDGMGGRRKKGIKEKIKEKLPGGHKDDQHGHTGSAYATGTEGTGEKKAVLFSVP

SEQ ID NO: 187382 - protein, 180 aa, Zea Mays
MQVRLLSEIRHRNIVTLIGYCQEGGLQMLVYEYLPNGSVCGHLYDNRKGSATRLEFKQRLSIAIGAAKGLNHLHSLDPPLIHKDFKTNNVLVDENFIAKVADAGLVRLIRGSDDAGPSRGFSNSVYQDPEVQSMTQFSESSDVYSFGVFLLELITGREAASLIPTESREYLAHWVISTDM

SEQ ID NO: 187383 - protein, 376 aa, Zea Mays
MSLPIALVVGIAGGATLLAVAAVLLALWCAARMRARRNRNSDTGSSDPSTLGGRSSLAPDLEHQVARQFSLEDLVQATKNFSDTNIIGAGSFGLVYMGLLLDGTVVAIKRRVGAATQVFADEVRLLSEIRHRNIVTLIGYCQEGGLQMLVYEYLPNGSVCGHLYDNRKGSATRLEFKQRLSIAIGAAKGLNHLHSLDPPLIHKDFKTNNVLVDENFIAKVADAGLVRLIRGSDDAGPSRGFSNSVYQDPEVQSMTQFSESSDVYSFGVFLLELITGREAASLIPTESREYLAHWMEAHFSSNELIDPRLAGNFTAEGMKELVGLAFQCLNPSSRRRPRMRLVATELDRILETEMSMTTFMGDGTTIVTLGSQLFSS

SEQ ID NO: 187384 - protein, 194 aa, Zea Mays
MSLPIALVVGIAGGATLLAVAAVLLALWCAARMRARRNRNSDTGSSDPSTLVEWGKGGRSSLAPDLEHQVARQFSLEDLVQATKNFSDTNIIGAGSFGLVYMGLLLDGTVVAIKRRVGAATQVFADEVRLLSEIRHRNIVTLIGYCQEGGLQMLVYEYLPNGSVCGHLYDNRKGSATRLEFKQRLSIAIGAAKG

SEQ ID NO: 187385 - protein, 217 aa, Zea Mays
MSLPIALVVGIAGGATLLAVAAVLLALWCAARMRARRNRNSDTGSSDPSTLVEWGKGGRSSLAPDLEHQVARQFSLEDLVQATKNFSDTNIIGAGSFGLVYMGLLLDGTVVAIKRRVGAATQVFADEVRLLSEIRHRNIVTLIGYCQEGGLQMLVYEYLPNGSVCGHLYDNRKGSATRLEFKQRLSIAIGAAKEDLTMPAHRVGSVTVFTKIQRYSR

SEQ ID NO: 187386 - protein, 311 aa, Zea Mays
MSLPIALVVGIAGGATLLAVAAVLLALWCAARMRARRNRNSDTGSSDPSTLVEWGKGGRSSLAPDLEHQVARQFSLEDLVQATKNFSDTNIIGAGSFGLVYMGLLLDGTVVAIKRRVGAATQVFADEVRLLSEIRHRNIVTLIGYCQEGGLQMLVYEYLPNGSVCGHLYASYGPPDNRKGSATRLEFKQRLSIAIGAAKGLNHLHSLDPPLIHKDFKTNNVLVDENFIAKVADAGLVRLIRGSDDAGPSRGFSNSVYQDPEVQSMTQFSESSDVYSFGVFLLELITGREAASLIPTESREYLAHWVISTDM

SEQ ID NO: 187387 - protein, 256 aa, Zea Mays
MQVRLLSEIRHRNIVTLIGYCQEGGLQMLVYEYLPNGSVCGHLYDNRKGSATRLEFKQRLSIAIGAAKGLNHLHSLDPPLIHKDFKTNNVLVDENFIAKVADAGLVRLIRGSDDAGPSRGFSNSVYQDPEVQSMTQFSESSDVYSFGVFLLELITGREAASLIPTESREYLAHWMEAHFSSNELIDPRLAGNFTAEGMKELVGLAFQCLNPSSRRRPRMRLVATELDRILETEMSMTTFMGDGTTIVTLGSQLFSS

SEQ ID NO: 187388 - protein, 293 aa, Zea Mays
MDATTPKYSKARYDEIVKEVSSYLKKVGYNPDKIAFVPISGFEGDNMIERSTNLDWYKGPTLLEALDQITEPKRPSDKPLRLPLQDVYKIGGIGTVPVGRVETGVIKPGMVVTFGPTGLTTEVKSVEMHHEALQEALPGDNVGFNVKNVAVKDLKRGYVASNSKDDPAKEAASFTSQVIIMNHPGQIGNGYAPVLDCHTSHIAVKFAELITKIDRRSGKELEKEPKFLKNGDAGMVKMIPTKPMVVETFSQYPPLGRFAVRDMRQTVAVGVIKSVEKKDPTGAKVTKAAIKKK

SEQ ID NO: 187389 - protein, 374 aa, Zea Mays
MQCPRLALLVPLPCRESSPPTSSPEISPPETRPRHGCRSFRPACPPRPPLPRGCCQNWWVDDLSVVKVDHSQVLLASVTFSAPMPLLRLRVASPRSVLLLKPAYFRCPQSPHISGQASPPRSMGPRSPSTSAGCPCSPPPAPSRPPSAPPRSRRCSRWSPVYFSRGAKAVVKYEPRALAVSVAASTLDLGKHEVNLTRLLPLSFEDLEDDGDSGFEKWSTSFRLSGPVRGARLNVTFSCSLLAGGGTSEQHRGGEVAGLRRGSMARAVSVQVPTPLPARSRGVRVLHEVLPSLRSARPVPSSVADGGPDARKEEVAAPDCTEEGSPEAKHCTSVEPSCVLTERLERERGCAPLHSTPLASSVLASCSCRGALSP

SEQ ID NO: 187390 - protein, 249 aa, Zea Mays
MISPWSRSTTPRCPQSPHISGQASPPRSMGPRSPSTSAGCPCSPPPAPSRPPSAPPRSRRCSRWSPVYFSRGAKAVVKYEPRALAVSVAASTLDLGKHEVNLTRLLPLSFEDLEDDGDSGFEKWSTSFRLSGPVRGARLNVTFSCSLLAGGGTSEQHRGGEVAGLRRGSMARAVSVQVPTPLPARSRGVRVLHEVLPSLRSARPVPSSVADGGPDARKEEVAAPDCTEEGSPEAKHCTSVEPVFVSFGG

SEQ ID NO: 187391 - protein, 63 aa, Zea Mays
MKHYITTRYLFLARRTCNLAFAYTDHIRRDEHSRIYTMHVDCYTTGSITHSHVAAGVERAPPP

SEQ ID NO: 187392 - protein, 521 aa, Zea Mays
MGGPGRPWHRHVFLVVSLQLLLVAPWQDETAARALNFTRQDFPRAFVFGAGTSAYQYEGATDEDGRSPSIWDNFTHAGRMPDKSTGDLGADGYHKYKGDVQLMSDTGLEAYRFSISWSRLIPRGRGAINPKGLEYYNNLINELVKRGIEIHVTLSHLDYPQILEDEYHGWLSPRMVDDFEAYADVCFREFGDRVRHWTTMDEPNVNSIAAYDNGAFPPGRCSPPFGFGTNCTAGGNSSVEPYVVTHNCILAHAAVAALYTRSYRAEQQGVVGINIYTFWNYPFSPAPADVQATQRSLDFMIGWMVNPLVYGDYPQVMKRIVGSRLPRFTKRQSEMVRGTADFIGINHYTSVYVSDRPNDAAADTTGPRDYNADLSATFRFSRDDPATGQGLQCMLEYLSQTYNNIPVYVQENGYGALFNDSIHDHERAEYLSAYMGSALAALRNGANVKGYFVWSFLDVFELLAGYYSRYGLYHVDFQDPELPRTPKLSALWYSKFLKNEIDIIENVVSDTDDARSHAAEQ

SEQ ID NO: 187393 - protein, 142 aa, Zea Mays
MVTGLPSSASWQDLKDHMRRAGDVCFTDVYREAGATIGIADYTNYEDMKHAIRKLDDSEFRNAFSRTYVRVREYDARRSRSRSRGRNRSKSRSRSHSHSYSRSRSCSYSKSRSPRSRSASESKSPVKARLGQCEDLGIALVG

SEQ ID NO: 187394 - protein, 272 aa, Zea Mays
MTRRNGCTIYVGNLPGDIREREVDDLFYKGRQCGLRMYGRIVEIDLKIPPRPPGFAFVEFEDARDAEDAIYGRDGYNFDGHRLRVELAHGGRGTSSFDRSSSYSSAGQRGASKRSDYRVMVTGLPSSASWQDLKDHMRRAGDVCFTDVYREAGATIGIADYTNYEDMKHAIRKLDDSEFRNAFSRTYVRVREYDARRSRSRSRGRNRSKSRSRSHSHSYSRSRSCSYSKSRSPRSRSASESKSPVKASCTTETRKLWPCWTISIHVGYIFVC

SEQ ID NO: 187395 - protein, 262 aa, Zea Mays
MLSKSNHVAIVTVDGRPGPGAYGITAVIIGAIGYLFIRWKGWKLSDMMFVTKRGLSDACNVVGKQVDQVSESVNVARRHLAGRIDRVDCSLDECHEITEATREQVTIIHGDLSAFQKEMETVHLVVRSLEAKLGRLAYTQDRTTRGIYDLCEFTKRLDQSPKAETHQAGSLPPALEPESPRIEAPKVVRSSTIMSASGLSLLAGTTTPPKRDQPGAFSRTSSMKEGSSELPSGVRSSAEPSPRRSGGSTLFGGLGFLRSYTS

SEQ ID NO: 187396 - protein, 315 aa, Zea Mays
MVLGKIAIVIGSGVIGSVLTGGESGLPDFKDAISGAFKFLTKSSKQGKDGPSTSRPHTSELLTQVNYLREELQMLSKSNHVAIVTVDGRPGPGAYGITAVIIGAIGYLFIRWKGWKLSDMMFVTKRGLSDACNVVGKQVDQVSESVNVARRHLAGRIDRVDCSLDECHEITEATREQVTIIHGDLSAFQKEMETVHLVVRSLEAKLGRLAYTQDRTTRGIYDLCEFTKRLDQSPKAETHQVTSSTPRPAIESSERIARAGSLPPALEPESPRIEAPKVVRSSTIMSASGLSLLAGTTTPPKRGRLGARGFHMSGV

SEQ ID NO: 187397 - protein, 124 aa, Zea Mays
MAEVEQPQDAVKLFNRWTFDDVQVNDISLNDYLAVTAAKHATFLPHSAGRYSKKRFRKAQCAIVERLTNSLMMHGRNNGKKVMAVRIMKHTLEIIHLLTDANPIQVVVDAIINSSKLCAMRCQL

SEQ ID NO: 187398 - protein, 637 aa, Zea Mays
MSIDFLTDIVEDAHKPSVAAIDGIALGGGLEVAMVCHARISTPSAQLGLPELQLGIIPGMGGTQRLPRLVGLPKALEMMLTSKTIKGKMAHELGLVDAVTSANKLVNTACSWALEIFEKKKPWFKSLHRTDRLPDLEEVKDILKFARVQAEMKAANVQHPIVCIDVIKEGIISGPRAGLMKEVLSGKMLEQSQTSKSLRHFFFAQRATSKIPNITNIGLTARKIKKAAIVGGGLMGSGIATILILNNFNVVLKEVNEQFLSAGINRIKVNLQSLVRKGQLTEEDYEKKLSLLCGALDYEQFRDTDVVIEAVIEDMVLKQQIFSDLEKYCHHNCIFATNTSTIDLNIIGQKTASQDRIVGAHFFSPAHVMSLLEIVCTHHTSSQVIVDLIDLAKKIQKTPIVVGNCTGFAVNRMFFPYAQAASFLVDYGLDVYHIDHVITQFGMPMGPFRLADLVGFGVAIATRKQYYQSYPERSYKSMLLQILVEDNRTGESSCKGFYVYDDKRKASRDPDFGKYIEKSRNMAGVMQDPKLMKLTDNDIVEMIFFPVVNEACRVLDEGIALKASDLDVASIMGMGFPSYRGGVMFWADSLGAKYVYDKLDAWSKDYGEFFRPCEYLAVRARQGASLAAKVDGVKSRL

SEQ ID NO: 187399 - protein, 463 aa, Zea Mays
MARGITTMEVRADGVAVITIINPPVNALSLDVIASLQRNYAEALSRNDIKAIVLTGSKGRFCGGFDIAAFENKPKNEKPGSMSIDFLTDIVEDAHKPSVAAIDGIALGGGLEVAMVCHARISTPSAQLGLPELQLGIIPGMGGTQRLPRLVGLPKALEMMLTSKTIKGKMAHELGLVDAVTSANKLVNTACSWALEIFEKKKPWFKSLHRTDRLPDLEEVKDILKFARVQAEMKAANVQHPIVCIDVIKEGIISGPRAGLMKEVLSGKMLEQSQTSKSLRHFFFAQRATSKIPNITNIGLTARKIKKAAIVGGGLMGSGIATILILNNFNVVLKEVNEQFLSAGINRIKVNLQSLVRKGQLTEEDYEKKLSLLCGALDYEQFRDTDVVIEAVIEDMVLKQQIFSDLEKYCHHNCIFATNTSTIDLNIIGQKTASQDRIVGAHFFRFRCQPDVLSLRSGSFFSC

SEQ ID NO: 187400 - protein, 615 aa, Zea Mays
MHARRSRCRRWRGASPPWRCAPTAWPSSPSSTRPSTPSRSTVCHARISTPSAQLGLPELQLGIIPGMGGTQRLPRLVGLPKALEMMLTSKTIKGKMAHELGLVDAVTSANKLVNTACSWALEIFEKKKPWFKSLHRTDRLPDLEEVKDILKFARVQAEMKAANVQHPIVCIDVIKEGIISGPRAGLMKIPNITNIGLTARKIKKAAIVGGGLMGSGIATILILNNFNVVLKEVNEQFLSAGINRIKVNLQSLVRKGQLTEEDYEKKLSLLCGALDYEQFRDTDVVIEAVIEDMVLKQQIFSDLEKYCHHNCIFATNTSTIDLNIIGQKTASQDRIVGAHFFSPAHVMSLLEIVCTHHTSSQVIVDLIDLAKKIQKTPIVVGNCTGFAVNRMFFPYAQAASFLVDYGLDVYHIDHVITQFGMPMGPFRLADLVGFGVAIATRKQYYQSYPERSYKSMLLQILVEDNRTGESSCKGFYVYDDKRKASRDPDFGKYIEKSRNMAGVMQDPKLMKLTDNDIVEMIFFPVVNEACRVLDEGIALKASDLDVASIMGMGFPSYRGGVMFWADSLGAKYVYDKLDAWSKDYGEFFRPCEYLAVRARQGASLAAKVDGVKSRL

SEQ ID NO: 187401 - protein, 578 aa, Zea Mays
MGGTQRLPRLVGLPKALEMMLTSKTIKGKMAHELGLVDAVTSANKLVNTACSWALEIFEKKKPWFKSLHRTDRLPDLEEVKDILKFARVQAEMKAANVQHPIVCIDVIKEGIISGPRAGLMKEVLSGKMLEQSQTSKSLRHFFFAQRATSKIPNITNIGLTARKIKKAAIVGGGLMGSGIATILILNNFNVVLKEVNEQFLSAGINRIKVNLQSLVRKGQLTEEDYEKKLSLLCGALDYEQFRDTDVVIEAVIEDMVLKQQIFSDLEKYCHHNCIFATNTSTIDLNIIGQKTASQDRIVGAHFFSPAHVMSLLEIVCTHHTSSQVIVDLIDLAKKIQKTPIVVGNCTGFAVNRMFFPYAQAASFLVDYGLDVYHIDHVITQFGMPMGPFRLADLVGFGVAIATRKQYYQSYPERSYKSMLLQILVEDNRTGESSCKGFYVYDDKRKASRDPDFGKYIEKSRNMAGVMQDPKLMKLTDNDIVEMIFFPVVNEACRVLDEGIALKASDLDVASIMGMGFPSYRGGVMFWADSLGAKYVYDKLDAWSKDYGEFFRPCEYLAVRARQGASLAAKVDGVKSRL

SEQ ID NO: 187402 - protein, 468 aa, Zea Mays
MARGITTMEVRADGVAVITIINPPVNALSLDVIASLQRNYAEALSRNDIKAIVLTGSKGRFCGGFDIAAFENKPKNEKPGSMSIDFLTDIVEDAHKPSVAAIDGIALGGGLEVAMVCHARISTPSAQLGLPELQLGIIPGMGGTQRLPRLVGLPKALEMMLTSKTIKGKMAHELGLVDAVTSANKLVNTACSWALEIFEKKKPWFKSLHRTDRLPDLEEVKDILKFARVQAEMKAANVQHPIVCIDVIKEGIISGPRAGLMKEVLSGKMLEQSQTSKSLRHFFFAQRATSKIPNITNIGLTARKIKKAAIVGGGLMGSGIATILILNNFNVVLKEVNEQFLSAGINRIKVNLQSLVRKGQLTEEDYEKKLSLLCGALDYEQFRDTDVVIEAVIEDMVLKQQIFSDLEKYCHHNCIFATNTSTIDLNIIGQKTASQDRIVGAHFFSSCHVTVGNSLYSSYFLSSYCGPD

SEQ ID NO: 187403 - protein, 671 aa, Zea Mays
MARGITTMEVRADGVAVITIINPPVNALSLDVIASLQRNYAEALSRNDIKAIVLTGSKGRFCGGFDIAAFENKPNAHKPSVAAIDGIALGGGLEVAMVCHARISTPSAQLGLPELQLGIIPGMGGTQRLPRLVGLPKALEMMLTSKTIKGKMAHELGLVDAVTSANKLVNTACSWALEIFEKKKPWFKSLHRTDRLPDLEEVKDILKFARVQAEMKAANVQHPIVCIDVIKEGIISGPRAGLMKIPNITNIGLTARKIKKAAIVGGGLMGSGIATILILNNFNVVLKEVNEQFLSAGINRIKVNLQSLVRKGQLTEEDYEKKLSLLCGALDYEQFRDTDVVIEAVIEDMVLKQQIFSDLEKYCHHNCIFATNTSTIDLNIIGQKTASQDRIVGAHFFSPAHVMSLLEIVCTHHTSSQVIVDLIDLAKKIQKTPIVVGNCTGFAVNRMFFPYAQAASFLVDYGLDVYHIDHVITQFGMPMGPFRLADLVGFGVAIATRKQYYQSYPERSYKSMLLQILVEDNRTGESSCKGFYVYDDKRKASRDPDFGKYIEKSRNMAGVMQDPKLMKLTDNDIVEMIFFPVVNEACRVLDEGIALKASDLDVASIMGMGFPSYRGGVMFWADSLGAKYVYDKLDAWSKDYGEFFRPCEYLAVRARQGASLAAKVDGVKSRL

SEQ ID NO: 187404 - protein, 689 aa, Zea Mays
MARGITTMEVRADGVAVITIINPPVNALSLDVIASLQRNYAEALSRNDIKAIVLTGSKGRFCGGFDIAAFENKPKNEKPGSMSIDFLTDIVEDAHKPSVAAIDGIALGGGLEVAMVCHARISTPSAQLGLPELQLGIIPGMGGTQRLPRLVGLPKALEMMLTSKTIKGKMAHELGLVDAVTSANKLVNTACSWALEIFEKKKPWFKSLHRTDRLPDLEEVKDILKFARVQAEMKAANVQHPIVCIDVIKEGIISGPRAGLMKIPNITNIGLTARKIKKAAIVGGGLMGSGIATILILNNFNVVLKEVNEQFLSAGINRIKVNLQSLVRKGQLTEEDYEKKLSLLCGALDYEQFRDTDVVIEAVIEDMVLKQQIFSDLEKYCHHNCIFATNTSTIDLNIIGQKTASQDRIVGAHFFSPAHVMSLLEIVCTHHTSSQVIVDLIDLAKKIQKTPIVVGNCTGFAVNRMFFPYAQAASFLVDYGLDVYHIDHVITQFGMPMGPFRLADLVGFGVAIATRKQYYQSYPERSYKSMLLQILVEDNRTGESSCKGFYVYDDKRKASRDPDFGKYIEKSRNMAGVMQDPKLMKLTDNDIVEMIFFPVVNEACRVLDEGIALKASDLDVASIMGMGFPSYRGGVMFWADSLGAKYVYDKLDAWSKDYGEFFRPCEYLAVRARQGASLAAKVDGVKSRL

SEQ ID NO: 187405 - protein, 79 aa, Zea Mays
MSLAARRVQNPATRRDSSNDDLVFPPYLVRRSGRNKAPKRQLTRQIYDDHLPRKCQAVGKKIKAATGKQQDKMRVKRHG

SEQ ID NO: 187406 - protein, 70 aa, Zea Mays
MSLAARRVQNPATRRDSSNDDLVFPPYLVRRSGRNKAPKRQLTRQIYDDHLPRKCQAVGKKIKAATGKQQ

SEQ ID NO: 187407 - protein, 658 aa, Zea Mays
MIIVNRAANAAWHMGEWDHMADYVSRLDDADENKLRMLGNATASGDGSSNGAFFRAVLLVRYKKYDDARMYVERARRCLATELAALVLESYERAYNNMVRVQQLSELEEVIDYCTLPMESPIADGRRELIRNMWNERIKGTKRNVEVWQALLAVRELVLPPNEDRDTWIKFAELCWKNGRISQARSTLVKLLQFDPESSPELTLYHAHPQVALAYLKYQYAVGDELKRRDAFSKLQELSVQVATTMGNLPGTSANHGTMSNAGVPLIARVYLTLGSWKKALSPALDDDSIQEILISYHNATLSAKDWGKAWHIWALFNTEVMSRYTFRGRPDIAGKYVVAAVTGYFYSIACASTTKGVDDSLQLYFDQRKNNSAGEGKTALPDILRLLTLWFNHGDTSEVQTALQKGFSLVKIEMWLVVLPQIIARIHSNNRVVRELIQSLLVRIGKGHPQALMYPLLVACKSISILRQRAAQEVVDKIRQHSGGLVDQAQLVSKELIRVAILWHEMWHEALEEASRMYFGEHNIEGMLAVLEPLHAMLERGDETIKENAFIQAYGHELLEAHECCLKYRATGEDAELTKAWDLYYHVFRRIDKQLPSLTTLDLHSVSPELLKCRKLELAVPGTYAADSPLVTIEYFVPQLICYNVQTKAKKADNSWK

SEQ ID NO: 187408 - protein, 1040 aa, Zea Mays
MRCLAALARWEDLSALCREQWTGAEPSARLEMAPMAANAAWHMGEWDHMADYVSRLDDADENKLRMLGNATASGDGSSNGAFFRAVLLVRYKKYDDARMYVERARRCLATELAALVLESYERAYNNMVRVQQLSELEEVIDYCTLPMESPIADGRRELIRNMWNERIKGTKRNVEVWQALLAVRELVLPPNEDRDTWIKFAELCWKNGRISQARSTLVKLLQFDPESSPELTLYHAHPQVALAYLKYQYAVGDELKRRDAFSKLQELSVQVATTMGNLPGTSANHGTMSNAGVPLIARVYLTLGSWKKALSPALDDDSIQEILISYHNATLSAKDWGKAWHIWALFNTEVMSRYTFRGRPDIAGKYVVAAVTGYFYSIACASTTKGVDDSLQLYFDQRKNNSAGEGKTALPDILRLLTLWFNHGDTSEVQTALQKGFSLVKIEMWLVVLPQIIARIHSNNRVVRELIQSLLVRIGKGHPQALMYPLLVACKSISILRQRAAQEVVDKIRQHSGGLVDQAQLVSKELIRVAILWHEMWHEALEEASRMYFGEHNIEGMLAVLEPLHAMLERGDETIKENAFIQAYGHELLEAHECCLKYRATGEDAELTKAWDLYYHVFRRIDKQLPSLTTLDLHSVSPELLKCRKLELAVPGTYAAGHEDLRQDERVMQLFGLVNTLLENSRKTSEKDLSIQRYAVIPLSPNSGLIGWVPNCDTLHALIREYRDARKIFLNQEHRLMLAFAPDYDHLPLIAKVEVFQHALQNTEGNDLAKVLWLKSRTSEVWLERRTNYARSLAVMSMVGYLLGLGDRHPSNLMLDRYSGKILHIDFGDCFEASMNREKFPEKVPFRLTRMLVKAMEVSGIEGTFRTTCENVMQVLRTNRDSVMAMMEAFVHDPLINWRLFNFNEVPQVSNYGNVHAHTVVSSEEAVANRELMQPQRGARERELLQAVNQLGDANEVLNERAVAVMARMSDKLTGRDFSSGSALAGAGSSIQHGSEHLASGDARDAQPGLSVKVQVQKLILQATSHENLCQNYVGWCPFW

SEQ ID NO: 187409 - protein, 626 aa, Zea Mays
MGEWDHMADYVSRLDDADENKLRMLGNATASGDGSSNGAFFRAVLLVRYKKYDDARMYVERARRCLATELAALVLESYERAYNNMVRVQQLSELEEVIDYCTLPMESPIADGRRELIRNMWNERIKGTKRNVEVWQALLAVRELVLPPNEDRDTWIKFAELCWKNGRISQARSTLVKLLQFDPESSPELTLYHAHPQVALAYLKYQYAVGDELKRRDAFSKLQELSVQVATTMGNLPGTSANHGTMSNAGVPLIARVYLTLGSWKKALSPALDDDSIQEILISYHNATLSAKDWGKAWHIWALFNTEVMSRYTFRGRPDIAGKYVVAAVTGYFYSIACASTTKGVDDSLQDILRLLTLWFNHGDTSEVQTALQKGFSLVKIEMWLVVLPQIIARIHSNNRVVRELIQSLLVRIGKGHPQALMYPLLVACKSISILRQRAAQEVVDKIRQHSGGLVDQAQLVSKELIRVAILWHEMWHEALEEASRMYFGEHNIEGMLAVLEPLHAMLERGDETIKENAFIQAYGHELLEAHECCLKYRATGEDAELTKAWDLYYHVFRRIDKQLPSLTTLDLHSVSPELLKCRKLELAVPGTYAADSPLVTIEYFVPQLICYNVQTKAKKADNSWK

SEQ ID NO: 187410 - protein, 687 aa, Zea Mays
MRCLAALARWEDLSALCREQWTGAEPSARLEMAPMAANAAWHMGEWDHMADYVSRLDDADENKLRMLGNATASGDGSSNGAFFRAVLLVRYKKYDDARMYVERARRCLATELAALVLESYERAYNNMVRVQQLSELEEVIDYCTLPMESPIADGRRELIRNMWNERIKGTKRNVEVWQALLAVRELVLPPNEDRDTWIKFAELCWKNGRISQARSTLVKLLQFDPESSPELTLYHAHPQVALAYLKYQYAVGDELKRRDAFSKLQELSVQVATTMGNLPGTSANHGTMSNAGVPLIARVYLTLGSWKKALSPALDDDSIQEILISYHNATLSAKDWGKAWHIWALFNTEVMSRYTFRGRPDIAGKYVVAAVTGYFYSIACASTTKGVDDSLQLYFDQRKNNSAGEGKTALPDILRLLTLWFNHGDTSEVQTALQKGFSLVKIEMWLVVLPQIIARIHSNNRVVRELIQSLLVRIGKGHPQALMYPLLVACKSISILRQRAAQEVVDKIRQHSGGLVDQAQLVSKELIRVAILWHEMWHEALEEASRMYFGEHNIEGMLAVLEPLHAMLERGDETIKENAFIQAYGHELLEAHECCLKYRATGEDAELTKAWDLYYHVFRRIDKQLPSLTTLDLHSVSPELLKCRKLELAVPGTYAADSPLVTIEYFVPQLICYNVQTKAKKADNSWK

SEQ ID NO: 187411 - protein, 962 aa, Zea Mays
MTYLPLLENPPSAAKNIQSEIASSLGRTHANPAEGGNGLKSWTNNDDLRKDAAEALCCLAHALGEDFTIFIPSIRKILVKHHLRYRKWDEIENRLLRRELLITENLSVQKYTQCPPDVIRDPLDDCDGTPSEIADDTQRQARSHQVNDVRLRSAGEASQRSTREDWAEWMRHFSIALLKESPSPALRTCARLAQLQAEFMEHDEKPLPIDTRLLGALAEKCRAFAKALHYKEMEFEAVCTKKMGANPVTVVESLIHINNQLQQHEAAIGILTYSQQNSEVQLKESWYEKLHRWDEALKAYTVKSSQTSGPFTKLGCYIRSNEVSSSFGSAANAAWHMGEWDHMADYVSRLDDADENKLRMLGNATASGDGSSNGAFFRAVLLVRYKKYDDARMYVERARRCLATELAALVLESYERAYNNMVRVQQLSELEEVIDYCTLPMESPIADGRRELIRNMWNERIKGTKRNVEVWQALLAVRELVLPPNEDRDTWIKFAELCWKNGRISQARSTLVKLLQFDPESSPELTLYHAHPQVALAYLKYQYAVGDELKRRDAFSKLQELSVQVATTMGNLPGTSANHGTMSNAGVPLIARVYLTLGSWKKALSPALDDDSIQEILISYHNATLSAKDWGKAWHIWALFNTEVMSRYTFRGRPDIAGKYVVAAVTGYFYSIACASTTKGVDDSLQDILRLLTLWFNHGDTSEVQTALQKGFSLVKIEMWLVVLPQIIARIHSNNRVVRELIQSLLVRIGKGHPQALMYPLLVACKSISILRQRAAQEVVDKIRQHSGGLVDQAQLVSKELIRVAILWHEMWHEALEEASRMYFGEHNIEGMLAVLEPLHAMLERGDETIKENAFIQAYGHELLEAHECCLKYRATGEDAELTKAWDLYYHVFRRIDKQLPSLTTLDLHSVSPELLKCRKLELAVPGTYAADSPLVTIEYFVPQLICYNVQTKAKKADNSWK

SEQ ID NO: 187412 - protein, 1315 aa, Zea Mays
MTYLPLLENPPSAAKNIQSEIASSLGRTHANPAEGGNGLKSWTNNDDLRKDAAEALCCLAHALGEDFTIFIPSIRKILVKHHLRYRKWDEIENRLLRRELLITENLSVQKYTQCPPDVIRDPLDDCDGTPSEIADDTQRQARSHQVNDVRLRSAGEASQRSTREDWAEWMRHFSIALLKESPSPALRTCARLAQLQAEFMEHDEKPLPIDTRLLGALAEKCRAFAKALHYKEMEFEAVCTKKMGANPVTVVESLIHINNQLQQHEAAIGILTYSQQNSEVQLKESWYEKLHRWDEALKAYTVKSSQTSGPFTKLGCYIRSNEVSSSFGSAANAAWHMGEWDHMADYVSRLDDADENKLRMLGNATASGDGSSNGAFFRAVLLVRYKKYDDARMYVERARRCLATELAALVLESYERAYNNMVRVQQLSELEEVIDYCTLPMESPIADGRRELIRNMWNERIKGTKRNVEVWQALLAVRELVLPPNEDRDTWIKFAELCWKNGRISQARSTLVKLLQFDPESSPELTLYHAHPQVALAYLKYQYAVGDELKRRDAFSKLQELSVQVATTMGNLPGTSANHGTMSNAGVPLIARVYLTLGSWKKALSPALDDDSIQEILISYHNATLSAKDWGKAWHIWALFNTEVMSRYTFRGRPDIAGKYVVAAVTGYFYSIACASTTKGVDDSLQDILRLLTLWFNHGDTSEVQTALQKGFSLVKIEMWLVVLPQIIARIHSNNRVVRELIQSLLVRIGKGHPQALMYPLLVACKSISILRQRAAQEVVDKIRQHSGGLVDQAQLVSKELIRVAILWHEMWHEALEEASRMYFGEHNIEGMLAVLEPLHAMLERGDETIKENAFIQAYGHELLEAHECCLKYRATGEDAELTKAWDLYYHVFRRIDKQLPSLTTLDLHSVSPELLKCRKLELAVPGTYAAGHEDLRQDERVMQLFGLVNTLLENSRKTSEKDLSIQRYAVIPLSPNSGLIGWVPNCDTLHALIREYRDARKIFLNQEHRLMLAFAPDYDHLPLIAKVEVFQHALQNTEGNDLAKVLWLKSRTSEVWLERRTNYARSLAVMSMVGYLLGLGDRHPSNLMLDRYSGKILHIDFGDCFEASMNREKFPEKVPFRLTRMLVKAMEVSGIEGTFRTTCENVMQVLRTNRDSVMAMMEAFVHDPLINWRLFNFNEVPQVSNYGNVHAHTVVSSEEAVANRELMQPQRGARERELLQAVNQLGDANEVLNERAVAVMARMSDKLTGRDFSSGSALAGAGSSIQHGSEHLASGDARDAQPGLSVKVQVQKLILQATSHENLCQNYVGWCPFW

SEQ ID NO: 187413 - protein, 1116 aa, Zea Mays
MEHDEKPLPIDTRLLGALAEKCRAFAKALHYKEMEFEAVCTKKMGANPVTVVESLIHINNQLQQHEAAIGILTYSQQNSEVQLKESWYEKLHRWDEALKAYTVKSSQTSGPFTKLGCYIRSNEVSSSFGSAANAAWHMGEWDHMADYVSRLDDADENKLRMLGNATASGDGSSNGAFFRAVLLVRYKKYDDARMYVERARRCLATELAALVLESYERAYNNMVRVQQLSELEEVIDYCTLPMESPIADGRRELIRNMWNERIKGTKRNVEVWQALLAVRELVLPPNEDRDTWIKFAELCWKNGRISQARSTLVKLLQFDPESSPELTLYHAHPQVALAYLKYQYAVGDELKRRDAFSKLQELSVQVATTMGNLPGTSANHGTMSNAGVPLIARVYLTLGSWKKALSPALDDDSIQEILISYHNATLSAKDWGKAWHIWALFNTEVMSRYTFRGRPDIAGKYVVAAVTGYFYSIACASTTKGVDDSLQDILRLLTLWFNHGDTSEVQTALQKGFSLVKIEMWLVVLPQIIARIHSNNRVVRELIQSLLVRIGKGHPQALMYPLLVACKSISILRQRAAQEVVDKIRQHSGGLVDQAQLVSKELIRVAILWHEMWHEALEEASRMYFGEHNIEGMLAVLEPLHAMLERGDETIKENAFIQAYGHELLEAHECCLKYRATGEDAELTKAWDLYYHVFRRIDKQLPSLTTLDLHSVSPELLKCRKLELAVPGTYAAGHEDLRQDERVMQLFGLVNTLLENSRKTSEKDLSIQRYAVIPLSPNSGLIGWVPNCDTLHALIREYRDARKIFLNQEHRLMLAFAPDYDHLPLIAKVEVFQHALQNTEGNDLAKVLWLKSRTSEVWLERRTNYARSLAVMSMVGYLLGLGDRHPSNLMLDRYSGKILHIDFGDCFEASMNREKFPEKVPFRLTRMLVKAMEVSGIEGTFRTTCENVMQVLRTNRDSVMAMMEAFVHDPLINWRLFNFNEVPQVSNYGNVHAHTVVSSEEAVANRELMQPQRGARERELLQAVNQLGDANEVLNERAVAVMARMSDKLTGRDFSSGSALAGAGSSIQHGSEHLASGDARDAQPGLSVKVQVQKLILQATSHENLCQNYVGWCPFW

SEQ ID NO: 187414 - protein, 725 aa, Zea Mays
MDSKCREESARLLGCLIRSCARLILPYIAPVHKALVTRLCEGTGPNANNALAAGVLATVGELAKVGGFAMRQYLPELMPVVVDSLLDGGAVSKREVAVSTLGQIIQSTGYVIAPYNEYPPLLGLLLKLLNGELEWSTRLEVLKVLGIMGALDPHAHKRNQHNLPGQHREVLRPTIETAQHIVSMEELPTDYWPSFSASEDYYSTVAISSLMRILRDPSLSSYHQMVVGSLIFIFKSMGLGCVPYLPKVLPDLFRAVRMCEDGALKEFITWKLGTLISIVRQHIRKYLQDILSLISELWTSSFSLAAPNRTIQGPQGSPVLHLVEQLCLALNDEFRMYLLHILPSCIQVLGDAERCNDYYYVPDILHTLEVFGGNLDEHMHLVAPVLVRLFKVELVDIRRRAIVTLTNLIPKVQVGTHVSALVHHLKLVLDGNNDDLRKDAAEALCCLAHALGEDFTIFIPSIRKILVKHHLRYRKWDEIENRLLRRELLITENLSVQKYTQCPPDVIRDPLDDCDGTPSEIADDTQRQARSHQVNDVRLRSAGEASQRSTREDWAEWMRHFSIALLKESPSPALRTCARLAQLQAEFMEHDEKPLPIDTRLLGALAEKCRAFAKALHYKEMEFEAVCTKKMGANPVTVVESLIHINNQLQQHEAAIGILTYSQQNSEVQLKESWYEKLHRWDEALKAYTVKSSQTSGPFTKLGCYIRSNEVSSSFGSVGRFKCIV

SEQ ID NO: 187415 - protein, 1094 aa, Zea Mays
MEHDEKPLPIDTRLLGALAEKCRAFAKALHYKEMEFEAVCTKKMGANPVTVVESLIHINNQLQQHEAAIGILTYSQQNSEVQLKESWYEKLHRWDEALKAYTVKSSQTSGPFTKLGCYIRSNEVSSSFGSAANAAWHMGEWDHMADYVSRLDDADENKLRMLGNATASGDGSSNGAFFRAVLLVRYKKYDDARMYVERARRCLATELAALVLESYERAYNNMVRVQQLSELEEVIDYCTLPMESPIADGRRELIRNMWNERIKGTKRNVEVWQALLAVRELVLPPNEDRDTWIKFAELCWKNGRISQARSTLVKLLQFDPESSPELTLYHAHPQVALAYLKYQYAVGDELKRRDAFSKLQELSVQVATTMGNLPGTSANHGTMSNAGVPLIARVYLTLGSWKKALSPALDDDSIQEILISYHNATLSAKDWGKAWHIWALFNTEVMSRYTFRGRPDIAGKYVVAAVTGYFYSIACASTTKGVDDSLQLYFDQRKNNSAGEGKTALPDILRLLTLWFNHGDTSEVQTALQKGFSLVKIEMWLVVLPQIIARIHSNNRVVRELIQSLLVRIGKGHPQALMYPLLVACKSISILRQRAAQEVVDKIRQHSGGLVDQAQLVSKELIRVAILWHEMWHEALEEASRMYFGEHNIEGMLAVLEPLHAMLERGDETIKENAFIQAYGHELLEAHECCLKYRATGEDAELTKAWDLYYHVFRRIDKQLPSLTTLDLHSVSPELLKCRKLELAVPGTYAAGHEDLRQDERVMQLFGLVNTLLENSRKTSEKDLSIQRYAVIPLSPNSGLIGWVPNCDTLHALIREYRDARKIFLNQEHRLMLAFAPDYDHLPLIAKVEVFQHALQNTEGNDLAKVLWLKSRTSEVWLERRTNYARSLAVMSMVGYLLGLGDRHPSNLMLDRYSGKILHIDFGDCFEASMNREKFPEKVPFRLTRMLVKAMEVSGIEGTFRTTCENVMQVLRTNRDSVMAMMEAFVHDPLINWRLFNFNEVPQVSNYGNVHAHTVVSSEEAVANRELMQPQRGARERELLQAVNQLGDANEVLNERAVAVMARMSDKLTGRDFSSGSALAGAGGVRSGELSWKQ

SEQ ID NO: 187416 - protein, 1264 aa, Zea Mays
MKPSPHFPEIGKKPKDLIAKDHTFNIAAYISSGADVIAAALRKHVEEEARDLSGEAFLRFMDQLYEQISSLLQSNDVNENLLALRAIDALIDMPFGEGASKVSKFASFLRNVFEVKRDPEILVPASEVLGHLAKAGGAMTADEVERQIKTALGWLTGERVEYRRFAAVLILKEMAENASTVFNVHVPEFVDAIWVALRDPKQAVREKAVEALRACLHVIEKRETRWRVQWYYRMCEAAQVGLGRNASVHSIHGSLLAVGELLRNTGEFMMSRYREVADIVLDYLKHRDQLVRRSITSLLPRIAHFLRDRFVTNYLKICMDHILFVLRTPDERASGFVALGEMAGALGVELVPYLPAITSHLQDAIAPRRGRPSLEAISCVGSFAKAMGPAMEPHIRSGLLDAMFFAGLSDKLIDALESISTSIPSLLPTIQERLLDCISQALPKSSIRPGASVGRASRSNNLQQFVDSNSPVLVQLALWTLANFNFKGHELLEFARESVILYLEDEDSSTRKAASLCCCKLVAHSLSASSASQFGSNRTNRIGGAKRRRLVEEIVEKLLMAAVADADVGVRSSVFKALYRNPAFDDFLAQADILTSIFVALNDEEYDVRELAISVAGRLSEKNPAYVLPALRRYLIQLLTYLDQSMDSKCREESARLLGCLIRSCARLILPYIAPVHKALVTRLCEGTGPNANNALAAGVLATVGELAKVGGFAMRQYLPELMPVVVDSLLDGGAVSKREVAVSTLGQIIQSTGYVIAPYNEYPPLLGLLLKLLNGELEWSTRLEVLKVLGIMGALDPHAHKRNQHNLPGQHREVLRPTIETAQHIVSMEELPTDYWPSFSASEDYYSTVAISSLMRILRDPSLSSYHQMVVGSLIFIFKSMGLGCVPYLPKDGALKEFITWKLGTLISIVRQHIRKYLQDILSLISELWTSSFSLAAPNRTIQGPQGSPVLHLVEQLCLALNDEFRMYLLHILPSCIQVLGDAERCNDYYYVPDILHTLEVFGGNLDEHMHLVAPVLVRLFKVELVDIRRRAIVTLTNLIPKVQVGTHVSALVHHLKLVLDGNNDDLRKDAAEALCCLAHALGEDFTIFIPSIRKILVKHHLRYRKWDEIENRLLRRELLITENLSVQKYTQCPPDVIRDPLDDCDGTPSEIADDTQRQARSHQVNDVRLRSAGEASQRSTREDWAEWMRHFSIALLKESPSPALRTCARLAQLQPSVGRELFAAGFASCWAQMSESSQEQLVRSLKTAFSSQTFLLKFLPRC

SEQ ID NO: 187417 - protein, 720 aa, Zea Mays
MKPSPHFPEIGKKPKDLIAKDHTFNIAAYISSGADVIAAALRKHVEEEARDLSGEAFLRFMDQLYEQISSLLQSNDVNENLLALRAIDALIDMPFGEGASKVSKFASFLRNVFEVKRDPEILVPASEVLGHLAKAGGAMTADEVERQIKTALGWLTGERVEYRRFAAVLILKEMAENASTVFNVHVPEFVDAIWVALRDPKQAVREKAVEALRACLHVIEKRETRWRVQWYYRMCEAAQVGLGRNASVHSIHGSLLAVGELLRNTGEFMMSRYREVADIVLDYLKHRDQLVRRSITSLLPRIAHFLRDRFVTNYLKICMDHILFVLRTPDERASGFVALGEMAGALGVELVPYLPAITSHLQDAIAPRRGRPSLEAISCVGSFAKAMGPAMEPHIRSGLLDAMFFAGLSDKLIDALESISTSIPSLLPTIQERLLDCISQALPKSSIRPGASVGRASRSNNLQQFVDSNSPVLVQLALWTLANFNFKGHELLEFARESVILYLEDEDSSTRKAASLCCCKLVAHSLSASSASQFGSNRTNRIGGAKRRRLVEEIVEKLLMAAVADADVGVRSSVFKALYRNPAFDDFLAQADILTSIFVALNDEEYDVRELAISVAGRLSEKNPAYVLPALRRYLIQLLTYLDQSMDSKCREESARLLGCLIRSCARLILPYIAPVHKALVTRLCEGTGPNANNALAAGVLATVGELAKVGWLCYEAISS

SEQ ID NO: 187418 - protein, 98 aa, Zea Mays
MTASLTSRSCPTWPHAPLCTTSSGAAAVWTRCRAAAPRYPSSSRGTTWSSPTSATLRLFWAPHPTTTPSRRPIHRPPEAQPAIGVAHLVVQRPGVLPR

SEQ ID NO: 187419 - protein, 117 aa, Zea Mays
MSDRRPRPIRRCRAPPRPCSAQAELRPSVWPQVVFATFLSSPNNTMGQKLSYVAACAAVYDKLRRSCRLDAVQSGCTTLSIIKQGDHMVVANVSDSKVVLGTASDDDAITPSNSSST

SEQ ID NO: 187420 - protein, 78 aa, Zea Mays
MRALLIVGNLLCPIIAHVFCNMMGLPVFSSPRTKGAALVAFLAGSIAFFWLLFPATSPELYNSSFDRCSCWHGFCNWK

SEQ ID NO: 187421 - protein, 140 aa, Zea Mays
MIPLLLCGGFKMSTIIFLSPIFFSLAHLNHFFELHQQGCNFMRALLIVGVQLGYTVIFGWYATFLLIRTGNLLCPIIAHVFCNMMGLPVFSSPRTKGAALVAFLAGSIAFFWLLFPATSPELYNSSFDRCSCWHGFCNWK

SEQ ID NO: 187422 - protein, 227 aa, Zea Mays
MFAVFGIRKDHLIQAVAIPLLLTSLVYAGSFVARVWLLVSSWGGGDEVEIGCAQRLAQWIQAAVADVMVWRNYVVAPFTEELVFRACMIPLLLCGGFKMSTIIFLSPIFFSLAHLNHFFELHQQGCNFMRALLIVGVQLGYTVIFGWYATFLLIRTGNLLCPIIAHVFCNMMGLPVFSSPRTKGAALVAFLAGSIAFFWLLFPATSPELYNSSFDRCSCWHGFCNWK

SEQ ID NO: 187423 - protein, 290 aa, Zea Mays
MATPAGLLLASPPVISGVAAMAACAAMAVFYVAVLYAPTVILRFPPPTSLRTFLHRRFACAAVASAASVLATASLLRVWSLSDFADMFAVFGIRKDHLIQAVAIPLLLTSLVYAGSFVARVWLLVSSWGGGDEVEIGCAQRLAQWIQAAVADVMVWRNYVVAPFTEELVFRACMIPLLLCGGFKMSTIIFLSPIFFSLGVQLGYTVIFGWYATFLLIRTGNLLCPIIAHVFCNMMGLPVFSSPRTKGAALVAFLAGSIAFFWLLFPATSPELYNSSFDRCSCWHGFCNWK

SEQ ID NO: 187424 - protein, 269 aa, Zea Mays
MATPAGLLLASPPVISGVAAMAACAAMAVFYVAVLYAPTVILRFPPPTSLRTFLHRRFACAAVASAASVLATASLLRVWSLSDFADMFAVFGIRKDHLIQAVAIPLLLTSLVYAGSFVARVWLLVSSWGGGDEVEIGCAQRLAQWIQAAVADVMVWRNYVVAPFTEELVFRACMIPLLLCGGFKMSTIIFLSPIFFSLGNLLCPIIAHVFCNMMGLPVFSSPRTKGAALVAFLAGSIAFFWLLFPATSPELYNSSFDRCSCWHGFCNWK

SEQ ID NO: 187425 - protein, 223 aa, Zea Mays
MATPAGLLLASPPVISGVAAMAACAAMAVFYVAVLYAPTVILRFPPPTSLRTFLHRRFACAAVASAASVLATASLLRVWSLSDFADMFAVFGIRKDHLIQAVAIPLLLTSLVYAGSFVARVWLLVSSWGGGDEVEIGCAQRLAQWIQAAVADVMVWRNYVVAPFTEELVFRACMIPLLLCGGFKMSTIIFLSPIFFSLAHLNHFFELHQQGCNFMRALLIVSS

SEQ ID NO: 187426 - protein, 216 aa, Zea Mays
MATPAGLLLASPPVISGVAAMAACAAMAVFYVAVLYAPTVILRFPPPTSLRTFLHRRFACAAVASAASVLATASLLRVWSLSDFADMFAVFGIRKDHLIQAVAIPLLLTSLVYAGSFVARVWLLVSSWGGGDEVEIGCAQRLAQWIQAAVADVMVWRNYVVAPFTEELVFRACMIPLLLCGGFKMSTIIFLSPIFFSLGTNFACIILSFSCMPARL

SEQ ID NO: 187427 - protein, 340 aa, Zea Mays
MAGDVATSPAPAPLSVSSSSQNHHHHGPTTARGLLCHAGAGASAGVVAATFVCPLDVIKTRFQVHGWPKLATGTIGGSVIIGSLQQIAQQEGFRGMYRGLSPTILALLPNWAVYFTVYEQLKSFLSSNDGSHQLSLGANVVAASCAGAATTIVTNPLWVVKTRFQTQGIRAGPIPYKGTLAALRRIAHEEGIRGLYSGLVPALAGISHVAIQFPVYEKIKAYLAERDNTTVEALSFGDVAVASSLAKVAASTLTYPHEVVRSRLQDQRANSDARYKGVIDCVRKVYHKEGVAGFYRGCATNLLRTTPAAVITFTSFEMIHRSLLDLFPAEPEPHIQPLKH

SEQ ID NO: 187428 - protein, 302 aa, Zea Mays
MASKAASFAWAPGRLGDALRTLAITFELAFYVLCESILGSVIIGSLQQIAQQEGFRGMYRGLSPTILALLPNWAVYFTVYEQLKSFLSSNDGSHQLSLGANVVAASCAGAATTIVTNPLWVVKTRFQTQGIRAGPIPYKGTLAALRRIAHEEGIRGLYSGLVPALAGISHVAIQFPVYEKIKAYLAERDNTTVEALSFGDVAVASSLAKVAASTLTYPHEVVRSRLQDQRANSDARYKGVIDCVRKVYHKEGVAGFYRGCATNLLRTTPAAVITFTSFEMIHRSLLDLFPAEPEPHIQPLKH

SEQ ID NO: 187429 - protein, 93 aa, Zea Mays
MPLDLQKLFKGVTGGLSGLSKVYKYTIVIKYKLVAVNCCPSTFDIFLLCRMSRAMKHCQEILGAGLKKAQRNSNWEQQPLTQNQQTAVGTSRI

SEQ ID NO: 187430 - protein, 420 aa, Zea Mays
MGPICRGVAPNSNEEAKTKAATKCIAPDVLSHPSHTTSLLRSSLPIIKRDPFYRGGRAGGADRGGRIESMDHKPCAAVLEPLLPSPAEGKAAEAKRLMRLAGPIVASCVLQNVVSMASIIFVGHLGELHLAGASLATSLANVTGYSLLTGMASALDTLCGQAFGARQHHLLGVYKQRAMVVLGLACVPIAVVWACAGRILLLLGQDPQIAAEAGAYARWLVPSLAAYVPLQCHVRFLQTQSVVLPVAASCGATALCHVLVCWALVYKAGMGSKGAALSNGVSYAVNLVVLALYVRLSGACRETWKGFSREAFKDLWRFAELAWPSAMMICLEWWSFEVLVLLSGLLPNPQLETSVLSICLNTGALLYMIPLGLTYSISTRVSNELGAGQPQAAKMAAKGCSQAAESRRSARPLISGRSTC

SEQ ID NO: 187431 - protein, 523 aa, Zea Mays
MGPICRGVAPNSNEEAKTKAATKCIAPDVLSHPSHTTSLLRSSLPIIKRDPFYRGGRAGGADRGGRIESMDHKPCAAVLEPLLPSPAEGKAAEAKRLMRLAGPIVASCVLQNVVSMASIIFVGHLGELHLAGASLATSLANVTGYSLLTGMASALDTLCGQAFGARQHHLLGVYKQRAMVVLGLACVPIAVVWACAGRILLLLGQDPQIAAEAGAYARWLVPSLAAYVPLQCHVRFLQTQSVVLPVAASCGATALCHVLVCWALVYKAGMGSKGAALSNGVSYAVNLVVLALYVRLSGACRETWKGFSREAFKDLWRFAELAWPSAMMICLEWWSFEVLVLLSGLLPNPQLETSVLSICTRVSNELGAGQPQAAKMAAKVVMYMALSEGLVISLTMTLLRNIWGYVYSDEEEIVTYISKMLPILGISFFIDGLHSSLSGVLTGCGKQKIGAAVNLGAFYLLGIPVAVLLAFVFHLNGMGLWLGIVCGSATKLGFLLFVTCSVDWDKEAVKARYRVLGSSLPLA

SEQ ID NO: 187432 - protein, 186 aa, Zea Mays
MELFERACHCFDNPNIYSQCAEEFRLNAEGAFHVQRNEVDEYCGGPCLEETNLALECVEEVAAESFRFSNGASVLAVRQALGTGCSYGPDRGTFEIRERKDCVGGADEYYYRKPRDHEQEKPAVGGRYYGEGSQQPYEQQGAGGYGEGEEYCSGAAGRLGGERRGYYLQTIILLLLASAPPLILTL

SEQ ID NO: 187433 - protein, 220 aa, Zea Mays
MAVKPTSIIAASATARHGDQQVATALLGAAGALCHDSDAVSVPGVLPPRSHHHLHRTHCPLSPLLPHSSCPPHLPAPLPPPHLTSVSARIAGVVLLPRGVFPLLPPRSRYVMGSPLLATPACGAYDVLWGFAAGRFLSILAASDEDQGSSEQEAAASNPEGVDRVCAAIADVVASGADANLEAALSALSPPLCEAVVLAVLHRFKHAHRPSYRFFRSTLI

SEQ ID NO: 187434 - protein, 204 aa, Zea Mays
MHEVCDAPSASCSNQPNSTNGSYFRVDQLVSTFSANPSLIAFAKLCSVSWKSRCNSNFQEFCSQVLYECMSKDRPSLLQVALAYNEALVDSRITNGGIIHSTFLESLMKRVGDIFAELPNLKDNLHRYLSTGTWPDTQNDVVVLSWYLQWYNIPPAHVVASAVEKVRPRVPAGVSMLPLLRLLLPTTHLVGLMEIEKVQIVMEC

SEQ ID NO: 187435 - protein, 676 aa, Zea Mays
MDPAISKMLYFHVPSRHPSSTPELELPTLLQSAAVMGIGLLYEGSAHALTMKILLGEIGRRSGGDNVLEREGYAVAAGSALGFVALGHGNRAFGFMDTFLDRLFEYIGTKEVYHEKYLNATSADDQSCNPGQMMDGAQINVDVTAPGAILALALIFLKAESEEIAARLNIPNTYFDLQYVRPDFVMLRIIARNLILWSRIQPTKGWVDSQIPETVRCGISNMSEGTIDSDELDAEALFQAYVNIVTGACIALGLKYAGSRNGDAQELLYAYTVYFLNEIKHIPVRTSNILPKGLLQYVDRGTLELCLHLIVLSLSLAFRHLYVIATEPRWIQTVDIDTELPVYCPLEVTVAETDYYDETNYCEVTPCLLPERSVLKSIRVCGPRYWPQVIKLAPEDKPWWRSGDKTNPFNGGVLYIKRKVGSCSYSDDPIGCQSLISRAMHEVCDAPSASCSNQPNSTNGSYFRVDQLVSTFSANPSLIAFAKLCSVSWKSRCNSNFQEFCSQVLYECMSKDRPSLLQAYISFYTTIELMWEHLKTGNFPFYNSLFLPNLKVALAYNEALVDSRITNGGIIHSTFLESLMKRVGDIFAELPNLKDNLHRYLSTGTWPDTQNDVVVLSWYLQWYNIPPAHVVASAVEKVRPRVPAGVSMLPLLRLLLPTTHLVGLMEIEKVQIVMEC

SEQ ID NO: 187436 - protein, 440 aa, Zea Mays
MAGSGNLQTFRLLRYLRGRISAEGQVNYGLQMAVSLAIGFLFLGGGTHTFSTQNSAIAALLISLYPRLPTGPNDNRCHLQAFRHLYVIATEPRWIQTVDIDTELPVYCPLEVTVAETDYYDETNYCEVTPCLLPERSVLKSIRVCGPRYWPQVIKLAPEDKPWWRSGDKTNPFNGGVLYIKRKVGSCSYSDDPIGCQSLISRAMHEVCDAPSASCSNQPNSTNGSYFRVDQLVSTFSANPSLIAFAKLCSVSWKSRCNSNFQEFCSQVLYECMSKDRPSLLQAYISFYTTIELMWEHLKTGNFPFYNSLFLPNLKVALAYNEALVDSRITNGGIIHSTFLESLMKRVGDIFAELPNLKDNLHRYLSTGTWPDTQNDVVVLSWYLQWYNIPPAHVVASAVEKVRPRVPAGVSMLPLLRLLLPTTHLVGLMEIEKVQIVMEC

SEQ ID NO: 187437 - protein, 282 aa, Zea Mays
MGIGLLYEGSAHALTMKILLGEIGRRSGGDNVLEREGYAVAAGSALGFVALGHGNRAFGFMDTFLDRLFEYIGTKEVYHEKYLNATSADDQSCNPGQMMDGAQINVDVTAPGAILALALIFLKAESEEIAARLNIPNTYFDLQYVRPDFVMLRIIARNLILWSRIQPTKGWVDSQIPETVRCGISNMSEGTIDSDELDAEALFQAYVNIVTGACIALGLKYAGSRNGDAQELLYAYTVYFLNEIKHIPVRTSNILPKGLLQYVDRGTLELCLHLIVLSLSLV

SEQ ID NO: 187438 - protein, 207 aa, Zea Mays
MDPAISKMLYFHVPSRHPSSTPELELPTLLQSAAVMGIGLLYEGSAHALTMKILLGEIGRRSGGDNVLEREGYAVAAGSALGFVALGHGNRAFGFMDTFLDRLFEYIGTKEVYHEKYLNATSADDQSCNPGQMMDGAQINVDVTAPGAILALALIFLKAESEEIAARLNIPNTYFDLQYVRPDFVMLRIIARNLILWSSQVWYFQHE

SEQ ID NO: 187439 - protein, 173 aa, Zea Mays
MDPAISKGKWKNVPPTDSYLISLKSRTRKRPVSWHKCSLLARLPIHFLFSVPAPLPSPRLCRSFKFSHCSSATRGHRLENKYDPHLLLWPRDRTDCCRRLPTARRRWRRIVFVGHLGSLGGACKTEIEPQRPIFDQFNRCSTFMFLLDIHLLLQSWSYQLFYRCRYVQQQQTF

SEQ ID NO: 187440 - protein, 431 aa, Zea Mays
MAEGLQSCFYNQFISLFWGSDAAYLYSSSQVDSEWEFFSHEIKRVCTKYGQTLSTKSLTFPSKAWDFLINSKYHSQYCKRALSSSNSFLPVSYNTGKTVFNSFLQDEHSSDVSYNIRFMRETLETLHALYENLKLNILRKEDLGCLASLLCTVASSLGEHSYVDYYCRDFPLNLTESPSLVSSNSLTTPPSLFRWFEYCLRHGLNSAKLEDIPTLMRKQKVSAVSWSRKVLSFYSLLLGAERKGKNLSSGVYCEVASGSARNTEELTVLAMVAEKFGHRQLDLLPVGVSLVLRHALDKCRDSPPDDWPATAYVLVGREDLATAKMGTVRKENLLWNNDNLTSMSVPYMLHLQPVIIPTTAPDIPASEVLNSDDSDSVYKSVEDGMEHIFTSTTQLRFGHDLRLNEVRRLLCSARPVPIQTPTNPSVSDQDL

SEQ ID NO: 187441 - protein, 740 aa, Zea Mays
MVSSSSSLLNARDLNRPSKEYGLTYNIPFQANILETDNKANGAIISSHLILKHPFEEPQATYVEEKDKLTMMRDFDEKTIWTSDVIPLIASYHKGKFQHSVWQIDGASYQEAMNENTMLPVDISSHKCAFRKIWQGKCSHSAASKVFLATDIDGMPIISFLLHEQKILLAVRIQVDDATEEAFGDIKPHMSWNIPAFAAAPVVVTRPRVRVGVLPFTDILVLSSDNDLLLYSGKQCLCRYTLPNELGKGFFSNHELNSDISDTYSDLKITSIADAVEGRINVTCSNGLMLRCSLRKNPSSSLVSDCITAMAEGLQSCFYNQFISLFWGSDAAYLYSSSQVDSEWEFFSHEIKRVCTKYGQTLSTKSLTFPSKAWDFLINSKYHSQYCKRALSSSNSFLPVSYNTGKTVFNSFLQDEHSSDVSYNIRFMRETLETLHALYENLKLNILRKEDLGCLASLLCTVASSLGEHSYVDYYCRDFPLNLTESPSLVSSNSLTTPPSLFRWFEYCLRHGLNSAKLEDIPTLMRKQKVSAVSWSRKVLSFYSLLLGAERKGKNLSSGVYCEVASGSARNTEELTVLAMVAEKFGHRQLDLLPVGVSLVLRHALDKCRDSPPDDWPATAYVLVGREDLATAKMGTVRKENLLWNNDNLTSMSVPYMLHLQPVIIPTTAPDIPASEVLNSDDSDSVYKSVEDGMEHIFTSTTQLRFGHDLRLNEVRRLLCSARPVPIQTPTNPSVSDQDL

SEQ ID NO: 187442 - protein, 977 aa, Zea Mays
MAPGSLKIPCPKPKSAAPKIFPPSLGFRPIAGNRLKRPKGRQLASFRLTPPIVHTALRLLPGADSFPLLLDAAAASSGIMASVGSRRLTVLREFRPHGLAVEEADGQGVPGAPPPQDYDYFLFDPALAISPTPDPSDEASSSGADGDHELFIRDNQIIWSNGSRVHKRYVSPNTVIMACWCRMNAISDALLCVLQVDTLSLYNVTGEIVCIPLPYAVSSIWPLPFGLLLQKSTDGGHMVSSSSSLLNARDLNRPSKEYGLTYNIPFQANILETDNKANGAIISSHLILKHPFEEPQATYVEEKDKLTMMRDFDEKTIWTSDVIPLIASYHKGKFQHSVWQIDGASYQEAMNENTMLPVDISSHKCAFRKIWQGKCSHSAASKVFLATDIDGMPIISFLLHEQKILLAVRIQVDDATEEAFGDIKPHMSWNIPAFAAAPVVVTRPRVRVGVLPFTDILVLSSDNDLLLYSGKQCLCRYTLPNELGKGFFSNHELNSDISDTYSDLKITSIADAVEGRINVTCSNGLMLRCSLRKNPSSSLVSDCITAMAEGLQSCFYNQFISLFWGSDAAYLYSSSQVDSEWEFFSHEIKRVCTKYGQTLSTKSLTFPSKAWDFLINSKYHSQYCKRALSSSNSFLPVSYNTGKTVFNSFLQDEHSSDVSYNIRFMRETLETLHALYENLKLNILRKEDLGCLASLLCTVASSLGEHSYVDYYCRDFPLNLTESPSLVSSNSLTTPPSLFRWFEYCLRHGLNSAKLEDIPTLMRKQKVSAVSWSRKVLSFYSLLLGAERKGKNLSSGVYCEVASGSARNTEELTVLAMVAEKFGHRQLDLLPVGVSLVLRHALDKCRDSPPDDWPATAYVLVGREDLATAKMGTVRKENLLWNNDNLTSMSVPYMLHLQPVIIPTTAPDIPASEVLNSDDSDSVYKSVEDGMEHIFTSTTQLRFGHDLRLNEVRRLLCSARPVPIQTPTNPSVSDQDL

SEQ ID NO: 187443 - protein, 607 aa, Zea Mays
MNENTMLPVDISSHKCAFRKIWQGKCSHSAASKVFLATDIDGMPIISFLLHEQKILLAVRIQVDDATEEAFGDIKPHMSWNIPAFAAAPVVVTRPRVRVGVLPFTDILVLSSDNDLLLYSGKQCLCRYTLPNELGKGFFSNHELNSDISDTYSDLKITSIADAVEGRINVTCSNGLMLRCSLRKNPSSSLVSDCITAMAEGLQSCFYNQFISLFWGSDAAYLYSSSQVDSEWEFFSHEIKRVCTKYGQTLSTKSLTFPSKAWDFLINSKYHSQYCKRALSSSNSFLPVSYNTGKTVFNSFLQDEHSSDVSYNIRFMRETLETLHALYENLKLNILRKEDLGCLASLLCTVASSLGEHSYVDYYCRDFPLNLTESPSLVSSNSLTTPPSLFRWFEYCLRHGLNSAKLEDIPTLMRKQKVSAVSWSRKVLSFYSLLLGAERKGKNLSSGVYCEVASGSARNTEELTVLAMVAEKFGHRQLDLLPVGVSLVLRHALDKCRDSPPDDWPATAYVLVGREDLATAKMGTVRKENLLWNNDNLTSMSVPYMLHLQPVIIPTTAPDIPASEVLNSDDSDSVYKSVEDGMEHIFTSTTQLRFGHDLRLNEVYPFF

SEQ ID NO: 187444 - protein, 336 aa, Zea Mays
MLFQMAEYRISIYGRKQSEWDQLASWIVNNELHSGNVVWLVQIPRLYNVYKEMGIVTSFQNLLDNIFVPLFEVTIDPASHPQLHVFLKQVVGLDLVDDESKPERRPTKHMPTPEQWTNVFNPAFSYYAYYCYANLFTLNKLRESKGMTTIKFRPHAGEAGDVDHLAATFLLCHNISHGINLRKSPVLQYLYYLGQIGLAMSPLSNNSLFLDYHRNPFPTFFQRGLNVSLSTDDPLQIHLTKEPLVEEYSIAASLWKLSSCDLCEIARNSVYQSGFSHALKAHWIGKNYFKRGPAGNDIHRTNVPHIRVQFREMIWRNEMKLVYSDNEILIPDELDL

SEQ ID NO: 187445 - protein, 57 aa, Zea Mays
MVECSCRNRHTCTLTSAVRRPLHHATHQDIEGALKDIEGPLRGNFIHATAATLSEHE

SEQ ID NO: 187446 - protein, 104 aa, Zea Mays
MHRRPHDNLAPVPTISTIRARTIDYAPPISSIRADAISSILTSRSRSRARPAVARRTPPQAGSNQHVRSLPHRCRARSHPPLNYSHSTFHFERPPRSSCVPPRS

SEQ ID NO: 187447 - protein, 83 aa, Zea Mays
MHRRPHDNLAPVPTISTIRARTIDYAPPISSIRADAISSILTSRSRSRARPAVARRTPPQAGSNQHVRSLPHRCRARSHPPLN

SEQ ID NO: 187448 - protein, 64 aa, Zea Mays
MLGRRARTKITRSSTAGRMRSSNGSVATPYSPYSTTANPNRASIPNGVTDGGGGARGDYSNHAP

SEQ ID NO: 187449 - protein, 83 aa, Zea Mays
MILSSFEWGSWLTYIQFPTIEGRRARTKITRSSTAGRMRSSNGSVATPYSPYSTTANPNRASIPNGVTDGGGGARGDYSNHAP

SEQ ID NO: 187450 - protein, 57 aa, Zea Mays
MSLNPVEKITCWSVDLTFCTACWFDQYPVVCCSTFCRALCMTRLWRIWICEKKSEAD

SEQ ID NO: 187451 - protein, 145 aa, Zea Mays
MGTGGSSTATRSTGTSLPSACWPSSTRRCSSSGTASASPAARTWSPRPASSLTSPGIRSRTKNFCNLSQLATIWAWKMLLSEVTAYLMMSALSAAIPITNRMREGADNVFTDSSAASISMAFFAFVCLALSALVSGFKLAKQTYI

SEQ ID NO: 187452 - protein, 546 aa, Zea Mays
MTSKFGLAGGIPERRVRPIWDAVDSRQYKPALKLCTALLAKHPTSPYALALKALILERMGKPDEALSGALNAKELLYSDNIFHFDDLTLSTLQIVFQRLDRLDLATSCYEYACTKYPSNLELMMGLFNCYVREYSYVKQQQTALKMYKTVGEERFLLWAVCSIQLQCSVFDLVASLDHLSQVHFSSGGVKLLALAEALLKKHINSHSLHEPEALSLYVSILEQEKKYDTALEVLSGDLGSLLGREEDKLRLQGCLLAQASSYLSASEIYQKVLESCPDDWESFLHYIGCLLEHDVNLPKPSTGEHTCPSCSVDSALSNKTSLDKELVESRLTSALSFVQSLQENNSSDCVRGPHLAKIEIERQRCLNGNPDNIKLMEALVQYLHRFGHLSCSASDVEIYLHMLSNNEISELLDEITRSFDASSISVNTLGSTITLFKVQELLGTSFTKPTSELEGIAKRMVDTFYKNLPLSNYLDPQESMYGEELLSMASSILVQLYWRTRDLGYLLEAILILEFGLTVRKYVWQYKVTLVHLYSYLGALPLAHKW

SEQ ID NO: 187453 - protein, 305 aa, Zea Mays
MSQKHFLSMFQFWSKRKSMTLLWKFFLETWDLFLEGRRTSFVCRDVFLLKRVAICLLLKYTRRFWSLGCLLEHDVNLPKPSTGEHTCPSCSVDSALSNKTSLDKELVESRLTSALSFVQSLQENNSSDCVRGPHLAKIEIERQRCLNGNPDNIKLMEALVQYLHRFGHLSCSASDVEIYLHMLSNNEISELLDEITRSFDASSISVNTLGSTITLFKVQELLGTSFTKPTSELEGIAKRMVDTFYKNLPLSNYLDPQESMYGEELLSMASSILVQLYWRTRDLGYLLEAILILEFGLTVRNCVIT

SEQ ID NO: 187454 - protein, 395 aa, Zea Mays
MTSKFGLAGGIPERRVRPIWDAVDSRQYKPALKLCTALLAKHPTSPYALALKALILERMGKPDEALSGALNAKELLYSDNIFHFDDLTLSTLQIVFQRLDRLDLATSCYEYACTKYPSNLELMMGLFNCYVREYSYVKQQQTALKMYKTVGEERFLLWAVCSIQLQCSVFDLVASLDHLSQVHFSSGGVKLLALAEALLKKHINSHSLHEPEALSLYVSILEQEKKYDTALEVLSGDLGSLLGREEDKLRLQGCLLAQASSYLSASEIYQKVLESCPDDWESFLHYIGCLLEHDVNLPKPSTGEHTCPSCSVDSALSNKTSLDKELVESRLTSALSFVQSLQENNSSDCVRGPHLAKIEIERQRCLNGNPDNIKLMEALVQYLHSALAVCWFLIV

SEQ ID NO: 187455 - protein, 281 aa, Zea Mays
MTSKFGLAGGIPERRVRPIWDAVDSRQYKPALKLCTALLAKHPTSPYALALKALILERMGKPDEALSGALNAKELLYSDNIFHFDDLTLSTLQIVFQRLDRLDLATSCYEYACTKYPSNLELMMGLFNCYVREYSYVKQQQTALKMYKTVGEERFLLWAVCSIQLQCSVFDLVASLDHLSQVHFSSGGVKLLALAEALLKKHINSHSLHEPEALSLYVSILEQEKKYDTALEVLSGDLGSLLGREEDKLRLQGCLLAQASSYLSASEIYQKVLESWMFAGA

SEQ ID NO: 187456 - protein, 266 aa, Zea Mays
MTSKFGLAGGIPERRVRPIWDAVDSRQYKPALKLCTALLAKHPTSPYALALKALILERMGKPDEALSGALNAKELLYSDNIFHFDDLTLSTLQIVFQRLDRLDLATSCYEYACTKYPSNLELMMGLFNCYVREYSYVKQQQTALKMYKTVGEERFLLWAVCSIQLQVHFSSGGVKLLALAEALLKKHINSHSLHEPEALSLYVSILEQEKKYDTALEVLSGDLGSLLGREEDKLRLQGCLLAQASSYLSASEIYQKVLESWMFAGA

SEQ ID NO: 187457 - protein, 867 aa, Zea Mays
MDITQVLLAAQSPDANLRTVAEGNLTQFQEQNLPNFLLSLSIELSNDEKPPESRRLAGIILKNSLDAKDSAKKELLTQQWVSVDPSIKLKIKESLLVTLGSSVHDARHTSSQVIAKVASIEIPRREWQDLIAKLLENMTSPGASAPLKQATLEALGYVCEEISPQDLEQDQVNAVLTAVVQGMNQAELSPEVRLAAVKALYNALDFAESNFANEMERNYIMKVVCETAMSKEVEIRQAAFECLVAIASTYYSHLDPYMQTIFDLTANAVKGDEEPVALQAVEFWSAICDEEIALQDEYEGSEDGNSTVHFRFIEKALPLLVPMLLETLLKQEEDQDQDDNVWNISMSGGTCLGLISRTVGDAVVPLVMPFVEANITKPDWHCREAATFAFGSILEGPSVEKLAPLVQAGLDFLLNTMNDANSQVKDTTAWTLGRVFELLHSPAGANPIINNSNLPRIMSVLLESSKDAPNVAEKVCGAIYFLAQGYEDAESMSSVLTPYLPNIIAALLSAADRADSTHSRLRASAYEALNEIVRVSNIPETSGIIGQLLQEIMRRLNLTFDLHILSSGDKEKQSDLQALLCGVLQVIIQKLSSTDAKSIVSQTADQLMMLFLRVFACHNSTVHEEAMLAIGALAYATGPDFVKYMPNFFTYLEAGLQNYEEYQVCSISVGVVGDICRALEDKILPFCDRIMTVLLKDLSSSMLNRSVKPPIFSCFGDIALAIGENFEKYLPYAMPMLQGAAELLGTLDQSDDDMVDYGNQLRRGIFEAYSGILQGIKGPKAQLMIPYATHLLQFTEAVFKDRSSVTKAAVAVLGDLADTLGQSSKDLFKTHLFHVEFLRECQAQQLDDEVRETAQWAQGMINQAVVS

SEQ ID NO: 187458 - protein, 438 aa, Zea Mays
MASSTGSLEGGGVGVPKFKSAQPPSLPISPPPMSPSSYFSIPPGLSPAELLDSPVLLHSSSNFFASPTTGAIPAQRFDWKHAADLIASQSQQDDSRAAVGSAFNDFSFHAPTMPAQTTSFPSFKQQQQVEAATKSAVPSSNKASGGGGGTKLEDGYNWRKYGQKQVKGSENPRSYYKCTYHSCSMKKKVERSLADGRVTQIVYKGAHNHPKPLSTRRNSSGGVAAAEEQAANNSSLSGCGGPEHSGGATAENSSVTFGDDEAENGSQRSGGDEPDAKRWKAEDGENEGSSGAGGGKPVREPRLVVQTLSDIDILDDGFRWRKYGQKVVKGNPNPRSYYKCTTAGCPVRKHVERACHDARAVITTYEGKHNHDVPVGRGAASRAAAAAPLLGSGGGQMDHRHQQPYTLEMLSGGGGGYGGGYAAKDEPRDDLFVDSLLC

SEQ ID NO: 187459 - protein, 64 aa, Zea Mays
MVGANEVGGLECERKPLAEVVGDCVQRWFQDAYKEARKGDVANQVLVAQMFFSGYGTPKNEYKG

SEQ ID NO: 187460 - protein, 79 aa, Zea Mays
MEDCLRAPSTAWALLPMPIHPTLLPTIDGTFPERPPTGGWRRRDYQQRTDASAPPSLKQRGTLLCPGSPLPRSTLLAPT

SEQ ID NO: 187461 - protein, 66 aa, Zea Mays
MGESLKVLLSSWYVRDFATLVVDYGISINLIEVDPLILLKMQCSTFLLLLTFLIKQNAEFLTTKLL

SEQ ID NO: 187462 - protein, 177 aa, Zea Mays
MVLITCIICQVFLENSQRSELFFDLTNHPALPRCRATAPAYSATATAPEPKDNASSRFLGVEAKTLLYTRLTDVLSKEALFYIVIFLFIAFFGAFAYVLYPMCDAIHPITLDDHLLASLGPNFLGFVAILRVWSFYLFYVMAELRGASSYSSSSGGLPIRCGSPNSIFVLCLSQLIL

SEQ ID NO: 187463 - protein, 114 aa, Zea Mays
MQGEWQAFSGNSLEERHIIFTAKAIPASSSREEVHVFISPRSTVEDSKPSYRLVGSAFQRACTVIKGDSIVAQTNLLYKLKQNIYSRRKFRVTIYPANDNILVMAMVATFFIKK

SEQ ID NO: 187464 - protein, 114 aa, Zea Mays
MASSSPQHATTGVCQQQPSSSSVSVGVLLDKKGRFLVSVFMDESCGPPPAGLLASVLEAFDDIGLTVLEARATCAGSFRLEAVGEEVVVDGGLIIDAHAVEQAVVQAIKNCPAN

SEQ ID NO: 187465 - protein, 102 aa, Zea Mays
MPLYIYSCARRKRRLRKQRERATSQIERERERERERERGKLERPRVMVSKEQNKRGALHEKLKILRSVTHSHAEVVVDGGLIIDAHAVEQAVVQAIKNCPAN

SEQ ID NO: 187466 - protein, 170 aa, Zea Mays
MHNRVSPYVLPVPGFLCGQMPLYIYSCARRKRRLRKQRERATSQIERERERERERERGKLERPRVMVSKEQNKRGALHEKLKILRSVTHSHAGDKVSIIADASSYIKELKQKIAKLSQEMASSSPQHATTGVCQQQPSSSSEVVVDGGLIIDAHAVEQAVVQAIKNCPAN

SEQ ID NO: 187467 - protein, 95 aa, Zea Mays
MSFFFLFSFKWIGLDRTPCPPPPPMMMILGIYIRGPAATTCFAKETHNSAHAPPKRGRRGDLGEESSPRRDVLCLAYIATKESAGPAGLRLAIAN

SEQ ID NO: 187468 - protein, 154 aa, Zea Mays
MNFCIALCSGAWIISPNWLKESFREGQFVGEAQYVLEDEEYRMQYKSELRDAVMRAKERPNSLFAGYTFCLSKYIQPSFDVLSAIIKSTGGKIIKKLSELDELSRTIFLVCEEEAELALVAAKSGIKTFSSDWFMSCVMKQELDLEAPQFIVSL

SEQ ID NO: 187469 - protein, 306 aa, Zea Mays
MVLQTYKRRVVRNTAKVATNEVSNAYSESSLSEQEPKKRMYKTSSSSLKSKRIRCSNHDDNCQDMNQIGVHDNNLCSSPENSLHVILKEHHIPSTGAHIYSNGSGSPTIMLMNIADEQKKARLTKVVETLRGFVTCDGHSCTHVVTGKARRTMNFCIALCSGAWIISPNWLKESFREGQFVGEAQYVLEDEEYRMQYKSELRDAVMRAKERPNSLFAGYTFCLSKYIQPSFDVLSAIIKSTGGKIIKKLSELDELSRTIFLVCEEEAELALVAAKSGIKTFSSDWFMSCVMKQELDLEAPQFIVSL

SEQ ID NO: 187470 - protein, 526 aa, Zea Mays
MGRPRKTKAEPEPAPAFPIGNCKVEIRGSGLRCETTEQGLTISGPRGAKVVVSGEGSQFILLNPSDADSQTKSLLEVIATVSYQIVPADTQYAEIPLAVVRSSYQRVGIGKLLYKELSQRLQNVGVTSIFCWADKVSEGFWLKQGFVSVGEVNTKGKIRKIPVRADIKRALCFPGGSTLMVAHLNKELPVMQTWEKPQTSLHTVVPDSISPGDTNVSCENMVLQTYKRRVVRNTAKVATNEVSNAYSESSLSEQEPKKRMYKTSSSSLKSKRIRCSNHDDNCQDMNQIGVHDNNLCSSPENSLHVILKEHHIPSTGAHIYSNGSGSPTIMLMNIADEQKKARLTKVVETLRGFVTCDGHSCTHVVTGKARRTMNFCIALCSGAWIISPNWLKESFREGQFVGEAQYVLEDEEYRMQYKSELRDAVMRAKERPNSLFAGYTFCLSKYIQPSFDVLSAIIKSTGGKIIKKLSELDELSRTIFLVCEEEAELALVAAKSGIKTFSSDWFMSCVMKQELDLEAPQFIVSL

SEQ ID NO: 187471 - protein, 497 aa, Zea Mays
MLYKKELPTMDYAADTGRKSGFLETCTTNGKYKTLILMSSSAAQHEEVIATVSYQIVPADTQYAEIPLAVVRSSYQRVGIGKLLYKELSQRLQNVGVTSIFCWADKVSEGFWLKQGFVSVGEVNTKGKIRKIPVRADIKRALCFPGGSTLMVAHLNKELPVMQTWEKPQTSLHTVVPDSISPGDTNVSCENMVLQTYKRRVVRNTAKVATNEVSNAYSESSLSEQEPKKRMYKTSSSSLKSKRIRCSNHDDNCQDMNQIGVHDNNLCSSPENSLHVILKEHHIPSTGAHIYSNGSGSPTIMLMNIADEQKKARLTKVVETLRGFVTCDGHSCTHVVTGKARRTMNFCIALCSGAWIISPNWLKESFREGQFVGEAQYVLEDEEYRMQYKSELRDAVMRAKERPNSLFAGYTFCLSKYIQPSFDVLSAIIKSTGGKIIKKLSELDELSRTIFLVCEEEAELALVAAKSGIKTFSSDWFMSCVMKQELDLEAPQFIVSL

SEQ ID NO: 187472 - protein, 538 aa, Zea Mays
MGRPRKTKAEPEPAPAFPIGNCKVEIRGSGLRCETTEQGLTISGPRGAKVVVSVSGDQKGASNGVGEGSQFILLNPSDADSQTKSLLEVIATVSYQIVPADTQYAEIPLAVVRSSYQRVGIGKLLYKELSQRLQNVGVTSIFCWADKVSEGFWLKQGFVSVGEVNTKGKIRKIPVRADIKRALCFPGGSTLMVAHLNKELPVMQTWEKPQTSLHTVVPDSISPGDTNVSCENMVLQTYKRRVVRNTAKVATNEVSNAYSESSLSEQEPKKRMYKTSSSSLKSKRIRCSNHDDNCQDMNQIGVHDNNLCSSPENSLHVILKEHHIPSTGAHIYSNGSGSPTIMLMNIADEQKKARLTKVVETLRGFVTCDGHSCTHVVTGKARRTMNFCIALCSGAWIISPNWLKESFREGQFVGEAQYVLEDEEYRMQYKSELRDAVMRAKERPNSLFAGYTFCLSKYIQPSFDVLSAIIKSTGGKIIKKLSELDELSRTIFLVCEEEAELALVAAKSGIKTFSSDWFMSCVMKQELDLEAPQFIVSL

SEQ ID NO: 187473 - protein, 114 aa, Zea Mays
MVAAAANLLRGNGGHRASPPTRRPAVSCSCAVGFFSGRSYSGRLFRADAGSSSGTARLLRDEHERLLRCSSASQAQRIPAPNVRWCHPRHRQPPAPRSVPYATLAKREQHLSEV

SEQ ID NO: 187474 - protein, 555 aa, Zea Mays
MAAPPPTTPRLLSPTSKDLLTAASFTSPPSPTSDDPASPLDAFASDPVLSAFLSPSFSPSVFSSAALSSGLAASRAEQLQDAIRLLRRHLRVEEGEPLITERVWDAIVKAFASQMKTTFTASSFVKEIFTLGYPRLFSMVENLLERISRDTDVKGTLPALTPEGKDHMISAIEMFQTAFLALCHSRLSDYVNSIFPMSNRGTIPSKDQISRLVSRIQEEIEVVRTHGHLLVLVLREIGKTLLLLAQRAEYQISTGPEARQVTGTATAAQLKNFALCLHLQEVHMRISSVLSTLPNVASEVLSPSLGVVYGVACDSVTSLFQAMLDRLESCILKMHEQDFAGQGMDASMDNNASAYMEELQKCAVHFRSEFLSKLLPSSSSRSETICTIMVRRMASRVLIFFIRHASLVRPLSEAGKLRMARDMAELELAVGQNLFPVEQLGAPYRALRAFRPVLFLETSQLDKFPLLQDLPPSVILHHLYSRGPDELQSPLQRNKLTPLQYSLWLDSQGKDQIWKGVKATLDDYEMRVRSRGDKEFSPVYPLMLQIGSSLSQPNT

SEQ ID NO: 187475 - protein, 544 aa, Zea Mays
MAAPPPTTPRLLSPTSKDLLTAASFTSPPSPTSDDPASPLDAFASDPVLSAFLSPSFSPSVFSSAALSSGLAASRAEQLQDAIRLLRRHLRVEVLRRHPLLLSHLLSLRSASASLSSLPSHLNLLSSHLSLLSSHLSAPRSHLAHSSASLSSLLATADLLLHSHRLVRLSSRLLASSPAPDLARQAELYREIRLLYEEKNLSGINAVDEEMRKVDAAASKLRSEASAVIDGGVYESNQNDVWCGLQVYYNLGELKTAVEGLVGKHKAAGAKSVSVALDMKAISMTAGVGGGPGGVQRSGTPQIGGSKKAAEALWDRMRQCMDELHRAVTAAWQLQTVLTKKRVPFTQMLFLEEVWQEGEPLITERVWDAIVKAFASQMKTTFTASSFVKEIFTLGYPRLFSMVENLLERISRDTDVKGTLPALTPEGKDHMISAIEMFQTAFLALCHSRLSDYVNSIFPMSNRGTIPSKDQISRLVSRIQEEIEVVRTHGHLLVLVLREIGKTLLLLAQRAEYQISTGPEARQVTGTATAAQLKNFALCLHLQE

SEQ ID NO: 187476 - protein, 101 aa, Zea Mays
MAAPPRFHGQPSSRKPPLGLDGGVRSGSLGFFFGASLLRTMAGGCCFLLQRRGRRVPVFLRFSQLNPQPDFSLACWDQRFLSRRSCLADTGGLLVLVGFLR

SEQ ID NO: 187477 - protein, 92 aa, Zea Mays
MRSILSHVPAADRCPGEVVRISLVTCTADPTVSASLVAGRRRWFGLIVRMSTFWRDDSSLAPINDDMPGCERPQSEVRVHPVCYHVEVHIYR

SEQ ID NO: 187478 - protein, 324 aa, Zea Mays
MSGRKNAGKVSPWLLVLICLGCFFVTYNLLTMPSRGRDGPRKFLGGGGDRHSTASLGSGSDSDPAKRFHVALTATDALYSQWQSRIMHYWYKEMRDRPGSDMGGFTRILHSGKPDGLMDEIPTMVVDPLPEGKDQGYIVLNRPWAFVQWIQKAKIVEEYILMAEPDHVFVKPLPNLSHGDEPAAFPFFYIKPTENEKILRKFFPEEKGPISNIDPIGNSPVIIKKAQLEKIAPTWMNVSLKMKEDQETDKAFGWVLEMYAYAVASALHGVHHSLHKDFMIQPPWDLKTDNTFIIHYTYGCDYSMKILPSISTTKKSFTAPSRSS

SEQ ID NO: 187479 - protein, 334 aa, Zea Mays
MRASRGRDGPRKFLGGGGDRHSTASLGSGSDSDPAKRFHVALTATDALYSQWQSRIMHYWYKEMRDRPGSDMGGFTRILHSGKPDGLMDEIPTMVVDPLPEGKDQGYIVLNRPWAFVQWIQKAKIVEEYILMAEPDHVFVKPLPNLSHGDEPAAFPFFYIKPTENEKILRKFFPEEKGPISNIDPIGNSPVIIKKAQLEKIAPTWMNVSLKMKEDQETDKAFGWVLEMYAYAVASALHGVHHSLHKDFMIQPPWDLKTDNTFIIHYTYGCDYSMKGQLTYGKIGEWRFDKRSYLQSPPPRNLSLPPPGVPESVVTLVKMVNEATANIPGWEDDR

SEQ ID NO: 187480 - protein, 353 aa, Zea Mays
MSGRKNAGKVSPWLLVLICLGCFFVTYNLLTMPSRGRDGPRKFLGGGGDRHSTASLGSGSDSDPAKRFHVALTATDALYSQWQSRIMHYWYKEMRDRPGSDMGGFTRILHSGKPDGLMDEIPTMVVDPLPEGKDQGYIVLNRPWAFVQWIQKAKIVEEYILMAEPDHVFVKPLPNLSHGDEPAAFPFFYIKPTENEKILRKFFPEEKGPISNIDPIGNSPVIIKKAQLEKIAPTWMNVSLKMKEDQETDKAFGWVLEMYAYAVASALHGVHHSLHKDFMIQPPWDLKTDNTFIIHYTYGCDYSMKGQLTYGKIGEWRFDKRSYLQSPPPRNLSLPPPGVPESVSSVYIHAIVI

SEQ ID NO: 187481 - protein, 275 aa, Zea Mays
MLKAAIVYEKVFLRLAEDDISYVLELSEVRGGHDHPNEDDLENAKKMAEFLEHFYDLTIRISSSLHVTINTFFHEIGEIRLLIQSWIDSVDPLRVSMGFRMKEKYDKYWGVWNEPDKDRGKGKGKEKENINLLIFVAAFLDPRYKLSLYHKITVEEIFGEDRGQLVWSAIKTCIRELFTEYRNIYAPIEESTEETDSTQAKGGPGGKLKQVIANKMKMTNSSNNTTKSELDKYVSEDCEDTEKRSIFSFGGRTMHTDCQFWLTWPKISLLYQYQQ

SEQ ID NO: 187482 - protein, 345 aa, Zea Mays
MLKPQTSWTASLPLLLIRRCSRTAASPSPAGDRPLSFVPVCKRRMSTLAHPRFAPLPTEQTESQTDGGAARYQFRLVSYNILAQVYVKSTLFPHSPSACLKWKSRSGAILTELKSFDADFMCIQELDEYDTFYKKNMENSGYSSIYIQRSGDKRDGCGIFYKPKSAELVQKEVILYNDLVEKYVPSDNVNSALENNSSAEEDKNAKPDNSKRGDPNDPRVRLKRDCVGLLAAFKLSDPCDQILIVANTHIYWDPQWIDVKLAQAKYLLSRVSQFEQLISNKYNCKPSVIIAGDFNSTPGDKDLRTKLQSSYAAFMLRMEGSQSTQTTLLVLPEHWTTYSCRMVVR

SEQ ID NO: 187483 - protein, 277 aa, Zea Mays
MCIQELDEYDTFYKKNMENSGYSSIYIQRSGDKRDGCGIFYKPKSAELVQKEVILYNDLVEKYVPSDNVNSALENNSSAEEDKNAKPDNSKRGDPNDPRVRLKRDCVGLLAAFKLSDPCDQILIVANTHIYWDPQWIDVKLAQAKYLLSRVSQFEQLISNKYNCKPSVIIAGDFNSTPGDKVYNYLLSANLGSTDEAPIKLRSLYAANGGEPEYTNYTPGFTGTLDYIFLSDGSSIKPTSLLRLPRGDSEDVKGGLPNFRHPSDHLPIGADFLVVNI

SEQ ID NO: 187484 - protein, 335 aa, Zea Mays
MHEPGYILEYTDFLCRLNDDRNVRALFERALSLLPPEESTEVWRRFAQFEQNYGDLSSMLKVEQRRKEALSRTSEDALSASENTLHDIVSRYSYMDLWPCSSKELDYLARQEWLAKNIVKKVEKPAMLNSGSMLDKGAAGFSASARLLPQSAKVVRPETSQMVIYDPRQMKGPEFAATSSGYTKEVEATLKVLSPSMVSFIKNLPAIEGPSPDIDVVLSVLLQSTLPVAQSAGKAGGVSELSGVGKTGLNQNGSVHRPPRERRKDVERQGAQEEEDASAVQSRAAVPRDIFRLRQIQRSRGLGVGGAAVSQSGSSAFSFSGGGSAFSGDHSASTD

SEQ ID NO: 187485 - protein, 631 aa, Zea Mays
MLNYVGNDAASGPVWMEYINFLKSMPVVTPHEESHRMTTVRKVYQKAILVPTNHVEQLWKDYENFENSVSRTLAKGLLSEYQPKFNSAKAVYRERKKYIDDIDWNVLATPPTGSYKEEQQCMAWKRLLVFEKGNPQRIDATTANRRITFTYEQCLMYLYHHPDIWYDYAMWHVKNGSMDSASKIFQRALKAIHDSEVLKYAFAEMEESRGAIQTAKTVYESLLGENASETSLANIQFIRFLRRTEGTEAARKYFLDARKSPSCTYHLYVAYATMAFCVDKDAKVAQSVFEAGLKRFMHEPGYILEYTDFLCRLNDDRNVRALFERALSLLPPEESTEVWRRFAQFEQNYGDLSSMLKVEQRRKEALSRTSEDALSASENTLHDIVSRYSYMDLWPCSSKELDYLARQEWLAKNIVKKVEKPAMLNSGSMLDKGAAGFSASARLLPQSAKVVRPETSQMVIYDPRQMKGPEFAATSSGYTKEVEATLKVLSPSMVSFIKNLPAIEGPSPDIDVVLSVLLQSTLPVAQSAGKAGGVSELSGVGKTGLNQNGSVHRPPRERRKDVERQGAQEEEDASAVQSRAAVPRDIFRLRQIQRSRGLGVGGAAVSQSGSSAFSFSGGGSAFSGDHSASTD

SEQ ID NO: 187486 - protein, 685 aa, Zea Mays
MATNNDEAAKQIFSRCLLNCLHISLWRCYINFIRRINDKRGSEGLDETKKAFDFMLNYVGNDAASGPVWMEYINFLKSMPVVTPHEESHRMTTVRKVYQKAILVPTNHVEQLWKDYENFENSVSRTLAKGLLSEYQPKFNSAKAVYRERKKYIDDIDWNVLATPPTGSYKEEQQCMAWKRLLVFEKGNPQRIDATTANRRITFTYEQCLMYLYHHPDIWYDYAMWHVKNGSMDSASKIFQRALKAIHDSEVLKYAFAEMEESRGAIQTAKTVYESLLGENASETSLANIQFIRFLRRTEGTEAARKYFLDARKSPSCTYHLYVAYATMAFCVDKDAKVAQSVFEAGLKRFMHEPGYILEYTDFLCRLNDDRNVRALFERALSLLPPEESTEVWRRFAQFEQNYGDLSSMLKVEQRRKEALSRTSEDALSASENTLHDIVSRYSYMDLWPCSSKELDYLARQEWLAKNIVKKVEKPAMLNSGSMLDKGAAGFSASARLLPQSAKVVRPETSQMVIYDPRQMKGPEFAATSSGYTKEVEATLKVLSPSMVSFIKNLPAIEGPSPDIDVVLSVLLQSTLPVAQSAGKAGGVSELSGVGKTGLNQNGSVHRPPRERRKDVERQGAQEEEDASAVQSRAAVPRDIFRLRQIQRSRGLGVGGAAVSQSGSSAFSFSGGGSAFSGDHSASTD

SEQ ID NO: 187487 - protein, 727 aa, Zea Mays
MKNSGGGAAHGDGGDIYNVRAAEILANEALLLPINEAAPIYENLLATFPTAAKYWKQYVEAYMATNNDEAAKQIFSRCLLNCLHISLWRCYINFIRRINDKRGSEGLDETKKAFDFMLNYVGNDAASGPVWMEYINFLKSMPVVTPHEESHRMTTVRKVYQKAILVPTNHVEQLWKDYENFENSVSRTLAKGLLSEYQPKFNSAKAVYRERKKYIDDIDWNVLATPPTGSYKEEQQCMAWKRLLVFEKGNPQRIDATTANRRITFTYEQCLMYLYHHPDIWYDYAMWHVKNGSMDSASKIFQRALKAIHDSEVLKYAFAEMEESRGAIQTAKTVYESLLGENASETSLANIQFIRFLRRTEGTEAARKYFLDARKSPSCTYHLYVAYATMAFCVDKDAKVAQSVFEAGLKRFMHEPGYILEYTDFLCRLNDDRNVRALFERALSLLPPEESTEVEQRRKEALSRTSEDALSASENTLHDIVSRYSYMDLWPCSSKELDYLARQEWLAKNIVKKVEKPAMLNSGSMLDKGAAGFSASARLLPQSAKVVRPETSQMVIYDPRQMKGPEFAATSSGYTKEVEATLKVLSPSMVSFIKNLPAIEGPSPDIDVVLSVLLQSTLPVAQSAGKAGGVSELSGVGKTGLNQNGSVHRPPRERRKDVERQGAQEEEDASAVQSRAAVPRDIFRLRQIQRSRGLGVGGAAVSQSGSSAFSFSGGGSAFSGDHSASTD

SEQ ID NO: 187488 - protein, 315 aa, Zea Mays
MHEPGYILEYTDFLCRLNDDRNVRALFERALSLLPPEESTEVEQRRKEALSRTSEDALSASENTLHDIVSRYSYMDLWPCSSKELDYLARQEWLAKNIVKKVEKPAMLNSGSMLDKGAAGFSASARLLPQSAKVVRPETSQMVIYDPRQMKGPEFAATSSGYTKEVEATLKVLSPSMVSFIKNLPAIEGPSPDIDVVLSVLLQSTLPVAQSAGKAGGVSELSGVGKTGLNQNGSVHRPPRERRKDVERQGAQEEEDASAVQSRAAVPRDIFRLRQIQRSRGLGVGGAAVSQSGSSAFSFSGGGSAFSGDHSASTD

SEQ ID NO: 187489 - protein, 480 aa, Zea Mays
MILIGMYWPPPLQARTRKSNSVWHGKDSWYLKNSEVLKYAFAEMEESRGAIQTAKTVYESLLGENASETSLANIQFIRFLRRTEGTEAARKYFLDARKSPSCTYHLYVAYATMAFCVDKDAKVAQSVFEAGLKRFMHEPGYILEYTDFLCRLNDDRNVRALFERALSLLPPEESTEVWRRFAQFEQNYGDLSSMLKVEQRRKEALSRTSEDALSASENTLHDIVSRYSYMDLWPCSSKELDYLARQEWLAKNIVKKVEKPAMLNSGSMLDKGAAGFSASARLLPQSAKVVRPETSQMVIYDPRQMKEWEITVDSWAGPEFAATSSGYTKEVEATLKVLSPSMVSFIKNLPAIEGPSPDIDVVLSVLLQSTLPVAQSAGKAGGVSELSGVGKTGLNQNGSVHRPPRERRKDVERQGAQEEEDASAVQSRAAVPRDIFRLRQIQRSRGLGVGGAAVSQSGSSAFSFSGGGSAFSGDHSASTD

SEQ ID NO: 187490 - protein, 427 aa, Zea Mays
MEESRGAIQTAKTVYESLLGENASETSLANIQFIRFLRRTEGTEAARKYFLDARKSPSCTYHLYVAYATMAFCVDKDAKVAQSVFEAGLKRFMHEPGYILEYTDFLCRLNDDRNVRALFERALSLLPPEESTEVWRRFAQFEQNYGDLSSMLKVEQRRKEALSRTSEDALSASENTLHDIVSRYSYMDLWPCSSKELDYLARQEWLAKNIVKKVEKPAMLNSGSMLDKGAAGFSASARLLPQSAKVVRPETSQMVIYDPRQMKGPEFAATSSGYTKEVEATLKVLSPSMVSFIKNLPAIEGPSPDIDVVLSVLLQSTLPVAQSAGKAGGVSELSGVGKTGLNQNGSVHRPPRERRKDVERQGAQEEEDASAVQSRAAVPRDIFRLRQIQRSRGLGVGGAAVSQSGSSAFSFSGGGSAFSGDHSASTD

SEQ ID NO: 187491 - protein, 470 aa, Zea Mays
MILIGMYWPPPLQARTRKSNSVWHGKDSWYLKNSEVLKYAFAEMEESRGAIQTAKTVYESLLGENASETSLANIQFIRFLRRTEGTEAARKYFLDARKSPSCTYHLYVAYATMAFCVDKDAKVAQSVFEAGLKRFMHEPGYILEYTDFLCRLNDDRNVRALFERALSLLPPEESTEVWRRFAQFEQNYGDLSSMLKVEQRRKEALSRTSEDALSASENTLHDIVSRYSYMDLWPCSSKELDYLARQEWLAKNIVKKVEKPAMLNSGSMLDKGAAGFSASARLLPQSAKVVRPETSQMVIYDPRQMKGPEFAATSSGYTKEVEATLKVLSPSMVSFIKNLPAIEGPSPDIDVVLSVLLQSTLPVAQSAGKAGGVSELSGVGKTGLNQNGSVHRPPRERRKDVERQGAQEEEDASAVQSRAAVPRDIFRLRQIQRSRGLGVGGAAVSQSGSSAFSFSGGGSAFSGDHSASTD

SEQ ID NO: 187492 - protein, 591 aa, Zea Mays
MKNSGGGAAHGDGGDIYNVRAAEILANEALLLPINEAAPIYENLLATFPTAAKYWKQYVEAYMATNNDEAAKQIFSRCLLNCLHISLWRCYINFIRRINDKRGSEGLDETKKAFDFMLNYVGNDAASGPVWMEYINFLKSMPVVTPHEESHRMTTVRKVYQKAILVPTNHVEQLWKDYENFENSVSRTLAKGLLSEYQPKFNSAKAVYRERKKYIDDIDWNVLATPPTGSYKEEQQCMAWKRLLVFEKGNPQRIDATTANRRITFTYEQCLMYLYHHPDIWYDYAMWHVKNGSMDSASKIFQRALKAIHDSEVLKYAFAEMEESRGAIQTAKTVYESLLGENASETSLANIQFIRFLRRTEGTEAARKYFLDARKSPSCTYHLYVAYATMAFCVDKDAKVAQSVFEAGLKRFMHEPGYILEYTDFLCRLNDDRNVRALFERALSLLPPEESTEVWRRFAQFEQNYGDLSSMLKVEQRRKEALSRTSEDALSASENTLHDIVSRYSYMDLWPCSSKELDYLARQEWLAKNIVKKVEKPAMLNSGSMLDKGAAGFSASARLLPQSAKVVRPETSQMVIYDPRQMKEWEITVDS

SEQ ID NO: 187493 - protein, 373 aa, Zea Mays
MKNSGGGAAHGDGGDIYNVRAAEILANEALLLPINEAAPIYENLLATFPTAAKYWKQYVEAYMATNNDEAAKQIFSRCLLNCLHISLWRCYINFIRRINDKRGSEGLDETKKAFDFMLNYVGNDAASGPVWMEYINFLKSMPVVTPHEESHRMTTVRKVYQKAILVPTNHVEQLWKDYENFENSVSRTLAKGLLSEYQPKFNSAKAVYRERKKYIDDIDWNVLATPPTGSYKEEQQCMAWKRLLVFEKGNPQRIDATTANRRITFTYEQCLMYLYHHPDIWYDYAMWHVKNGSMDSASKIFQRALKAIHDSEVLKYAFAEMEESRGAIQTAKTVYESLLGENASETSLANIQFIRFLRRTEGTEAARPNIFNS

SEQ ID NO: 187494 - protein, 256 aa, Zea Mays
MPRLNDSNVKEIKSKTKKKKNAVSGVGSSSSKGKAIAGKRGEKSKREYNSSGIQEAERNKLFFFEGSSYNFDLEDLLRALAEVLGKGSYGTTYKAVLEDGTTVVVKRLKEVVAGKREFEQQMELIGKVCQHQNTVPLHAYYYSKDEKLLVYDYVPLGSLCAALHGNKAVGRTPLDWETRVKITLGTTRGMAYLHSVGSGGKFIHGNIKSSNILLSQELGACVTEFGLAQLMSTPHVHPLHTEWLTFTRCGSIEGES

SEQ ID NO: 187495 - protein, 139 aa, Zea Mays
MELIGKVCQHQNTVPLHAYYYSKDEKLLVYDYVPLGSLCAALHGNKAVGRTPLDWETRVKITLGTTRGMAYLHSVGSGGKFIHGNIKSSNILLSQELGACVTEFGLAQLMSTPHVHPLHTEWLTFTRCGSSMNAYAFLD

SEQ ID NO: 187496 - protein, 57 aa, Zea Mays
MFPWYLAKSNICYIYTVVMHSQLQIFINRYPIKSVYHFTILNVLERRQLRMYHSYRL

SEQ ID NO: 187497 - protein, 60 aa, Zea Mays
MLSEASVPLTGLSLPHELYLNSRLVLDTNMNHELGMDSCCLLEHFAHLKKSLTSFIIPIW

SEQ ID NO: 187498 - protein, 347 aa, Zea Mays
MQLPQHHQKPSAHSCCSSWIRRSPPPSPPPHKRAGGVGRSRYACRLVPLLVLTVYSVVTVLRIPSSSLVVSTADSERVERREDLEALKTHLPSNQNGLEAREETRSVASLPCSAFISGKSIKDFQALLHQGYSRTTTTASASSSSPTPLLPLAPPTRPCPRSANKPKMLIFIRKQNRVLLNLPQVVTACRRAGFAPHVMNLRRQTPLAAIHAALASADAMVAVHGAAVTHFLFMRPGSVLLQIVPVGLDWAADAFYGKPAQQLGLDYLEYRVAPEESSLAAEYGLNSTVVRTPWVISSRGWWEMKKVYMDRQNVTVNVKRFADLLRAARARLRNTTACAAKPAAPLR

SEQ ID NO: 187499 - protein, 1650 aa, Zea Mays
MRVPCCSLCNVRYDEEERTPLLLHCGHGFCRACLSRMLAAAPGATLPCPRCRHLTAVGNSVSALRKNFPILSLLSTSPSSPSFLHSDSGSSSDGSEDEDDFFARPSRRPAPAPAAAPPGCSFFDLASHPDLKLARRIGSGPPGPAGQEVWAGTLSRGGGVKRCKHQVAVKRVPLAAGDGLEVVQEEVERLRRASTWCRNVCTFHGAVRVGGHLCFVMDRYVGSVQAEMRQNGGRLTLEQILRYGADIARGIAELHAAGIVCMSIKPSNILLDAHGHAFVSDYGLSAILKNLTSRRVPDDSSAGIDATLLSPNYTAPEAWGPLKKSLNMFWDSANGISPESDAWSFGCTLVEMCTGAVPWAGLSAEEICKSVVKEKKPPPQYSRVVGVGLPGELWKMIGECLQFRASRRPSFQDMLKTFLRHLLDIPRSPPASPEIDFANENLPNGMQPPTTSILEMVHDNPNALHHLVCEGDAAGVRDLLAKAASERNDSLIRSLLEAQNTDGLTALHLACRRGSAELVEAIVAYQENVDILDKDEDPPIVFALAAGSPRCVRALVGRSASINSRLREGLGPTLAHVCAHHGQPECMQELLMAGADPNAVDGEGESVLHIAVARRYTDCAIVILENGGCRSMGISNSQHKTPLHLCIETWNTAVVRRWVEVASLEDIAETIDVPSPVGTALCMAAALKKEHEKEGRELVRILLAAGADSTAQDDPHCRTALHTAAMIDDVELVKIILEAGVDVNIRNAQNTTPLHVALNRGANSCVGLLLAAGANCNIQDDDGDNAFHIAADAAKMIRENLAWIAQMLLQPSPAVDVRNHRGWTLRDFLERLPREWIYEELMETLEDKGVHLSPTIYEVADWVKFRRTVTSPAFGWQGAGPRSIGFVQSVVDNDHLAVSFCTGEAHVLTSEVIKVIPLNRGQHVQLKPGVSEPSIYLDAEIIELVGILNWRSTMCLLFGWRGQSRDSIGTVLCVDDDGILRVGFPGASRGWRADPAEIERVEEYKVGNWVRIRPSLTVAVHGMESITPGSVGIVYSIRPDSSLLLGLCYLSNPWLCEPEEVEHVDPFKIGDQVCVKRSVAEPRYAWGGETHHSVGKIIDIESDGLLIIDIPNRAAPWQADPSDMEKIENFKVGDWIRVKATVPSPKYGWEDVTRNSIGIVHSLQDDGDVGVAFCFRSRLFLCSVADVEKAQPFEVGEKVHVSPSISEPRLGWLSETAATIGAISRIDMDGTLNIKVSGRKGLWKVAPGDAERLSAFEVGDWVRLKPSIGSRPTYDWNSVGRISIAVVHSIQDSGYLELAGCFRNGKWLTHNTDIEKVQTLKIGQHVRFRAGISEPRWGWRDANPDSRGVIAGVHADGEVRVAFFGVPGLWRGDPADLEIENIFEVGEWVRLTNDVEQWRSLKPGSIGVVHGVGYQGDAWDGTIHVAFCGEQERWIGPSSQLEGVSKFVVGQRVRIRGCIRQPRFGWSNHNHSSIGTISSIDADGKLRIHTPAGARAWLIDPAEVEEVEEEEVCVGDWVKVKDSVGTPVYQWGDVNHSSIGVVHRADDGELWIAFCFCERLWLCKAWEVEKVRPFRQGDKVRIRPGLVSPRWGWGMETYASKGEVVGVDANGKLRIKFRWRDRLWIGDPADIVLDDVHLLTEASNGLAFCS

SEQ ID NO: 187500 - protein, 885 aa, Zea Mays
MLKIQPHCMLHLIEDDDGDNAFHIAADAAKMIRENLAWIAQMLLQPSPAVDVRNHRGWTLRDFLERLPREWIYEELMETLEDKGVHLSPTIYEVADWVKFRRTVTSPAFGWQGAGPRSIGFVQSVVDNDHLAVSFCTGEAHVLTSEVIKVIPLNRGQHVQLKPGVSEPSIYLDAEIIELVGILNWRSTMCLLFGWRGQSRDSIGTVLCVDDDGILRVGFPGASRGWRADPAEIERVEEYKVGNWVRIRPSLTVAVHGMESITPGSVGIVYSIRPDSSLLLGLCYLSNPWLCEPEEVEHVDPFKIGDQVCVKRSVAEPRYAWGGETHHSVGKIIDIESDGLLIIDIPNRAAPWQADPSDMEKIENFKVGDWIRVKATVPSPKYGWEDVTRNSIGIVHSLQDDGDVGVAFCFRSRLFLCSVADVEKAQPFEVGEKVHVSPSISEPRLGWLSETAATIGAISRIDMDGTLNIKVSGRKGLWKVAPGDAERLSAFEVGDWVRLKPSIGSRPTYDWNSVGRISIAVVHSIQDSGYLELAGCFRNGKWLTHNTDIEKVQTLKIGQHVRFRAGISEPRWGWRDANPDSRGVIAGVHADGEVRVAFFGVPGLWRGDPADLEIENIFEVGEWVRLTNDVEQWRSLKPGSIGVVHGVGYQGDAWDGTIHVAFCGEQERWIGPSSQLEGVSKFVVGQRVRIRGCIRQPRFGWSNHNHSSIGTISSIDADGKLRIHTPAGARAWLIDPAEVEEVEEEEVCVGDWVKVKDSVGTPVYQWGDVNHSSIGVVHRADDGELWIAFCFCERLWLCKAWEVEKVRPFRQGDKVRIRPGLVSPRWGWGMETYASKGEVVGVDANGKLRIKFRWRDRLWIGDPADIVLDDVHLLTEASNGLAFCS

SEQ ID NO: 187501 - protein, 853 aa, Zea Mays
MCWLAFSSWCKLQHTAADAAKMIRENLAWIAQMLLQPSPAVDVRNHRGWTLRDFLERLPREWIYEELMETLEDKGVHLSPTIYEVADWVKFRRTVTSPAFGWQGAGPRSIGFVQSVVDNDHLAVSFCTGEAHVLTSEVIKVIPLNRGQHVQLKPGVSEPRFGWRGQSRDSIGTVLCVDDDGILRVGFPGASRGWRADPAEIERVEEYKVGNWVRIRPSLTVAVHGMESITPGSVGIVYSIRPDSSLLLGLCYLSNPWLCEPEEVEHVDPFKIGDQVCVKRSVAEPRYAWGGETHHSVGKIIDIESDGLLIIDIPNRAAPWQADPSDMEKIENFKVGDWIRVKATVPSPKYGWEDVTRNSIGIVHSLQDDGDVGVAFCFRSRLFLCSVADVEKAQPFEVGEKVHVSPSISEPRLGWLSETAATIGAISRIDMDGTLNIKVSGRKGLWKVAPGDAERLSAFEVGDWVRLKPSIGSRPTYDWNSVGRISIAVVHSIQDSGYLELAGCFRNGKWLTHNTDIEKVQTLKIGQHVRFRAGISEPRWGWRDANPDSRGVIAGVHADGEVRVAFFGVPGLWRGDPADLEIENIFEVGEWVRLTNDVEQWRSLKPGSIGVVHGVGYQGDAWDGTIHVAFCGEQERWIGPSSQLEGVSKFVVGQRVRIRGCIRQPRFGWSNHNHSSIGTISSIDADGKLRIHTPAGARAWLIDPAEVEEVEEEEVCVGDWVKVKDSVGTPVYQWGDVNHSSIGVVHRADDGELWIAFCFCERLWLCKAWEVEKVRPFRQGDKVRIRPGLVSPRWGWGMETYASKGEVVGVDANGKLRIKFRWRDRLWIGDPADIVLDDVHLLTEASNGLAFCS

SEQ ID NO: 187502 - protein, 417 aa, Zea Mays
MPHTPTVPPGVAAGVPVPTRRPSSVTSPHSPSVPFLASVRGYPSRRRTSIATFWTRRGAIDSRERTERGDSQGSRRTLEEGTGDRRWRGTPAAGWTGRAWRRPPPGQSARSSAPPCSTRSTSARPSSRPSFRRTRARRNIDVFWEAIYKRQFLSLYQGLNTKNIQSFVSSFFYFYGYSYFKRLYLEKSGAKSIGTTANLLVAAAAGACNAIVTQPLDTATSRMQTSAFGKSKGLRETLAEGTWMEAFDGLGISIILTCNPSIQYTAFDQLKKRIIQRQRRKNAASAEDNSIVSLSAFSAFLLGAVSKSIATVLTYPLIRCKVMIQAADPDEDDDVDSERPSKSRTPKTMLGALHAIWSKEGIPGFFKGLNAQILKAVLSSALLLMIKEKISKFTWVSLLALRRYLFVSQKRIKSVTV

SEQ ID NO: 187503 - protein, 303 aa, Zea Mays
MAGDAGSGVDWESLAEATSGAIGSLVSTTVLYPLDICKTKFQAELQTHQGAQKYRNLSDVFWEAIYKRLYLEKSGAKSIGTTANLLVAAAAGACNAIVTQPLDTATSRMQTSAFGKSKGLRETLAEGTWMEAFDGLGISIILTCNPSIQYTAFDQLKKRIIQRQRRKNAASAEDNSIVSLSAFSAFLLGAVSKSIATVLTYPLIRCKVMIQAADPDEDDDVDSERPSKSRTPKTMLGALHAIWSKEGIPGFFKGLNAQILKAVLSSALLLMIKEKISKFTWVSLLALRRYLFVSQKRIKSVTV

SEQ ID NO: 187504 - protein, 57 aa, Zea Mays
MVARSVRDWRGNSMVGAGGGGVAVLFMCEQSRGYYSQGAGRGLCPRPSKRGLFPSNS

SEQ ID NO: 187505 - protein, 464 aa, Zea Mays
MSPSLVLVHSLPLPSRRALPIQLPRRLAPKHPSQWSLRTPRRLAVFARASASVVVSPHGEGGGGTAAGRKSTGYRNRFLDLARLGAVAEGAAEAFFRSEIRRRLAVTAALIVLSRVGYFIPLPGFDRRLIPDSYLSFSALPADDLGDFSSELKLSFFQLGISHQISASIVMQVLCHVLPSLEKLRKEGLDGHEKLKGYIWWLSLWFATVAAFTVSCFSLQYSVYAASYRVKHVIITSLLLVLGAMSMTWICDTITEFGFGHGSSLIICVGILTGYTDTLHKMITQFSGNFSYCWPYILGVAGIFMILTMGAVLVTEGCRKIKLQYYGFKLASGAGNESSPVTEVEPYIPFNINPTGMQPLLTTSYLLAFPSIMASIFASPFWENLREILNPKTSTGGSPWVYYLTYAFLVFIFNIFDIANLPKEISDYLNKMCARVPRIKPGRATVDYLTKIQTSTRFWGGLNY

SEQ ID NO: 187506 - protein, 519 aa, Zea Mays
MSPSLVLVHSLPLPSRRALPIQLPRRLAPKHPSQWSLRTPRRLAVFARASASVVVSPHGEGGGGTAAGRKSTGYRNRFLDLARLGAVAEGAAEAFFRSEIRRRLAVTAALIVLSRVGYFIPLPGFDRRLIPDSYLSFSALPADDLGDFSSELKLSFFQLGISHQISASIVMQVLCHVLPSLEKLRKEGLDGHEKWWLSLWFATVAAFTVSCFSLQYSVYAASYRVKHVIITSLLLVLGAMSMTWICDTITEFGFGHGSSLIICVGILTGYTDTLHKMITQFSGNFSYCWPYILGVAGIFMILTMGAVLVTEGCRKIKLQYYGFKLASGAGNESSPVTEVEPYIPFNINPTGMQPLLTTSYLLAFPSIMASIFASPFWENLREILNPKTSTGGSPWVYYLTYAFLVFIFNIFDIANLPKEISDYLNKMCARVPRIKPGRATVDYLTKIQTSTRFWGGLLLSLLATSSLLLDRYLRQINEGLSIGFTSVLIIVGSIIELRRSYQAYNVMPALSKVLRRYGA

SEQ ID NO: 187507 - protein, 82 aa, Zea Mays
MNMLELDLLFGLDFRLKVDIETFESYCLQLEEALVLVLERPIQVQEANVTKHLICNSSADETCKHELGLERYSSQAVQGCSW

SEQ ID NO: 187508 - protein, 55 aa, Zea Mays
MSPNSLAPTPSSDQSCWRSCTVKFLALSVQWYLFWVHGGAVLEINISNVTKFSKI

SEQ ID NO: 187509 - protein, 478 aa, Zea Mays
MIADSFWLCSCRSCCTESQREAALLLGQFASADSDCKVHIVQRGAVRPLIEMLQSADVQLREMSAFALGRLAQDTHNQAGIAYNGGLVPLFKLLDSKNGSLQHNAAFALYGVADNEDYVSDFIKVGGVQKLQDGEFIVQATKDCVAKTLKRLEEKINGRVLKHLLYLMRVGEQSVQRRVALALAHLCAPEDQRAIFIDNNGLDLLLDLLISMSPKHQQDGSAALYKLANKAAALSPMDAAPPSPTPQVYLGEQYVNSSTLSDVTFLVEGKRFYAHRIALLASSDAFRAMFDGGYREKDARDIEIPNIRWEVFELMMRFIYTGSVQINSEISQDLLRAADQYLLEGLKRLCEYTIAKDVNLDNVSDMYDLSEAFHAVSLRHTCILYILEHFNKICTRAGDPQFSNQGTEFIKKSKSKRQELADLMSPNSLAPTPSSDQSCWRSCTVKFLALSVQWYLFWVHGGAVLEINISNVTKFSKI

SEQ ID NO: 187510 - protein, 256 aa, Zea Mays
MLQSADVQLREMSAFALGRLAQDTHNQAGIAYNGGLVPLFKLLDSKNGSLQHNAAFALYGVADNEDYVSDFIKVGGVQKLQDGEFIVQATKDCVAKTLKRLEEKINGRVLKHLLYLMRVGEQSVQRRVALALAHLCAPEDQRAIFIDNNGLDLLLDLLISMSPKHQQDGSAALYKLANKAAALSPMDAAPPSPTPQVYLGEQYVNSSTLSDVTFLVEELLCLLLRMHFVQCLMAGIGKRMQETLKFQISDGRSLNS

SEQ ID NO: 187511 - protein, 241 aa, Zea Mays
MLQSADVQLREMSAFALGRLAQDTHNQAGIAYNGGLVPLFKLLDSKNGSLQHNAAFALYGVADNEDYVSDFIKVGGVQKLQDGEFIVQATKDCVAKTLKRLEEKINGRVLKHLLYLMRVGEQSVQRRVALALAHLCAPEDQRAIFIDNNGLDLLLDLLISMSPKHQQDGSAALYKLANKAAALSPMDAAPPSPTPQVYLGEQYVNSSTLSDVTFLVEGWYYFTTLISSVDTLNNSFLSCPR

SEQ ID NO: 187512 - protein, 784 aa, Zea Mays
MEAEQQKQQRPRQRPRRKGQKRKLEDEASAATAAAASSLGSAGADDDNEEEDGSAGTPEICRHSHAALAREVRAQVDVLIRCASSWRHADRAAAKRATHVLAELAKNEEVVNMIVEGGAVAALVCHLEEPAVAAQTQEEQQLRPFELEVEKGAAFTLGLLAVKPEHQQFIVDAGALPPLVKLLKRQRSTTNSRMVNSVIKRAADAITNLAHENSNIKTRVRMEGGIPPLVELLESQDLKVQRAAAGALRTLAFKNDENKTQIVQCNALPTLILMLRSEDAAIHYEAVGVIGNLVHSSPNIKKEVLNAGALQPVIGLLSSCCTESQREAALLLGQFASADSDCKVHIVQRGAVRPLIEMLQSADVQLREMSAFALGRLAQDTHNQAGIAYNGGLVPLFKLLDSKNGSLQHNAAFALYGVADNEDYVSDFIKVGGVQKLQDGEFIVQATKDCVAKTLKRLEEKINGRVLKHLLYLMRVGEQSVQRRVALALAHLCAPEDQRAIFIDNNGLDLLLDLLISMSPKHQQDGSAALYKLANKAAALSPMDAAPPSPTPQVYLGEQYVNSSTLSDVTFLVEGKRFYAHRIALLASSDAFRAMFDGGYREKDARDIEIPNIRWEVFELMMRFIYTGSVQINSEISQDLLRAADQYLLEGLKRLCEYTIAKDVNLDNVSDMYDLSEAFHAVSLRHTCILYILEHFNKICTRAGDPQFSNQGTEFIKKSKSKRQELADLMSPNSLAPTPSSDQSCWRSCTVKFLALSVQWYLFWVHGGAVLEINISNVTKFSKI

SEQ ID NO: 187513 - protein, 73 aa, Zea Mays
MPRSGAPPIAVGPWRLGALCCSIVWLVQHCSRATLAVAAVQLAPVAVSPRPPSRSRLIPGGSRPPICEVEVEI

SEQ ID NO: 187514 - protein, 232 aa, Zea Mays
MRMNIRSPTSSLPILTTPFALFCCLKPRWHLAGHLSLTATCRHGATCGVPVVQPAREHHVRKGEAIDAGGHEPTPVPHQGHDTLAAAAGHGLPGAVAREHDAEAPGQRCHNRLCPDPAGRAGARSLGHGHARARHDGGCSACEAHGDGLIGHRRRQHQQADGPQRHRRVPALDGRPEAVQQAPSTAHPEAPVLGDDVAHRGAGLRTRPTSCRRQTERPRSSRTRCNEPPFNS

SEQ ID NO: 187515 - protein, 343 aa, Zea Mays
MTPSQTDVNVVKGLKIYEDAFTTSEIMKVADFINEIRQAGRNGELSGETFIFFNKQIKGNKREIIQLGVPLFQPTTEDANCHTEPIPLVLQAVIDHLVLWRLIPESRKPNSVVINFFDEDEHSQPYFKPPHLDNPICTLLLSETTMAFGRSLVTDSNGNYKGPLTLSLKQGSLLVMRGNSADMARHVVCPSSNRRVSITFARVRPSTPVDMSPLPSPTKAMTPWQPQPVTASQVPSPVSMTQKPPVSGAIIGYAPTPQAVLAPAAWGMAMRAPVMMVAAAPARPMVMASSGTGGGNISKRMGRSGTGVFLPWTVGPKRYNKHLPPRIQKRRFSAMMSPIEAQG

SEQ ID NO: 187516 - protein, 89 aa, Zea Mays
MHACDKEASHIYICCILCGPDQLNMYRDQEPVGSSSSTSSRSVLPAQTDTGLALVHERASGVIPKRTPFAEKERLRFGGVSSALIYCEI

SEQ ID NO: 187517 - protein, 138 aa, Zea Mays
MIPLYHYQHKHPHNFVFLGLFTLCLSFSIGVACANTQGKIVLEALVLTAGVVVSLTAYAFWASKKGFLPTGTRVGGLVRWARGSGLLRLHPVRHREPDQAPHLRRVHLGVGWAVPRHPEPVPLHPEHAQEHAIRQLAS

SEQ ID NO: 187518 - protein, 160 aa, Zea Mays
MIPLYHYQHKHPHNFVFLGLFTLCLSFSIGVACANTQGKIVLEALVLTAGVVVSLTAYAFWASKKGKEFGYLGPILSSALTILVLTSFLQVFFPLGPVSVGLFGGLGALVFSGFILYDTENLIKRHTYDEYIWASVGLYLDILNLFLSILNMLRSMQSDN

SEQ ID NO: 187519 - protein, 161 aa, Zea Mays
MMIPLYHYQHKHPHNFVFLGLFTLCLSFSIGVACANTQGKIVLEALVLTAGVVVSLTAYAFWASKKGKEFGYLGPILSSALTILVLTSFLQVFFPLGPVSVGLFGGLGALVFSGFILYDTENLIKRHTYDEYIWASVGLYLDILNLFLSILNMLRSMQSDN

SEQ ID NO: 187520 - protein, 336 aa, Zea Mays
MAFPTAAAVLLNENMQIHKGNRVDAPSAKPLKSSAKPERKALQDVSNIPKGTALKNRSTVKEGSALKERPALHNVSNNLKERSILKERPPLQDVSNTRNERSILKEKSALCSHEAIKNPVNIFADDEETKGCHEWAKDGMEGTHFTGNDSQKLDKDVQHKRIKKKVAKVTSALYGWSHEVPKFSEESKELELEPEILPDITRCMSTSGKRDDAPSAKRLKPKLQEPKALQVQDLSNTVKGSPSLCSHEAVKNPVKIFTVEETKKCHESANDVSEGTHFTGNDRQKLDKDVQGKRDKTQLVEDSPTDDELDDYPFLDNSPVKFELKDESVIPDIGAI

SEQ ID NO: 187521 - protein, 391 aa, Zea Mays
MLQSTEAVLQVIPYVKVFSRVAPEQKELVLTTFKSVGRVTLMCGDGTNDVGALKQAHVGVALLNAEPVQKVDSKSKAENKSGKLKNKKPANEASSQVTPVANSSGKASSSLSLTAAERQREKLQKMLDEMNDESDGRSAPIVKLGDASMASPFTAKHASVTPTLDIIRQGRSTLVTTLQMFKILGLNCLATAYVLSVMYLDGVKLGDVQATISGVFTAAFFLFISNARPLQTLSAERPQPNIFFLITAVNEASKHMPEECIEPDSDFHPNLVNTVSYMVNMMIQVATFAVNYMGHPFNQSISENKPFKYALYGAVAFFTVITSDMFRGLNDYMKLEPLPEGMRGKLMLWAILMFCGCYGWERLLRWVFPGKIPAWEKRQKQAVASLEKKHH

SEQ ID NO: 187522 - protein, 584 aa, Zea Mays
MSVIVRIQQKFYAFIKGAPETIQEKLVDLPAAYVETYKKYTRQGSRVLALAYKLLPEMPVSEVRSLERDQVESDLTFAGFAVFNCPIRSDSGAVLQELGQSSHDLVMITGDQALTACHVASQVHISSKPVLILTRIKTGGFEWVSPDETDRAPYSAVEVAVLSESHDLCINGDCFEMLQSTEAVLQVIPYVKVFSRVAPEQKELVLTTFKSVGRVTLMCGDGTNDVGALKQAHVGVALLNAEPVQKVDSKSKAENKSGKLKNKKPANEASSQVTPVANSSGKASSSLSLTAAERQREKLQKMLDEMNDESDGRSAPIVKLGDASMASPFTAKHASVTPTLDIIRQGRSTLVTTLQMFKILGLNCLATAYVLSVMYLDGVKLGDVQATISGVFTAAFFLFISNARPLQTLSAERPQPNIFCAYVLLSILGQFAMHIFFLITAVNEASKHMPEECIEPDSDFHPNLVNTVSYMVNMMIQVATFAVNYMGHPFNQSISENKPFKYALYGAVAFFTVITSDMFRGLNDYMKLEPLPEGMRGKLMLWAILMFCGCYGWERLLRWVFPGKIPAWEKRQKQAVASLEKKHH

SEQ ID NO: 187523 - protein, 527 aa, Zea Mays
MPVSEVRSLERDQVESDLTFAGFAVFNCPIRSDSGAVLQELGQSSHDLVMITGDQALTACHVASQVHISSKPVLILTRIKTGGFEWVSPDETDRAPYSAVEVAVLSESHDLCINGDCFEMLQSTEAVLQVIPYVKVFSRVAPEQKELVLTTFKSVGRVTLMCGDGTNDVGALKQAHVGVALLNAEPVQKVDSKSKAENKSGKLKNKKPANEASSQVTPVANSSGKASSSLSLTAAERQREKLQKMLDEMNDESDGRSAPIVKLGDASMASPFTAKHASVTPTLDIIRQGRSTLVTTLQMFKILGLNCLATAYVLSVMYLDGVKLGDVQATISGVFTAAFFLFISNARPLQTLSAERPQPNIFCAYVLLSILGQFAMHIFFLITAVNEASKHMPEECIEPDSDFHPNLVNTVSYMVNMMIQVATFAVNYMGHPFNQSISENKPFKYALYGAVAFFTVITSDMFRGLNDYMKLEPLPEGMRGKLMLWAILMFCGCYGWERLLRWVFPGKIPAWEKRQKQAVASLEKKHH

SEQ ID NO: 187524 - protein, 923 aa, Zea Mays
MNSPFHLIFFCFSIYPILIACSLFRWVKVPGTELLPGDIVSIGRSTSGEDRSVPADMLLLAGSAIVNEAILTGESTPQWKVSIAGRGPDDMLSIRRDKNHILFGGTKVLQHTADKSVNLRSPDGGCLAFVLRTGFETSQGKLMRTILFSTERVTANNKESGLFILFLLFFAIIASGYVLVKGLEDPTRSRYKLLLSCSLIITSVIPPELPMELSIAVNTSLIALARHGIFCTEPFRIPFAGKTGTLTSDDMEFQGIVTSEGDDLISDANKLPLRTQEVLSSCHALVFVDNKLVGDPLEKAAIKGIDWIYTSDEKAMSKKPGGQPVQIVHRYHFASHLKRMSVIVRIQQKFYAFIKGAPETIQEKLVDLPAAYVETYKKYTRQGSRVLALAYKLLPEMPVSEVRSLERDQVESDLTFAGFAVFNCPIRSDSGAVLQELGQSSHDLVMITGDQALTACHVASQVHISSKPVLILTRIKTGGFEWVSPDETDRAPYSAVEVAVLSESHDLCINGDCFEMLQSTEAVLQVIPYVKVFSRVAPEQKELVLTTFKSVGRVTLMCGDGTNDVGALKQAHVGVALLNAEPVQKVDSKSKAENKSGKLKNKKPANEASSQVTPVANSSGKASSSLSLTAAERQREKLQKMLDEMNDESDGRSAPIVKLGDASMASPFTAKHASVTPTLDIIRQGRSTLVTTLQMFKILGLNCLATAYVLSVMYLDGVKLGDVQATISGVFTAAFFLFISNARPLQTLSAERPQPNIFCAYVLLSILGQFAMHIFFLITAVNEASKHMPEECIEPDSDFHPNLVNTVSYMVNMMIQVATFAVNYMGHPFNQSISENKPFKYALYGAVAFFTVITSDMFRGLNDYMKLEPLPEGMRGKLMLWAILMFCGCYGWERLLRWVFPGKIPAWEKRQKQAVASLEKKHH

SEQ ID NO: 187525 - protein, 673 aa, Zea Mays
MEFQGIVTSEGDDLISDANKLPLRTQEVLSSCHALVFVDNKLVGDPLEKAAIKGIDWIYTSDEKAMSKKPGGQPVQIVHRYHFASHLKRMSVIVRIQQKFYAFIKGAPETIQEKLVDLPAAYVETYKKYTRQGSRVLALAYKLLPEMPVSEVRSLERDQVESDLTFAGFAVFNCPIRSDSGAVLQELGQSSHDLVMITGDQALTACHVASQVHISSKPVLILTRIKTGGFEWVSPDETDRAPYSAVEVAVLSESHDLCINGDCFEMLQSTEAVLQVIPYVKVFSRVAPEQKELVLTTFKSVGRVTLMCGDGTNDVGALKQAHVGVALLNAEPVQKVDSKSKAENKSGKLKNKKPANEASSQVTPVANSSGKASSSLSLTAAERQREKLQKMLDEMNDESDGRSAPIVKLGDASMASPFTAKHASVTPTLDIIRQGRSTLVTTLQMFKILGLNCLATAYVLSVMYLDGVKLGDVQATISGVFTAAFFLFISNARPLQTLSAERPQPNIFCAYVLLSILGQFAMHIFFLITAVNEASKHMPEECIEPDSDFHPNLVNTVSYMVNMMIQVATFAVNYMGHPFNQSISENKPFKYALYGAVAFFTVITSDMFRGLNDYMKLEPLPEGMRGKLMLWAILMFCGCYGWERLLRWVFPGKIPAWEKRQKQAVASLEKKHH

SEQ ID NO: 187526 - protein, 608 aa, Zea Mays
MSKKPGGQPVQIVHRYHFASHLKRMSVIVRIQQKFYAFIKGAPETIQEKLVDLPAAYVETYKKYTRQGSRVLALAYKLLPEMPVSEVRSLERDQVESDLTFAGFAVFNCPIRSDSGAVLQELGQSSHDLVMITGDQALTACHVASQVHISSKPVLILTRIKTGGFEWVSPDETDRAPYSAVEVAVLSESHDLCINGDCFEMLQSTEAVLQVIPYVKVFSRVAPEQKELVLTTFKSVGRVTLMCGDGTNDVGALKQAHVGVALLNAEPVQKVDSKSKAENKSGKLKNKKPANEASSQVTPVANSSGKASSSLSLTAAERQREKLQKMLDEMNDESDGRSAPIVKLGDASMASPFTAKHASVTPTLDIIRQGRSTLVTTLQMFKILGLNCLATAYVLSVMYLDGVKLGDVQATISGVFTAAFFLFISNARPLQTLSAERPQPNIFCAYVLLSILGQFAMHIFFLITAVNEASKHMPEECIEPDSDFHPNLVNTVSYMVNMMIQVATFAVNYMGHPFNQSISENKPFKYALYGAVAFFTVITSDMFRGLNDYMKLEPLPEGMRGKLMLWAILMFCGCYGWERLLRWVFPGKIPAWEKRQKQAVASLEKKHH

SEQ ID NO: 187527 - protein, 1008 aa, Zea Mays
MWPQLQLQELIGHYGKGTGYGTEAKISTAVDKWGRNVFEYPQPTFQKLMKEQIMEPFFVFQVFCVALWCLDAYWYYSLFTLFMLFLFESTMAKNRLKTLTELRRVKVDSQIVLTYRCGKWVKVPGTELLPGDIVSIGRSTSGEDRSVPADMLLLAGSAIVNEAILTGESTPQWKVSIAGRGPDDMLSIRRDKNHILFGGTKVLQHTADKSVNLRSPDGGCLAFVLRTGFETSQGKLMRTILFSTERVTANNKESGLFILFLLFFAIIASGYVLVKGLEDPTRSRYKLLLSCSLIITSVIPPELPMELSIAVNTSLIALARHGIFCTEPFRIPFAGKVDICCFDKTGTLTSDDMEFQGIVTSEGDDLISDANKLPLRTQEVLSSCHALVFVDNKLVGDPLEKAAIKGIDWIYTSDEKAMSKKPGGQPVQIVHRYHFASHLKRMSVIVRIQQKFYAFIKGAPETIQEKLVDLPAAYVETYKKYTRQGSRVLALAYKLLPEMPVSEVRSLERDQVESDLTFAGFAVFNCPIRSDSGAVLQELGQSSHDLVMITGDQALTACHVASQVHISSKPVLILTRIKTGGFEWVSPDETDRAPYSAVEVAVLSESHDLCINGDCFEMLQSTEAVLQVIPYVKVFSRVAPEQKELVLTTFKSVGRVTLMCGDGTNDVGALKQAHVGVALLNAEPVQKVDSKSKAENKSGKLKNKKPANEASSQVTPVANSSGKASSSLSLTAAERQREKLQKMLDEMNDESDGRSAPIVKLGDASMASPFTAKHASVTPTLDIIRQGRSTLVTTLQMFKILGLNCLATAYVLSVMYLDGVKLGDVQATISGVFTAAFFLFISNARPLQTLSAERPQPNIFFLITAVNEASKHMPEECIEPDSDFHPNLVNTVSYMVNMMIQVATFAVNYMGHPFNQSISENKPFKYALYGAVAFFTVITSDMFRGLNDYMKLEPLPEGMRGKLMLWAILMFCGCYGWERLLRWVFPGKIPAWEKRQKQAVASLEKKHH

SEQ ID NO: 187528 - protein, 943 aa, Zea Mays
MLFLFESTMAKNRLKTLTELRRVKVDSQIVLTYRCGKWVKVPGTELLPGDIVSIGRSTSGEDRSVPADMLLLAGSAIVNEAILTGESTPQWKVSIAGRGPDDMLSIRRDKNHILFGGTKVLQHTADKSVNLRSPDGGCLAFVLRTGFETSQGKLMRTILFSTERVTANNKESGLFILFLLFFAIIASGYVLVKGLEDPTRSRYKLLLSCSLIITSVIPPELPMELSIAVNTSLIALARHGIFCTEPFRIPFAGKVDICCFDKTGTLTSDDMEFQGIVTSEGDDLISDANKLPLRTQEVLSSCHALVFVDNKLVGDPLEKAAIKGIDWIYTSDEKAMSKKPGGQPVQIVHRYHFASHLKRMSVIVRIQQKFYAFIKGAPETIQEKLVDLPAAYVETYKKYTRQGSRVLALAYKLLPEMPVSEVRSLERDQVESDLTFAGFAVFNCPIRSDSGAVLQELGQSSHDLVMITGDQALTACHVASQVHISSKPVLILTRIKTGGFEWVSPDETDRAPYSAVEVAVLSESHDLCINGDCFEMLQSTEAVLQVIPYVKVFSRVAPEQKELVLTTFKSVGRVTLMCGDGTNDVGALKQAHVGVALLNAEPVQKVDSKSKAENKSGKLKNKKPANEASSQVTPVANSSGKASSSLSLTAAERQREKLQKMLDEMNDESDGRSAPIVKLGDASMASPFTAKHASVTPTLDIIRQGRSTLVTTLQMFKILGLNCLATAYVLSVMYLDGVKLGDVQATISGVFTAAFFLFISNARPLQTLSAERPQPNIFCAYVLLSILGQFAMHIFFLITAVNEASKHMPEECIEPDSDFHPNLVNTVSYMVNMMIQVATFAVNYMGHPFNQSISENKPFKYALYGAVAFFTVITSDMFRGLNDYMKLEPLPEGMRGKLMLWAILMFCGCYGWERLLRWVFPGKIPAWEKRQKQAVASLEKKHH

SEQ ID NO: 187529 - protein, 931 aa, Zea Mays
MNSPFHLIFFCFSIYPILIACSLFRWVKVPGTELLPGDIVSIGRSTSGEDRSVPADMLLLAGSAIVNEAILTGESTPQWKVSIAGRGPDDMLSIRRDKNHILFGGTKVLQHTADKSVNLRSPDGGCLAFVLRTGFETSQGKLMRTILFSTERVTANNKESGLFILFLLFFAIIASGYVLVKGLEDPTRSRYKLLLSCSLIITSVIPPELPMELSIAVNTSLIALARHGIFCTEPFRIPFAGKVDICCFDKTGTLTSDDMEFQGIVTSEGDDLISDANKLPLRTQEVLSSCHALVFVDNKLVGDPLEKAAIKGIDWIYTSDEKAMSKKPGGQPVQIVHRYHFASHLKRMSVIVRIQQKFYAFIKGAPETIQEKLVDLPAAYVETYKKYTRQGSRVLALAYKLLPEMPVSEVRSLERDQVESDLTFAGFAVFNCPIRSDSGAVLQELGQSSHDLVMITGDQALTACHVASQVHISSKPVLILTRIKTGGFEWVSPDETDRAPYSAVEVAVLSESHDLCINGDCFEMLQSTEAVLQVIPYVKVFSRVAPEQKELVLTTFKSVGRVTLMCGDGTNDVGALKQAHVGVALLNAEPVQKVDSKSKAENKSGKLKNKKPANEASSQVTPVANSSGKASSSLSLTAAERQREKLQKMLDEMNDESDGRSAPIVKLGDASMASPFTAKHASVTPTLDIIRQGRSTLVTTLQMFKILGLNCLATAYVLSVMYLDGVKLGDVQATISGVFTAAFFLFISNARPLQTLSAERPQPNIFCAYVLLSILGQFAMHIFFLITAVNEASKHMPEECIEPDSDFHPNLVNTVSYMVNMMIQVATFAVNYMGHPFNQSISENKPFKYALYGAVAFFTVITSDMFRGLNDYMKLEPLPEGMRGKLMLWAILMFCGCYGWERLLRWVFPGKIPAWEKRQKQAVASLEKKHH

SEQ ID NO: 187530 - protein, 616 aa, Zea Mays
MARFEVNGKSVQGVDLLRRRHWPSRLDFWPFLALYALWLLLAVPALDFTDALIILAALSAAHILTFLFTAWFVDFRAFVGYSKVKDIHAANTCKVTPAKFSGSKEIVPLHKQKNVASTSAAGETEEIYFDFRKQRFIYSAEKDNFLKLRYPTKELIGHYGKGTGYGTEAKISTAVDKWGRNVFEYPQPTFQKLMKEQIMEPFFVFQVFCVALWCLDAYWYYSLFTLFMLFLFESTMAKNRLKTLTELRRVKVDSQIVLTYRCGKWVKVPGTELLPGDIVSIGRSTSGEDRSVPADMLLLAGSAIVNEAILTGESTPQWKVSIAGRGPDDMLSIRRDKNHILFGGTKVLQHTADKSVNLRSPDGGCLAFVLRTGFETSQGKLMRTILFSTERVTANNKESGLFILFLLFFAIIASGYVLVKGLEDPTRSRYKLLLSCSLIITSVIPPELPMELSIAVNTSLIALARHGIFCTEPFRIPFAGKVDICCFDKTGTLTSDDMEFQGIVTSEGDDLISDANKLPLRTQEVLSSCHALVFVDNKLVGDPLEKAAIKGIDWIYTSDEKAMSKKPGGQPVQIVHRYHFASHLKRMSVIVRIQQKFYAFIKNFPKTAMSSLQEKN

SEQ ID NO: 187531 - protein, 214 aa, Zea Mays
MDVQDALQRDNSELSNTVRKLNRDVAKLEVFKKTLVQSLQEDDSSDNTAPRERAAAASNFSSAPSDEDSAFSTSKSSQVSETASSVSEENNQVDPDAPRRPPRPHVFLQSYNSTPRMTPPDSPPRRFASVSPPRRHSISVTSMNMFNDRSSGFSGQHSSPFDAPSQTGRTRVDGKEFFRQVRNRLSYEQFGAFLANVKELNAHRQTREDTLRQA

SEQ ID NO: 187532 - protein, 452 aa, Zea Mays
MDQQLHQVPSTVTHSVVSRIKNNTSGWLNNVSNVAASASGKLSVPSGAVTAVFHNSIYQGSLPVPSKANALEHLLVYSPSGHVIQHELLPSSGSESSGSSPRVGSGPNLQLQDDEMHVTAEPIQWWDVCRRTNWPERDENIANIVLYNQRSSMMAMGASDCEDSEHSDSTASNDGISGKEIMRIRERSSWYLSNAEVQINSWRIPIWQKSKICFYVMGYPAAELVESVSSGGGEIEIEKLPLHEVEIRRRELLPVFKQFQYSDRHSSDRNIANGGFQNALSHISNAQNSSVKDNGEYETKPVALSGFYAENGNNGYISTPPETKASIRSLSSYSLLDGHVDGMLSPNSASHKPETTNNSVLSNAASTDVQNGCLTTVDSGQQEASHSHSSVEFTQYFQEGYCKISELDDCRELTEAVTDADSSSSHCEREKPEEDGDNDDLLGGVFAFSEEG

SEQ ID NO: 187533 - protein, 461 aa, Zea Mays
MDQQLHQVPSTVTHSVVSRIKNNTSGWLNNVSNVAASASGKLSVPSGAVTAVFHNSIYQGSLPVPSKANALEHLLVYSPSGHVIQHELLPSSGSESSGSSPRVGSGPNLQLQDDEMHVTAEPIQWWDVCRRTNWPERDENIANIVLYNQRSSMMAMGASDCEDSEHSDSTASNDGISGKEIMRIRERSSWYLSNAEVQINSWRIPIWQKSKICFYVMGYPAAELVESVSSGGGEIEIEKLPLHEVEIRRRELLPVFKQFQYSDRHSSDRNIANGGFQNALSHISNAQNSSVKDNGEYETKPVALSGFYADTRKTANTNENGNNGYISTPPETKASIRSLSSYSLLDGHVDGMLSPNSASHKPETTNNSVLSNAASTDVQNGCLTTVDSGQQEASHSHSSVEFTQYFQEGYCKISELDDCRELTEAVTDADSSSSHCEREKPEEDGDNDDLLGGVFAFSEEG

SEQ ID NO: 187534 - protein, 728 aa, Zea Mays
MDIPRSLFEEKLEHMKESKGLKNDTDLTASDLKELVGQYKEVYLSAKGEPFPSDPKKQLELAVLAVFNSWESPRAKKYRSINQITGLRGTAVNVQCMVFGNMGNTSGTGVLFTRNPNTGEKKLYGEFLVNAQGEDVVAGIRTPEDLDAMKNLMPQAYDELVENCNILESHYKEMQDIEFTVQENRLWMLQCRTGKRTGKSAVKIAVDMVNEGLVEPRSAIKMVEPGHLDQLLHPQFENPSAYKDQVIATGLPASPGAAVGQVVFTAEDAEAWHSQGKAAILVRAETSPEDVGGMHAAVGILTERGGMTSHAAVVARGWGKCCVSGCSGIRVNDAEKLVTIGGHVLREGEWLSLNGSTGEVILGKQPLSPPALSGDLGTFMAWVDDVRKLKVLANADTPDDALTARNNGAQGIGLCRTEHMFFASDERIKAVRQMIMAPTLELRQQALDRLLPYQRSDFEGIFRAMDGLPVTIRLLDPPLHEFLPEGNIEDIVSELCAETGANQEDALARIEKLSEVNPMLGFRGCRLGISYPELTEMQARAIFEAAIAMTNQGVQVFPEIMVPLVGTPQELGHQVTLIRQVAEKVFANVGKTIGYKVGTMIEIPRAALVADEIAEQAEFFSFGTNDLTQMTFGYSRDDVGKFIPVYLAQGILQHDPFEVLDQRGVGELVKFATERGRKARPNLKVGICGEHGGEPSSVAFFAKAGLDYVSCSPFRVPIARLAAAQVLV

SEQ ID NO: 187535 - protein, 762 aa, Zea Mays
MELLSVCQASRCFGLKVQKKMMKVTLRTKQTIYVMDIPRSLFEEKLEHMKESKGLKNDTDLTASDLKELVGQYKEVYLSAKGEPFPSDPKKQLELAVLAVFNSWESPRAKKYRSINQITGLRGTAVNVQCMVFGNMGNTSGTGVLFTRNPNTGEKKLYGEFLVNAQGEDVVAGIRTPEDLDAMKNLMPQAYDELVENCNILESHYKEMQDIEFTVQENRLWMLQCRTGKRTGKSAVKIAVDMVNEGLVEPRSAIKMVEPGHLDQLLHPQFENPSAYKDQVIATGLPASPGAAVGQVVFTAEDAEAWHSQGKAAILVRAETSPEDVGGMHAAVGILTERGGMTSHAAVVARGWGKCCVSGCSGIRVNDAEKLVTIGGHVLREGEWLSLNGSTGEVILGKQPLSPPALSGDLGTFMAWVDDVRKLKVLANADTPDDALTARNNGAQGIGLCRTEHMFFASDERIKAVRQMIMAPTLELRQQALDRLLPYQRSDFEGIFRAMDGLPVTIRLLDPPLHEFLPEGNIEDIVSELCAETGANQEDALARIEKLSEVNPMLGFRGCRLGISYPELTEMQARAIFEAAIAMTNQGVQVFPEIMVPLVGTPQELGHQVTLIRQVAEKVFANVGKTIGYKVGTMIEIPRAALVADEIAEQAEFFSFGTNDLTQMTFGYSRDDVGKFIPVYLAQGILQHDPFEVLDQRGVGELVKFATERGRKARPNLKVGICGEHGGEPSSVAFFAKAGLDYVSCSPFRVPIARLAAAQVLV

SEQ ID NO: 187536 - protein, 531 aa, Zea Mays
MHQGQGSDLLRPPIGRSAEAPARQSRQHCSPLRAVVDAAPIQTTKKRVFHFGKGKSEGNKTMKELVMDIPRSLFEEKLEHMKESKGLKNDTDLTASDLKELVGQYKEVYLSAKGEPFPSDPKKQLELAVLAVFNSWESPRAKKYRSINQITGLRGTAVNVQCMVFGNMGNTSGTGVLFTRNPNTGEKKLYGEFLVNAQGEDVVAGIRTPEDLDAMKNLMPQAYDELVENCNILESHYKEMQDIEFTVQENRLWMLQCRTGKRTGKSAVKIAVDMVNEGLVEPRSAIKMVEPGHLDQLLHPQFENPSAYKDQVIATGLPASPGAAVGQVVFTAEDAEAWHSQGKAAILVRAETSPEDVGGMHAAVGILTERGGMTSHAAVVARGWGKCCVSGCSGIRVNDAEKLVTIGGHVLREGEWLSLNGSTGEVILGKQPLSPPALSGDLGTFMAWVDDVRKLKVLANADTPDDALTARNNGAQGIGLCRTEHMFFASDERIKAVRQMIMAPTLELRQQALDRLLPYQRSWTRGEWASW

SEQ ID NO: 187537 - protein, 918 aa, Zea Mays
MHQGQGSDLLRPPIGRSAEAPARQSRQHCSPLRAVVDAAPIQTTKKRVFHFGKGKSEGNKTMKELLGGKGANLAEMASIGLSVPPGFTVSTEACQQYQDAGCALPAGLWAEIVDGLQWVEEYMGATLGDPQRPLLLSVRSGAAVSMPGMMDTVLNLGLNDEVAAGLAAKSGERFAYDSFRRFLDMFGNVVMDIPRSLFEEKLEHMKESKGLKNDTDLTASDLKELVGQYKEVYLSAKGEPFPSDPKKQLELAVLAVFNSWESPRAKKYRSINQITGLRGTAVNVQCMVFGNMGNTSGTGVLFTRNPNTGEKKLYGEFLVNAQGEDVVAGIRTPEDLDAMKNLMPQAYDELVENCNILESHYKEMQDIEFTVQENRLWMLQCRTGKRTGKSAVKIAVDMVNEGLVEPRSAIKMVEPGHLDQLLHPQFENPSAYKDQVIATGLPASPGAAVGQVVFTAEDAEAWHSQGKAAILVRAETSPEDVGGMHAAVGILTERGGMTSHAAVVARGWGKCCVSGCSGIRVNDAEKLVTIGGHVLREGEWLSLNGSTGEVILGKQPLSPPALSGDLGTFMAWVDDVRKLKVLANADTPDDALTARNNGAQGIGLCRTEHMFFASDERIKAVRQMIMAPTLELRQQALDRLLPYQRSDFEGIFRAMDGLPVTIRLLDPPLHEFLPEGNIEDIVSELCAETGANQEDALARIEKLSEVNPMLGFRGCRLGISYPELTEMQARAIFEAAIAMTNQGVQVFPEIMVPLVGTPQELGHQVTLIRQVAEKVFANVGKTIGYKVGTMIEIPRAALVADEIAEQAEFFSFGTNDLTQMTFGYSRDDVGKFIPVYLAQGILQHDPFEVLDQRGVGELVKFATERGRKARPNLKVGICGEHGGEPSSVAFFAKAGLDYVSCSPFRVPIARLAAAQVLV

SEQ ID NO: 187538 - protein, 767 aa, Zea Mays
MHQGQGSDLLRPPIGRSAEAPARQSRQHCSPLRAVVDAAPIQTTKKRVFHFGKGKSEGNKTMKELLGGKGANLAEMASIGLSVPPGFTVSTEACQQYQDAGCALPAGLWAEIVDGLQWVEEYMGATLGDPQRPLLLSVRSGAAVSMPGMMDTVLNLGLNDEVAAGLAAKSGERFAYDSFRRFLDMFGNVVMDIPRSLFEEKLEHMKESKGLKNDTDLTASDLKELVGQYKEVYLSAKGEPFPSDPKKQLELAVLAVFNSWESPRAKKYRSINQITGLRGTAVNVQCMVFGNMGNTSGTGVLFTRNPNTGEKKLYGEFLVNAQGEDVVAGIRTPEDLDAMKNLMPQAYDELVENCNILESHYKEMQDIEFTVQENRLWMLQCRTGKRTGKSAVKIAVDMVNEGLVEPRSAIKMVEPGHLDQLLHPQFENPSAYKDQVIATGLPASPGAAVGQVVFTAEDAEAWHSQGKAAILVRAETSPEDVGGMHAAVGILTERGGMTSHAAVVARGWGKCCVSGCSGIRVNDAEKLVTIGGHVLREGEWLSLNGSTGEVILGKQPLSPPALSGDLGTFMAWVDDVRKLKVLANADTPDDALTARNNGAQGIGLCRTEHMFFASDERIKAVRQMIMAPTLELRQQALDRLLPYQRSDFEGIFRAMDGLPVTIRLLDPPLHEFLPEGNIEDIVSELCAETGANQEDALARIEKLSEVNPMLGFRGCRLGISYPELTEMQARAIFEAAIAMTNQGVQVFPEIMVPLVGTPQLIIIADVW

SEQ ID NO: 187539 - protein, 92 aa, Zea Mays
MHLVGMNTLLILLSLGPGYPIPGAIDITRVDSFFYVNYTLDFMLYQGPICSTYWCKFLLSDKLPVLLDRNLNAFAIQRARGLHEMKPRALQC

SEQ ID NO: 187540 - protein, 273 aa, Zea Mays
MSGSLPSLNPSRRRRPTPPQPPPMSRRPACSLLPLLRSRRCLYDATTARPFTSVSVPPDVISSTWPPHSPSPLHPPPDPAGTWCSASCSSTSPALPPFTASHLRAAVSLLATSLTALPGPDPDPVSALHDHSFPTLLAVSPLASLELLSLLRSRPRLGLAVFSFRRVLSPVPSITASLTTASRSSTRWSAIPGAVRLTWTRTTSSSPCSVAPSSLTTWSARSSRWTLLANPALLVLTMQSSLVTSPHGCGTKWKRRFRRWCRSMLLQMLLRIS

SEQ ID NO: 187541 - protein, 90 aa, Zea Mays
MFKCFSFVSFEFSIPIPACTPSSFQFWSLHARHLLVLLRERTLHLLTRIDGRYHIARQSMPIWQPAFRSSFCCFPSWSNLSILIGTSRGN

SEQ ID NO: 187542 - protein, 705 aa, Zea Mays
MRAAQALWLLPVQSTIRAMAMAFAAASAWSLSLTAFSLPLPQSLRPKPSQLLHGATSSFPRPRRCGWGAVVRCAKRTGKQRYPSEKKRLNRRKQELLRQAAPEEGSKGRESGYWRLSKLAVPARDDPGKDFTGISLPLLQAIAKAIKFPVPSMLPDEAFTVIRKSFDARKVLKEPQFTYIVDMDVKKILNIEPRAWDFIARLEPKLGVVEYMTEEKLAVDLVSMLNVSSKGSNNVLGIRDTHSGMIYRQQKKPRVAVIGSGPSGLFASLVLGELGAEVTLLERGQPVEQRGRDIGALAVRRILQPESNFCFGEGGAGTWSDGKLMTRIGKNTDGVQAVMKTFVHFGAPPNILVDGKPHLGTDKLVPLLRKFRHHLRELGVTIRFNARVDDLIVEDGQVKGIVVSDVELQPGPASQKLAFDAVVMAVGHSARDTYSMLWQHNVDMSPKSFAVGLRIEHPQELINSIQYSELAAEVQRGRGRIPVADYKIVKSVGERDAENELDIAEPTRSCYSFCMCPGGQVVLTSTNPSELCINGMSFSRRASKWANSALVVTVSSHDFKPFQSHGPLAGVEFQRQFERRAAMMGGGNFVVPAQCVTDFISNRLSVTTLPPSSYRLGVRPSNLHELFPPYITEALQESLIMIDREMPGFVSSKALLHGVETRTSSPLQISRHGETYESTSLRGLYPTGEGAGYAGGILSAAVDAC
